United States Patent Application Publication US 2020/0377945 A1 - sequence listing, part 49

SEQ ID NO: 10931 - DNA, 116453 bp, Unknown
  gut microbiota DNA sequence
tccggatgagaacgaaaagagcattaatcagtgtatttgacaaaagtgggattgttgattttgctaaatcgctaaattctatgggttgggaaattatttctaccgggggaacctctaagaaattgaaagaagagggactacaggtgaaagatatttcagatttaacccaattcccagagtgttttgatggaagagtgaaaacccttcacccaaatgtagagggaggtatcttagcgatacgagacaacgagaaacataagcaacagatgaccgaacttgggatagaacctattgatatggtcgtttgtaatctatatccttttaaggaaaccattcttaaagcaggagtttcacacgaagaaattatcgagaatatcgatattggcggaccgactatgattcgtgccgcagcgaagaattatcctttcgtgacggtgattacagatccgaaagattacacaaaagtaatcgaggaaattcaagctcatggggatacttcacttgaaaccaaagagctattagctgctaaagtatttattcatacttcacattatgatgctctaatagccaactatttctctaaacgattaaatattcaatcaccgaagaccttgaccttaacgttcgaaaagaaacaagatcttcgttatggagagaatccacaccagtcagccactttctatacccaaattcaggagacagagggcacgttaaccggggcggttcagttacatggaaaagaattatcttacaataatatcggtgacaccgacggggctttagaaaccttgaaagagtttgaagaaccgacggttgttgctgcaaaacacgcaaatccttgtggtgttggtagtgctgcgactcttgcagaggccttcaaaaaagcttacgaggctgatcctgtttctatttttggtggaatcattgcggtaaaccgggaagtagacaaggcaacggcagaagtcatgtcccctattttcctggaagtgattgtagctccttctttctcagaagaagctttgactattcttaccaaaaagaagaatctgagattattacaggtatctaatattagtaagagagattatacttcacccaaagcaaaaacagtattgggaggtctgttgattcaagatatggaccaacaattacttgacggtgagttgaaatacgtcaccaatcgtcgtccttcggaaaaagaactagaagacttgttgtttgcatggaaagttgtcaagcatactaaatctaatgcaattgcgattgcaaaagacaaatgtaccacgggagttggtccaggacaagtaagcagaatctgggcattggaaaatgccattcgtcaaggcggggagagaattaaggatagcgtgatggcatcggatgccttcttccctttcgctgattgtgttgaggctgctcacaaagctggcatcaccgcaatcattcaaccgggcggatctatccatgatcaggattcgattgatgcggccaacaagtataatattgcgatgatttttactggaatgagacacttcaaacattaattgattatgggtttgttttcttttttaacacaagatatagcgatcgacttgggtacggcgaatacgatcatcatcatgaatgacaagatggttgtaaacgagccatccattgttgccgtcgataaaaaaacagagaaggtaattgctattggtgaaagagctcgccagatgcagggtaagacgcacgagtatataaagaccattcgcccgttgagagacggtgtgattgcggactttaatgcggccgaacagatgattcggggtatgatcaagatggcaaacggaaagagcaagtttttctctccttctttgcgtatcgtggtttgtataccttccggaagtacggaggttgaactacgtgccgtacgtgactctgccgaacacgccggaggacgtgatgtttatatgatttacgagccgatggcagccgctttgggtatcggcttggacgtggaagctccagagggtaacatgatcgtggatataggtggtggtaccacggagatcgccgtgatctctttgggaggtatcgttaccaacaagtctatccgtattgccggtgatgacttgacggatgatattcaagaatacatgagacatcaacacaatatcaagattggagaacgtacagcagaagaaattaaaattcatgttggttctgctttgtccgaactggatgaacctcctgcagatttcgtggtgcaaggaccgaatcagatgacctctcttccggttgaagtacctgtttcctatcaagagatagctcattgtatcgagaaatccatttctaagattgaaattgcaatcctagccgctttggaacagactcctcccgagctgtatgcagacattgtgaacaaaggaatatatttggctggtggtggtgcattgttgcgcgggttggataaacgtttgaccgacaagctaaacattccattccatattgctgaagatccattgcgagccgtggccagaggtacgggaattgcactaaagaacgtagacaggttctcattccttataagatagtgatgtgaaagagattataaaactgatattaaaatatcattttactattatttttatattactggaaatcgtaagtttctctctgattattcgtcataacgaatatcagagagcaattttctctgaaagtgcttctactctattcgggaatatctcgtcaacgatcacgagtataaaagattattttcgtttaaaagagatgaacgaatctttggcaaatgaaaatatcctgctgaaaaatcgtttggaaaagtatgagtttttacgagatacgattatccatggtacggttgtgcaagatagcatacctgtttacgagtatatcggggcaaaacaggtcaatgcgacatataaccggacgaaaaattacattactttaaatcaaggacgaaaaaacggtcttcagaaagaaatggccgtttgtacacctgaagggatcgtgggacttattcaagatttaagtgatcattttgccgtagtcatccccttgatcaacgtggattcccgaatttcagccaaaataaaaaagaataactattacggttctttgcaatgggatggtaatgattatgcttattcttatctgaatgatattccctatcacgtggaagtaaatgccggggacacgattgttacttccggtctctcaaaaatctttccagaaggaattgtcgtgggatatgtggaatctgttgataaggaaactgcgaacttcttaaagataaaggtcaaactagccgttgatttcaaacgcataaaccatgtttatgtcatattgaataacaagaaaaatgagcaaacaagtttagaagccataaactatcatgaataatataaactatttcattcatttgttgatactttctttattacagattgtaatcgtggataatattcaccttggctcctatttctatttgaatatttatattctggctctttacattttaccttataagatgaaaggtataccattactgttattcgggttctttttaggtttaatcatggatttggcagataacacagtcggtattcatgctgcggcatctactttcatcgcttatattcgtccccggttattgcaattgacctctacccgggaagaaatagacgacacgcatggagggcaaggtctgacggatgtcaggtggtttctgaaatacacgtttgtttccacgctgttattcaacgtggtattgattttgacagaagcctttacttttaacgatattctgatctcgattatccggattattttaagtacctttatctcaatgttgttcatgctactctactatttcatcggaattaagaaagtacagcaataaaagcgtggttttaatcgattaatgaattcttgaaatgaacaaattcgggtatagacaagggattatatcaggaattattatcagtgtatgtgtcgtgtacctcctacgattgtttacctatcaggtggtgtccgacaaatataaagttatggctgaaaataattcccagcggacggaaaccgaatatccggcacgaggattaatatatgatcggaataacaaacttttggttgataatcaagcagcatacgatttaatgattattcccaatcaggtaaaaaaatttgatactttagaattaatttccattctggatataacgaaagaatctttggaaaaaaggattcaagattgtcgggattatgcgaaattcaaaccttcggttcttgtttctcagatccccggaaacaaatatgctgttcttcaagaaaaactttatcgttatccgggtttctacatacaaactagaacgttacgaaaatataatgtaaaccattctgcagatgttttcggctatatcggagaggtgaattccgaacagatgaaagatccctattatgcacaaggagattacattgggatcagtggattggaaaaaacatacgagaaacaccttcgcggtaccaagggaaaacgggtcgttcttgtcgacaataaaaaccgggtgaaaggttcgtttgcggatggagaatatgacgaagatgccattgtcggtgaaaatctatataccacattagatgttgacctacaagaatacgcctacgaactcatgcagaacaaaaaaggcggaatcgtggccattgaaccttctacgggggaaatattggtcaagatgtccagtcccggttatgatccgcaattaatggtcggtttggatcggggtaaaaattactctaaattgctaaatgaccccttaaaacccctatttgacagaacaacgatggcacaatatcccccaggttccatattcaaaaccgtccaggctctgattggtttacaaacgaaagcgatttcactgcaaacacaatgtacatgtagtggaggtgcttatattgtcgggggaaaattcatgaagtgtcaccatcatagttctcccgtgaatttactccagtccattgaaaactcctgtaacccttattacgctaatgttttcaagagaattctggaattgccggaatataaaacggtgagaaatgcctacggggaatggcggaaatacgtgatgtcctttgggttcggcaataagatatgtccggatttctccaatgaagtatccggttctattcccacgcaagaatattacgacaatgtgtttaaaactcaaaaatggtacccctcttacatgatttctctttccattggtcaaggagaattaatgatcacaccgattcaaatggcgaatttggccacgattctggcgaaccgaggatattatattacaccacatattgtaagatcgataaatgactcgatctccagccaaataaaaaagcacgttattcccattgaccggaaacactttgaccccatcgtggaaggaatgcaaatggttatcaaggggggaactggacgacgggcacaggtggattcgattgcaatagccggaaaaacaggaaccgtgcaaaatccacatggtgacgatcactccgtgtttattgcttttgccccagtagaagatcctaaaatcgcattgattgtatatgttgaaaacggggtttggggatcacgttatgcggctccaattgccggtctgttgatcgagaaatatttgaaaggaaaaatatccgacaagaaaaagcctcttgaaaaagagatgttccagggtagtctgatccataatacaaccagtaaagtaaaagaaacgagcaatgaatagcagatctaataacctactcgccaacatagattgggtatccattctattatacctgctgcttgtattaatcgggtggttaaatatttatgcggcagtatatgatgaaaatcatagcagtattttcgatatttctcaaaagtacgggaaacaattgatttggatcggggcggctttcgtgcttgcttttcttgttctactcacggatagtaaattcttcaccactttctcgatggtcatttacggcatcatgatattcttgttgattgccgttctgttttttggtacggaaacaaagggggcacgttcatggtttgaagtcggggattttcgcattcagccagctgagtttgccaagttcgcaaccaacttagccatagcctatgtcatgagccgtcataattttaaagtaatgcgcttttccagccttttaaccatcgggttaattttagctcttccatcgggattgattatcttgcagaatgacactgggtcagctctcgtgtacagtagttttatactcgttcttttccgggaaggattgcatggctctatcctattgctttgtttcgtggcggcagctatatttatcatggcattgctgtattctcctttcacggtattgcttgtcattatcgggggaacgctgattgccttttattattatcggcacgatattcgggaattattccagattatcctgttcatcgggtgtggttttgggcttttcgttttgattaaatggatgtttaatctattgatttccgattattatatgttactcaccgtttacgtgattacaagtataaccgcaatatatccgatatataagcggaagatgaaaaacatgattaccctgttactgatctcgtggttatgtgtcggagccgctccatccgtgaattatgcttttgatcatcttcaacctcaccagcaggatcgtattaacgagttactgggtataagagtagaccccaaaggaacaggatataatgtcacacaatccaaaattgcaataggttccgggggattactgggtaagggattcctacaaggaacgcagactaaattgaacttcgttccggagcaaagtacagactttatcttctgtacggtgggcgaagagtggggttttgtcgggagtaccttcatcatcgtgctgctggcggtgtttattttacgaattatcaaactggcagaacggcaacgctccagtttttcccggatatatggttatggagtagcctctatcctattcttccacgtggccgtcaatattggaatgacaatcggaatggcaccagttatcgggattcctcttccattcttcagttacgggggatcatcactatggtcttttaccattcttatatttatatttttgagattagatgccaatcgtttacaagtctttagataataaataaactttctgaacgctttccttgtggattttcaaggattttaatacattcgttcccaaatgaattaaacacgagaagaatgaaaacattaattataaacataaagcaacttgttcaggttgaggaagaaccacgtaaatgggttgcgggtgccgacatggcaaaactaggtatcattgatgatgcctaccttctgattaacgaggataaaatagaagctttcggtaaaatgaacgaattgaatcaagatgcaatttacgaaggtacagacacggtgaaagaaatagatgccaaaggacgtttggttctccccgcctactgtgattcccatacgcacttggtatatgccggaagtcgggaaatagaatatattgacaaaatcaaaggtttatcatacgaggaaattgcccaaagaggtggtggcattttgaattcggcagaacgtattcgaaaagcatcagaagaagagttatatgattcagcttatgctcgtttacaagaaatcgcctctctcggaaccggagccgtggaaatcaagagcggttacgggttggacacggcgagtgaactcaagatgttgcgcgtgattaaaagattaagcaaagaaactcctttaaccataaagtcaaccttcttgggagcgcatgcagttccggttgaatacaagggacggcagacagaatacgtggatttaatcatcaatgaaatgataccggctgttgctgccgaagatttggctgattatatagatgtgttctgtgataaaggttttttcacagtggaagatacggataggatgttgaatgccggaatgaaatacggattgcgtgcgaagattcatgctaatgaactggactactcgggtggtattcaagttggggtaaaatataatgctctttccgtggatcatcttgaatatgtcggggatgaagaaatcgctgcattgaaaggtagcgagaccatgccaaccgtgttgccgggagctgccttctttttgaatatgccttattctcctgttcgtaaaatgatcaatgcgggacttcctgttgctttggcttcggattttaatcccggctcctctccttccggaaacatgaaattcgtgatgtctctcggatgtgtgaattataaaatgttaccggaagaagtgattaatgcgaccactatcaactcggcatacgccatgggcgtagaagaagagttgggtagtatcgccgtgggcaaaaaagcaaatttttatataactactccgattacgggaatagagtaccttccgtatgcttatgggactgatttagttgaagcagtatttttaaacggagaacaaatttaatgaagcgatgccctattcacattacaaaaaggtatggatccggaaagcgtaccggataagatatccttagattttagattgaagtttaaaattgtacgttgatttttattttgtcaaattataaaattaatatatatgaaaaaattaattgaatgcgttccgaatttcagtgaagggaacgatatgcacattatagatcagattacagcagaaatcaaggctgttgaaggagttagtcttattgacgtggatccggggaaagcaacgaaccgtacggtggttaccatggtaggtactccggaagaagtatgtgaagctgctttccgtgctgttaagaaagcatccgagttgatcgatatgaaaaaacacaagggagcgcatccccgtttcggagctactgacgtttgtcctttggttccggtatcaaacatcacgatggaagaaaccgtggaatacgctcgtgctttggcaaaacgtatcggggaagaattgaatattccagtatattgctacgagaatgctgcctttaccccggaaagaaagaacctggctacttgccgtgccggagaatatgaagctcttggagagcgtttgagcagtgaacaatggcatcccgatttcggtccccgcgagttgaacgagtggacggctaaaaccggagctactgccgtgggagcccgcaatttcttggtagcttataacgtgaacttaaatacgacttctacccgtcgtgccaacgctatcgcttttgacgtgcgcgaaagaggaagagctaaaagagaaggaaatcctattaccggaaagatcgtgaaagatgcaaacggtaaaaatgtgatgatccccggtactctgaaatcagttaaagctatcggttggtatatcgaagaatacggaattgcccagatttccatgaatttaacagatatttccgtaacttccgtacatgaagcttttgacgaagtatgccgtaaagcacaggatcgcggtattcgtgtaaccggttctgagttagtaggtgtaattccattaaaagcgatgttggatgccggacgttatttcttgcgtaaacaacaacgctctaccggagtatctgataaagaattgatcaagattgccgtgaaatctttaggtttggatgaattgtatccgttcgaacccagaaagaaaatcatcgagtatattctggaagatgagatgaatcaaggtaagaaattcttgattgacatgaatcttcgggagtttgccgatgaaactgcatcagaatctccagctcctggtggtggttctatttctgcatacatgggagctcttgcttcttcactggccacgatggttgctaacttgtcttctcacaaacgcggttgggatgatcgttgggaagaattcagtaattgggctgaaagaggaaaagcttatcaagttgaattaatcaaaatggttgacgaggatactaatgctttcaatcggattatggatgccttcggattgccgaagaaaacagaagaagaaaaagcagctcgtcaccaagcaattcaagatgcaaccaagttcgctactgaagtgccgttcaaaacgatgatgctttgctacgaatgtatggaagtggtgaaagccatggccgagatcggtaacccgaattctgtaacggatgccggagtcggtgctttggccgctcgttccggagtaatcggtgcattcttgaacgtgaagatcaatgctgccggactggataacaaagaatatgcaaacgatattatttccaggggtgaaaaagtagttgaaatggccaaacaaatggaaacggatattttgaatatcgtgaattcaaaaatctaatatctagtcagattttattgaattttgtaaatataagctggaaactttactatttatcaagtttccagctttatttttactcaccttctaaaaatggtaactccacgttacggatggtacaaatggaagtaaactccaactccgggtagtcactccttctttcgtctgtttgtggtatatgatggaaggattcttgcgggtatacaaattataaatgccgaatacccatgaacttccctttccttttcgattatccagagcgtatgatatatccaaatgatgataggcaggcattcgaaaattattcggacgctcaatatattcccggtattgtgtgttgtctgcatctgtttgaaaactttcaggcatcggggccgcatgatagaattgtttccctatcgagatgtaattcccggtcgcaagcgtaaaattaattgaaaatgatttgttaaacttacatttttccttgatcgggagtatgtacttggtcgttacgttcaacttatgccgacgatcatactcaaacgggaaccattccccgttatttacatgatcaaaacgacgttccgattttgaccacgaataggaaacccatcccgttaaggctccggctgttttctttgccataacctccactccataagctcgtcctttgccaatgtctacataatcctgccagctcctgtcctttgttttaagaaaaagaatgccgtcttggtaacgtaccacgtgatccatccggtggaaatatccctctatcgaaaaattccaagtatttgcaaaggcgtagaaacaacctatcgagaataaatccgaagacgcgggagctacccgttgggtaacaggaacccacaaatcggtattcatgcccatcgaattacttattaatgtatgctgagattgttgcatctttgcccatgaagtctttaatatcatgttttctcctgcccgatatgaaatagaaagacgaggctgcaaggaataataacgagcttgaggcaccgccagtaaactaaaacgaactccggcatccacgctccactgatcatttagttgccaatgatcttccagataagtttctatcgaatatacattaccggttgtcgtgtctctcacgtactcattcaagtttacactaccgatatatgacatttccggggcataatatttaatagagcaaaccgttccgaattgggtgcggtgtttctccccgatagaaatttccgaatcggttttcaaggtccaatcccgtaactgtgaatttgtcttcgattgctcccgttgagagacactctcgttatataccgtcatgatctgactattattgaattgactataatacaaggtgatattagagaaaaaggtcgagctgaagagatgattccaccgccccgaaacactaagattaccccagtaaaaccggaaacggtcggaatgttcggaatcctttgctttccatgttgcgaaacgagaatcccggctattgtacatgcttatatacaatcgattataggggttgatttcccaatttactttagcatttaaatcataaaaattataacctgtcgagaaatcacttccggcgatcttttgtcccgtccatagtaaaccgtccaaccaagttcttcttcccgatatgaggaacgaggccttatcttttttcaaaggcccttccacaaccacggagccggccaccgggctaacatgaatgtctcccgaatattttttacgattcccttcccgcatagtcacttccagcacggaggacaagctacctccgtaacgagcgagaagatcacccgtgtaaagcgtaacatcttgcaaggcatctccattaaaagcggaaaaatacccgtaagcgtgattcacattatacacgggaagaccatccagtaagaattgagtgttgtcgggactaccacccctcacgctaaaaccggttaacccttcctgaccgggattcacaccggggaggaaatgaagggattttaatacgtcagcctcccctaggaccgcaggcattcgttttacccaatccagagataaggaatgttttcccacggcagatgaaaaggcattttttttctccacaaccagcacttcttccagataatttccgggcattaacgacataacaatcaatgtgtctgtttgcaagttaatagtagattctacatgggtaaatcccacgtgacttacagataaacgattttctccacgaggtaaggagagtgaaaagaaaccatatcggttacaacttgttccccgcccgcttttcgtttcaacgatcgtggcatttatcagtcgttctcctgttgccttgttctcgatatacccgctcaccgtcacgttttgtgcgaaagaagtaaatacaattccaatcagaatattgaatataaacaaaatacgtttcatcttactattcctcccgtttcgtgaatacttgaatgaataaatcttcatattttgaataagaggctaccagcccggttcccccatgtatgttagaataagtccacaaaggagcataaaacagaggttcagaatccattgctgatagataatcatcgtttacaatcgacgatttcaaataacgatcgtaattttcatcaaggcttaatatgaaacgggtacttttatagcatcccgtgtccggtctccagtgataataccccgaacgccgtcccttatagcttaactcgatctctttccccgacaaaccgctatcctctactcttaaataataatcgtattcagccggaatttcttcgtcaaagtcaaaactgcggttaaaggcatcgggtagcgtgctattcgtttgaagatacgacacaagttccatatgcaaagtgtccgggaccccattcagagaagaatgggtggaagacaaccaataatagtttttttcttcttcccgatcagtccaccgattgataatccgttcctgcaggctgtcacattctatgctcgcattcaacaagggagcaggtactctagtttccccccaaacaagaggtctgccgggaatatctacttctatccggtaaacttcggttgcctccacatgatggactatgacataccatccctctttctgatactgacatgcccctacgaaacgattatttttgtataattttaccgaagcatttgcctctacgggaaaatcaccctgttcgtagacgttttttgtccaagtgacccgcacacgaacggaatcgttatcagccattaaaatactatttacaaccagaacaggagattgtgcatttaaatcaaggtgtaatttttgctcacatccatttaataataattcccatgttaataacacgagaaatattctaataacttcttttttcatgtattgagtcttttgagttttctactcttaagagtcaataaacaggaaaacccctattcggattttttatttttcagattttgcaggaaaatccatgattacttcacgagtgaaacaacttcccaccacgccgagtccatcttccacgttagaatacacttgaatgggttccttgtacatggatgattgattttcaaaaatccccaaggtatacaggtaatcaaataaaggtttgtctattcggagtactttcacccgtaaacgatgtgattccttttccacgtaccggatcgtgtctccatcacccgtgatcacccatgtttccctttcgtatgcatggggatgacttacgcttgcatgaataattcgttcctttccccggaaactttcatttgtgaatacctgatacggattgacatttatctcttttccaaaaatagtcgtaatcatttcgtgagataatagctcatccccggaaagatccacgtcataagaataagtcgtggaagaatctatttttccatgtccattttcccaacggattccatgatgaaacctttcattttcaatcactagcctgtaataattttccgtttctcccctatcttttaaatgaatacgtaattgtagcgtattcattttgctaaaagtatctaatttgatttccggaaacgaattgcatacaatggtagaaccaattgcttcctccaagcccgagcaagcaacttttatcgtgattttatctcccgctttagggcgaacttctgacgaataacggttatgaccaacgagttttaattctcccgcatactgatcgttcatgtacacctggcccctcgcattccatgttgaatccatttccgtattgtccgtgtatgttcttgatttcgaaatttcggcatatagcaaagaatccgcttccgcataagcataaagtaccaagcgactttcgggtacctttccctgaaaatcatattcttttgaattattacacccgcaataaaacaagccaatccatataaaaattactattctcatcttaaaaagtaaacgtgtaagaaaaagagggaatgatcgggaaaagccaatcattactaaaatattgtcgctcttcccgattgccatatttggaatcataatcgggacttaattctattgtattctgcctacaataagcattgtacaggtttatactccaagtggaaattccatgttttcgacggcgatggaaattgaatcctaaatccagacgatgataatcgggtgttttcatgttgttacgtttttcaatatgaaatatgatatccttcttttcctctcctttctcccccggtaggtgggtcggcgtattatatctttccaatggttgcgttgtatagaaaccgttattgaatgtccatgtagcacttatatcaaaaaagttactgaatttatgcagtaaaaccagattcagcatgtgacggctatcatattttgccggaaagcgtcggccttgattgattgaaccatccggaaaccagcgataagcacgggatagcgtgtaatttatccatccatttgttcttcctcctgttttttgccccatccattccaacccataggaatgtccttttcctgaatgaacgttttctttccaatctgaatactccagggttacgtctaccccgttataatcgtttagcagatgattatgggttttataaaatccttcaagagaaaaatgccattgcgtgcaaggatgataataaatacctaatacacattgatgtgatttcatgggttttacattatcactaaccggaacccacaggtcagtaggcatattcattgtactacttcccaactgatgaatatactgggacattagcgtgtaagaagcttttgtctcccaatgatccgtccaattatactgtatggaaaatcgaggttccaatgaaaaataatttgtacttccgacataaaataatatagcccgtattccggggtgtacgatccatttctcttgaatcgtaatcttatcttccaagtaaagggctaattcatgggcatattctttatagtttactagttttcgggaaggcatttcttcttctattctattgagagttgttcgtttttctggtgtgaaaacatgataaatgtaatgtcccccaaaatacaaacggctccaatgcttcatggcccaagtaagatcacttttcaacctccactcctcttgaccagatttgaaacggatcttttttaaccggatggtatcacccgatgcattttcatggcggtattttttattcataaaagcccgatactggttataagaaagcactgtattcgcatataatcccgtggagatcattttgtcccatcgcaatccgacaccccaatttccccaagtcccacgcatataatcccgagtgcggtcaggttcaatataataggattctttctcatcctttttatatttcaaatagtcattcccgtaaaatagaataagagataaagcattctgttgtgaaaaaatgcgagtgagtttaatgtttatatctatcagaaattgattttcatcccgatttccccctcgaaccaatattccagctattccctccatacctacccgtacaccgggaaatagttgaaccgctttcagcagatcactttctcctaaaagttttggaatcactgttgctgtaaaaataggaaattccacttgtcccggttgcgaattctttacccatccgggaatattaggttgaaccacaacaatttcgtctaagttcaacatgggtttcaattcgatatgaatcacggtatccgatttcaaatagaattgaaatgaggccctttgataacccacataggaatagtttaaacaaacttctccttccggtactatcaacgtgtagaatccgtaattattggtcgctgcgcccacgtgcaaccgagaatcataaacggaggctccaatcagtctttcccgggatcctctgtcatatattcttccataaacaatgaaaaaacgttttccctgttttaaaatgatatatcttcctaatttctcccaggagatatttgatgatttaaacaaaaggtttaaaacttgttctaaattagcctgttttatagatattgtctttagggagcattgatgtaaaatagacggtgaatatgaaaatatatatcctgtttgttgctcgatttttcccaacacttcctccacaggagtttcacgaaatgtaaatgaaaaaacttcttgagcatttcctttcatgatacaaaaaatcaacaagataagtataagcccggcatgcatacttaaattgttaattgaatatctaaagtcctgttaataatttcgatcgcctcttctagtgaaacttctttgaaaacaacggttattcggagagttgcatagtttgcgggtagtgttacgtgacaactgtagtattcgttcagtgtttcgatgacttcagataagggggcattatcaaatttaaggatttgtatttcccctttatcttctttcgtggagatcattaattccccatctttttttccatacttaacggacattccagtttcaaggacactttcttgttttttgtcttgagtggtaattttcactcgtcctttttcgacaaaaacttcagcttgaagtttttctgcaatcacttgaaaggaagtacccaatacctctacttgaattaaggatgtttccacgataaaaggtttgctagagtcctgttttacacggaaaaatgcctttcctcgtaaggaaagttctctattcgtctttccgaattgagaatcataagtcaagcgactatctccggttaatgtcacatgggaactatccggtaaataaaatgctttcattttcccagttcgggagagtaaaaccgtttcctgaagtgacgatttattccaaacccataatacacttgatattaaaacaatgatagtggcagccacttgtaaaattcgcaagtggtacgccttcgcaggaaatttcactttttgtattgcctgccgaggggcaaaaactccatatttgtaacgcttagaacctaattctatacggcgcttgagttgtcgaaattcacgttggtgatcttcactttcttccaaccattgttccactctttgcccttctttcatgtttacctcaccaagaatatattttgctagtaattcatttttcatattccccatgtttatgagattattttacccgaagaaaaacaaatagatttttattgctttatctcttaaagttttcaatgcctttcccatttgcccttccacagttttaactgaaatatccagttgttcagcaatctccttgtatttcatgccttgctgttttgccattaaaaatatattccgtcgttcagtaggtaaagcgtctatccagttccaaactaaagcctcctcctctaccgatatggataagatattctcgtctgttaggtacatggcactttccacggaaactttctcttggtctttttttacatatttcaccgctcgatttcgcaccaccgtgtataaatatcctttcatgtttcccacttccaaacttcctacaaccgccttttccaacaattctacgaaaatctgttgcacaatatcctccgaatcctcgtatgattcggttatatttagcgcatacagacataacggtctgtacatccactgaaaatatttttctaacgtgtgagaattgacgaacatggtttcttattttacatggtacaaatcaacatcaaaaataactaaataaaaccgaagtaggtgtatttctaaaaatatttatcagatacattcctacttcgtaatattctatacaatcactttaatttgctttcatgtaaacgtaatttcgaattgtcatacgagggatcccttctttctcccaaataccttgaacaataaggcaatacatctgattaccttccacctgtgatacagaaggagtccatgtaaaagaaggtatcttccaatactttttattatattcattcttctcaaaggtcgaaatcttatggataaacaacatgtcttcatgaatataaaggctgtcagaggtgttatcaaaatagaattgtccagcgattcccttgaaatcctttaacggcccctccaaataaaaagacacgttagcaggaggtaaggtgatgaaaaatgtaggcgtaaaaggttcccctataattaacgtgtctatttgttgaccaaataattcatagattatcggttcctcctttttgttacaggaaataataaatataaagctgataatagtagtaaataaatatctattcataagtactgttaataatataatttactaggaggagtagttgcaaaaatataaagttcagtaccactacctgtatatcctgtataatctaattgataaccgggccaactcaaaaaacttgatttatgatcagctcttacaacgatattcaatctaggatgttcttccccaccataattaaaaactccaggtgtttccaaatggaaaaatgtataatttgcaccactttttcgttcgattgaatgttcatctccataatattgagtattaataccattaccttgaatactaacaaatgtgccatgaatactatatttcgtactataatcatgccatcctcctagatatttctttttagctttctgatataaccttaaatatacatgatttcggaaactacttttgtcgatcataactttttctaaagagtaaataagttcccaagaatatttctttttacctgattttatatatccgccagaattagccaaagatatatctttaacaacattacctcggaacatgatcctcgcatcaccattatagattacatcaacattatcctcttttgaagataaaagtgtatttttatatttatctattttttgtatatctgcgagatgaataataatacgtcgatcttttttataaatatacaatgcatcaccaatctttacttgaccatctgatgtcaaaattgtttcaaaattaggtgttacaaacggataatctacatcaatagctccatcttcatcttctgttatgtccaatatagaagtatatttttcggcgaataagtgggactcatcctcggatgtcacgttatcatactcgtaaaaataaggagcatagtatgttttggcagaaataaaacccaaattcttttcccaagaaatcctttgttcgtcactcaattgttccaacatattaataatagaatcacgaacattgaaattcttaaaaactaaacaaccttcctcaacatatacattcggttgctgattttcttcgactttagctcttgaaccaatttctggggtttcttcttgaattaaagttacagattctgattgattacatgcagataaaatagcaatcaaacatagtaaaaacaatacttttttcatagatttttgattttaaattaatttattaatctcttagtttatcattagattaccctcgtcgtagcaacttatttcactgggtattaagtttattatgggtgtatctatatataatgaataatctttatccacaactagattttccaccataaaagcaattgttatcgttctttttatctgttcagggaatatatcaatcttgatactatcacaatcgtaatttttatgaaaaagcaaaaccaaactatcagatatatgatattgttctttgatagccgtggttaattccggaatgatctttaatttttgattatgcatattggaatataaaagtgagacttttccttttaaatacacgtaatgtgtactattatcaacaattacatttttctcccgttcctcaaaactaaatgttgtttcatatttcggatatggatcattctttgaacaagaacccaatacaaataataatacaattctaaatattaaattaattttcttcatttctttctgttttaaattactcaataccaaattggaaattttttattgcctttattattaagagtcaaaaacaataaatacccttactccatttcccatattttttttcaaaataaaaatccctagagtgtaaaaactacattctagggttccttttcaagtattgattaactctaccccatcctcataaacgtctcgaaaaaggcatcccgataggtgtttccaatagctatttcatgtgttttaataaaaatgtcattgttatcaaaggagtcgatatgcttggtatttacgatataggacttattgactcgtaagaaattatgcttgggtaataactcaaatatattctttagattcattcgggtaatcacccgttgttcatccaattggatgatcacgtaatctttcagtccctcgatgaatagaatatccttgtaatttattttaaagtagcgtctttcagactttacgaagaagtattccgtgttacccgcttcgatattctctttctcttcttttaataacaaagaatggtaagcaattgctttgtggactgccttatttaacccggataaaattcccccgccgaggatggacaaatctgcaaagtgattaggattcggaatttccacgtcttccagtttccattgtaataaatgcggggcattcccgtgaatggatattccattcgttgacatactaggagaaattccggcaaaggaacttaccaagcgggccggatcatccattcccccggcatatcggcttgcctcttccacgctgagcatccgggctcccgtggtgaccatcttgtttaatggttgctctttattcaattgcggtcgaatcatgacttcatccagttctttaatactttctttcaatgggatggtcaaattaacttctttcgaggatgttaccagtatctcccggaaaatggtcggttcgtatcccacgaaagaaacctgtatatcatgtcggccgattgggacattcttgataacaaaacagcctagggaatccgttactccaccgacctccgtttttcccatgagatacacggatgcataagccaccggataacccgaggcagcgtcaatcacccgtcctcgtatattctgggttaaaatccgtccttctttctgcccccacgcattcatggataatatgaaaagaaaaatatatatgccgattactcctttcttacccttaatcttacccatgattttaaaaatcatttcagaaatcccatttttccatcctttacgattcaattctccccctaaaacttcctcaaaggcatctaaaaccttttcacagtcggaaacactaatattcgtcattcgcgatacttctgctattacttctgttttattcatcatccaatactttttgattacgggacaaaaatagactcaaagcagaagtgatttaaagaaaagagacgaaacgcctaattgggtatacaaaacatgatatcccagtacctttattgaagataatcaagaagaaattgaaaaaagaaattgtttttttagaagtaggaagtgcttgataagcaacttcccctaatttctcctacataaggaaaaattaggggaaggcgttgggttaatttttaggtaaaagagtgattatttaaaaatacgcactctttcttctatcgaattaaactctttagtcccgggttcctgtaaaggtacaccaaaaggcatttgagcaatcaattcccaagtttcaggcaattgccactctttaagtactgtttcatcaattaacgggttataatgttgtagtgaggcaccgaagccgacatcctccaacatggtccacacggccaattgatgcattgcagaagtttgttgtgaccataagggaaatttctcttgataagttgggaatgatttctgtaatccctccacgactttccgttcttcaaagaaaagcaccgtgccataaccggatgcaaaagatttatcaatcttattttccgttgttttaaaagcttccgcaggaactattttccgcaacgtatctttcacaatattccacagtttcacgtgttgttctcctaataaaagaaccattctcgttgattgtgaattaaatgcagacggtatattcttaacggcaaattttacaatattctctatttcctcgtcagaaataagtgatttattcgagagagcataataacttctcctatgcgctaaagcttctttaaattttctttccatatctcaatgatttattttctacaatatacgcattttttcgggaaaagttatgttatttagaataaatcaagattgtttattctcccccttgtgcaagggggagttagaggagggaacataaatattataaaagactaaacgcacaagtcaccccggccatcactatggccaccatgctcatcaatttaatcagaatattcaaactcggtccggaagtatccttaaacgggtcgcccacggtgtccccgataaccgttgctttatgattatcagaacctttaccgccaagattaccttcctcgatatactttttagcattatcccaggcacctccggaatttgccatgaaaatagccaacacgaacccggtacccaatcctccggccaacaacccaatcacacccgaaacgccaaaaatcaaccccataacaattggaataatgatcgccagcaaagacgggaaaaccatttcatgttgagcccctttcgtggaaatttccacgcatttagcgtaatccggctctccttcccctgtcataattcctttgatctcccgaaattgccgacggacttcattcaccattttctgggcagcccgccctaccgcattcatggtcaaaccacagaacacgaaagccatcatcgaaccgatgaaaattccggacaacaccttcggattcatcaaggtaacatcatagtaattcataaaatcagtcaatgtggcatcagccgtcctcaccacattatctccaattttcagcacttcctcgcccatccgcaacaaaccaatcttgatttcttcaatatacgaggctatcaaagccaatccggtcaatgctgccgaaccaatagcgaatcctttacccgtggcagcagtagtattacccaaagcgtcaagcgcatccgtacggagacgaacttcctctcccaactgactcatttcagcgttacccccggcattatcggcaatcggtccgtaagcatccgtggccagagttatacctaatgtagagagcattcccacggcagcgatccccacgccatacaatcccatggacatattggcaaaactgaattccgccgcaaacaggaacgaaagtataatgcctgcgacgatcgtaagcaccggaatagccgtcgaaatcattccggtcccgatacctttaataatcaccgttgcaggccccgtttccgaacttttggctatatcctgagtcggtttgtaagcatgagaagtgtagtattctgtcgcttttccaataataatacccgttgccaatcccacgatcacggatccgcatatccaataactcaaaccgagcaaatgaataaccaggaaactggcacccacgattaacaaggaactcacgttgattccccgatcaagggctcgtaataattgttgttgagaagctccctcttttgtctttaccagaaatataccaagcaatgataagatcaccccgaatgcggcaattaacatcggagctaatatagcattgaattgtgcatccggttccgcacgaaatgcagctgcacccaatgctgccgttgccaatatagaaccacagtaagattcgtagagatcagctcccattccggccacgtctcccacattatctcccacgttatcggcaatagtcgctggatttcgaggatcatcttccggaattccggcttccactttacctaccaagtctgcaccaacatccgcagccttcgtgaaaatacctccacccactctggcgaaaagtgcttgcgtggatgcacccataccgaaagtcaacatcgtggtcgtgatcacgatagccttttcagtctctgttgcctcttccacgaaataatctaataataaccaccataaagaaatatccagtagagccaaaccgacaacaaccaaacccatgactgctcccgaacgaaaagcgactttcagaccgtcattcaaacttctacgtgcagcgttggccgttcttgcagatgcgtaggtagctgttttcatcccgatatacccggccaatccagagaagaaaccacccgtcaggaacgcaaaccaaacccacggattctgtaaaccgggcccgtaagccatccaagcaaaaagcacacatagaacaagaaaaacaagggctaccacccggtattgctgacgcaaataagccatagcccccttgcggacatgcccggcaatacgtttcatcgtgtcggttccttccgactctttcatcatccctttaaaaaagatccttgcgaaaaggagagcgataatagcacatacaggtactatccaaaatagatcgtttaacatggtattatatatttgtagttagtaaaagtcatacaaaaaatactcgtcaagatttaaacgaaccctgatgagtaaaagtacgaataaaaatgaaaaaatattccctatcttttatttttttacaactaaaaatagatttctattattcacacttagcataaagctcgaattggcccgcttccgtgataagaacttcgtaaaattcccctatttgcaacgctttttcacttgttacaaacacttcctgatccacttccggggaatcatattgcgtacgtccaacgaaataatccccttccacccgatctattaaaacccaaaaacgtttacccacgcatgattcattgagtgcagcaacgactccttcctgtaatgccatcaacttttcagcccgtttatttttcgtctcttcgggcacatcatcttggtaatgcttatcacaataagtatcttcttcatgagaatacgggaatacacccaaacgttcaaacttcattgttttaacgaaatcctccaattcccggtaatcctcttccgtctctccgggatgaccgaccatgagagtcgtacgtaatgcaattccgggaacttcttcccgaattttgttaatgaggtctatagtctgttgttttgtcacccctcttcgcatcattttaagcatatgatcactacaatgttgcaaagcaatatccaaatatttacacacatttttccgttcccgcatgacggtaagaagttccatggggaatccggccgggtaagcataatgcaacttaatccactcaattcccggtatatccgcaacccggtcaaccaactcggctaacctattttttccatatttatcaaccccataataagtaatatcttgagccaacactaacaactcctttacaccctgttttgccaaccgctcggcttcatcaacgatttcttcgaatgggcgtgatttatattctcccgtcataatcgggatagcacaataagaacaccctcggttacatccctcggatatttttagataagcgtaatgctttggagttgtcaaatgacgctcgtttcgaagtttttcgtcataacttttacccaactccgcaagaatccccttccaatcgaatttcccgaaataagcatccacctccggaatttctttctttaaatcctgatcatagcgctgggacaaacatcccatgacgtatattttatcaacttctcccttctgtttccgctccacttgctccaagatcgtatttattgattcttctttcgcatccccgataaacccgcaagtattgatgacaacaattttcgctttcgaattttcaacatctacttcaacaccataccccgctttctccagttgtttcattaacaactccgtatccactaaattcttggagcatcccaagctgataatatttactttcttcatactatattctaatttgcccgcaaaggtaataaaatcttcagcgactttccgtatctttgcagcggaattcaagcaaatgctctatcatggattataatatacaacaatggttaccgaccaccaaaaaagaagtcgaacagcggggatggaaaagtattgatgtcattcttttcacgggagatgcctacgtggaccatccttcctttggtggggccgttatcgggcgacttctcgaatccctagggctgaacgtggctatcgtcccccagcccaactggcaggatgatctgcgggatttcaagaaattaggtaaaccgaatctgtttttcgggatcagtccgggatgtatggattccatggtaaaccactatacggcagctaaaagacgccgttctgatgatgcttacacgcccggaaatcgaagtggcgcacgtcccgatatgccaaccattgtttacagcaagatattaaaagaactctttccggacactcccgtcattatcgggggaatagaagcctctctaagacgtttcactcactacgattactggaaagattcacttaaaccgtctattctccatgaaagccaagcggatatgctggtatatggaatgggtgaaaaaccactcacggaaatctgccggatgctgcaaagaggtattccttttcaaagtcttaccaatatcccgcaaacctctgtgatcaggcataaagacgaaaagtatgctaccaataagaaatggcaaaccatcacgctcgcctctcacgaagagtgtttatcagacaagcgaaaatatgccacgaatttccggtatatcgaggaagagtccaacagtattcatgccgcaaaactggtacaacctatcggggatgaactaataatcgtgaatccgccttacccgcccatgaccacggcggaaatagatgctatttacgatctgccgtttacccgtttgccccatcctaaataccggggtaaagagattccggcttataacatgatccgccattccattaccatgcatcgcggctgtttcgggggatgtgctttttgcacgatttccgcccatcaaggaaaatttatctcttcccgttccgaagcatccattttgcgagaggttcagcatgtttgtgatatgcccgatttcaagggaacgattaccgatttaggaggaccatccgccaatatgtacatgatcaagggaaaagaccatcgtatttgtgaaaaatgcaaacgtccgtcctgcctacaccctaccgtgtgtaaaaatctgaataccgaccattcgcaccttttacacttgtacaatcaagtgcgtagagatacccgggtgaaacattgtttcgtgggttccggtatccggtacgatctctccatgcatcgcacgggaaataaagaggtcgatgcgataaaccgggaatacctggaaaccgtcatcagacaccacgtctccggtcgctttaaagtcgcaccggaacacacttccgacaaggtgctgcacctgatgcgcaaaccttcgttcaaactttttcgggaattgacagttcgttttaatgccataaataataaagagcatttaaaacaacaaattataccctacttcatctcgtcccatccgggatgtagccttgaggatatggccgacttagccatcaataccaaagaactggatttcaagctggaacaagtacaagattttacccctactcctatgacgttagccacggatatgtattattccggtttccacccctactccttgcgtaaaattcaatcagccaaaacagaaaccgagaaaaaacgccagaacatatttttcttctggtacaaacgggaatttaaaaatgaaattatcggaatcctctcgaaactgaaaagaacggatctcgtaaaacggttgtattcaaataaaaataaataaatatttaatttctcatgataaatcattaactttgaatcacgtaattaaaaggaatatgcgctattatacttggataatgttactctttctatttacctcatgtgcacaccaccaagccgtggagagtaatcagcgaggtatggactacattacccgagaacagcctcgaaaagccctagaagagttcaaccatgcgatctcgttggacccggatttcttttccgcctattataatcgggctattatccgggcgaacctcaagcaaaatgaagaggcccttaaagacatgaattacgtgattgccaacgttcccgatcatgccttagcttactataaccggggaatcatatacgagaatctcggtcagccgaccctagccattcaagattacagtcatgctatcaacttacaaccgaatttattggaggcataccattaccgcggcatcgttcgttatggaatgaaagacttggacggagcccttgctgattacaataaggcaatttccctcggcttaaaatcaagtgccatatatttcaaccggggagttatctttcaccagaaaggccaactcagtgacgccatagaaagctactcccgttccatcgaaatcgacccttccaacgcaagagcttattataaccgggcaatttccaaactgattgtcgataactataaagaagctcttcaagatttagaaatctcaaaacgcttgggatactctaaagcggcagaagtcattgcacaatactattaatttcagaagccaagatttcgtacaatattatctaaccgctcttgcgtggtataaggataagttctgtatgtccggttttcacctaacaatttctgaaaccatggctttttgatctccttatatacatctatccatatatcactataatcttcttccgacatattgagattttctacaaacgttttgtccttctcggttattttaagaaactcgcataattgccgtatgatatgaaactgtacgtatcctcttcgttttccgatcgtgtatttcagatacaaccgaatgacttctcctccatttttataagaatagcgagcattttcaagtaaaaacaccacgtagacttgtacggcacgcaataatggctcatcccacttttctttccgcatatcctttaagatgtccccttgtttcatgcaatcttcgatattataatcaggtgaataattatgccggaatccatacctaacacaccattttcgcacttcttcccgaagagaataatcaagtaacaaggtcacggccataacccgtccccagtaatataaaggctctataatatcgatcaacataagatcccattgtggtgtcagttcatatagtgccgaccctacataataagtaaactcgccatgtttggcaatactctttaataaaggaatgctgtcaacgtcatgagatattcccaatataataatccccattttgactacttctctatccggggcctccataaccatccaacgtcctaattcctttatttgaggagtgaccacgattcttctcttggatatttcatctataaaattgcggtgataattaataatgggaaatttttttaacagattgtaaaattcgattttagcatttatatttccttgatttacacaagcctcgaacatatctgcaagtcgtttgataaattcaggattaatctctttatcaaactgataataatccatgtaatcgtcgtacgccggaaaatatataccaatatcatgtcgtaaaggaatccgatccggcaagcaatcaaattcatcttcatccgtgacatattttaggggattctgaacaaatcgaaatatagataaccgattttcccaaggtaattttttatctaaagactctctctccatacccacgattttaagttacacctttgattattcaaatttacgaaaaacaaacgatatttttgcaaaatagtaattaaatagctattcagatttccaataacccaagaatctaaaaagagtaaggaccatacgaaaaaagatgtgtcaaaatttttgacacatcttttcaagatttattattcagcctaagctttatttcttctctactagcggagcgatagcatcagccacttgtttttgtgtttcttttacagcttcgtttgtcggctcaaccgttgcagcttgtttcaaataatcctgagctttcctgaaatcagccaaagcttttgctttctctgcttcatatttttctttctcagaattagcaaaaggggttgctttctgaagaatagatgccccattgttaaaataaagagtacctaaactcaacaatccacgtgctttcaattgtttgttagaaacttgactactcttggtgaagttttcagcagccttagcaatatcgtttgctttttgaaatttctgaccttctttagcaaaatagtcagaatatgccttttctaatttcacattttgtcccggggttgctttaatcccatcctgtaacgttttcaacatttcaggaatttttttcaagttttcttgagcatctgccatccctaggtaagaagaggcaactttgtaattattcttgatagacataccaaaatatttctcggcattggcataatctttcaatttatttgcacaaacagccacgttataaaccgttgcgtcatccttgaactcaattaatttcaagtattgctcccacttagcaaaagcctctttataattcttggctctccaagctgcattaccttcattcttaactttgccggattcctcggtttgtgcaaatagagctcctcctacaaacaagctcgttagaacaaataaaagtagtttcttcatattttccgtgtgttttgtttaacatgaataaattcgttgtttatgccgactaagataacactctattaagaaaaatcaaaagtctcttaacttatttttcacatttctcgaatcatttcacgctatctgattgataaagaagagacaaaattttctttaaacctgcttcatcttccctgtcaaaagcccctaattggtcactatccacgtctagacagccaaaaatacgtccttcgggatcccgcaaagggatgacaatttcacttttcgaggcggcattacaagcaatatgccccggaaattcctctacattatccacgataaccgtatctccggagttgatagcagcccagcatactcctccatttctgagtttttgacaagccaccggcccctggtaggagcgtacaattaaatccccatcgatcagcacgtacacccccgtccagaaaaaagactgcatcttatgatgcaacacagcctccattgttgccaaccgggcccatatatcttctgtcgtttggatatactgcttgatttgatcatacaaccgatcatattttgctaattttcttgaagtctccataagttattttgatttaagatttatgatctacgactcataacttcatccatcgtaaatcataaatcaaaaattttataggttttgtaatatatccaccaaatggctccaccacatctctaccgtcttgatattgatcttttcatctggggagtgaacacctctcaaggtcggtccgaaggaaaccatatccatattcgggtatttctccaggaacaaaccgcactccaatccggcatggatagaccgcacgatcggctctttaccgaatagacgtttgtaagaatccacggcaacttttaccacgggagaatccggatttggagcccaacccgggtatccttcaccatgttcaaccttggcacctgccagcgtgaacacggattctaccatgttagcaatattaaatttctctgaattcacgtcactccgttgtgaagtcgtgatcaagatattattcggctcgttgaatctaacagcagccagatttgttgatgtttcaaccaatcccggcatacggtaactcatggagaaaaccccgtgaggacaagcgtacaatgcatttacaagagcatttgttgactcttgggtcaacacttctcccggtacgtccgttgattccaaagctaactgtagaccaggctccgtgattttccacacgttttccatctcggcactatatatattaaaatcaacccttacactttccttgtgttgttcggggaacgtgatcacggcaaatgattcgcgggcaatagcgttccgtaagttaccaccttcaagcacggaaacacggatcccgtattttgcattcaaatcccacaaaaagcggttcagaatcttgatggcatttcccctgcctttattaatatcatcaccggagtgtccaccttggagccctttcacctgaattttcacggcaaaagccccggccggggtcttctcagtcttgtaccccatgttaatcacggtatcgatacctccagcacaaccgataaacatctcaccttcatcctctgaatccaaattcaaaagtatattcccactcagaaatcccggttgtagagcaaaagcacccgttaacccggtttcttcatccacggtaaacaaacattcgatcggtccgtgtgtaatatcggtagaagttaacacggccatttgagcggccataccaatcccatcatcagcaccaagagtagttcctttagcacgtacccattctccatccacgtaaggctgtatcggatctttatcaaaatcatgtaccgtgtcagaatttttctcgcaaaccatatccatatgagcctgcaaaatcacggtcggtgcattttcttttcctttggttgcaggtttcttaatcaacacgttacctgcatcatcccgttttgcctccagattgtgtttctttgcccaatccaataaataagcgataattttaccttccttctttgacggtctgggaacctgacatatttcttcaaaatatccccaaactgcctctggttttaatccttcaaaaactcccataacaatttatgatttacaattttagatttatgatttcaaatttcaacctgcaactctccgtaggagatttgttacaaattcaacttattcaacacccatatcgcagacttcaattcctgcggtgataaagtaaaacttatatccgtgtgaacctgttccacgatttgacgcaacgcatgacgggaatccacccctttttcagttaacaccacgaaattactccgcttgtcctccttgtcaatcttccgttgcacgtaacctctcttttgcaaggtattcaacagcttcgtgacattgtatttatccttctgaagacgtttggaaatgttttgctggttcacgtgatcccgttcccacaacacttccaaaagttcatattgctcccggctaagatcatacccggcattctggaaactgcgatttaaaactttggtgtaccctctttccgccttgctcaagagagctactaattcacttacttccgtcatagtcgttgcattttatactatgcacaaacttaattattattattgaaaaaagcggtaatatctgctaaaatattaccgctttttctatttttatcttgtaatctttactttatcacttccccattctcgtagtaacaatccttttccaagaaagaaaaatagacatcactttctgggtatccgatctctttcagacactcgaagataatcttggccaccacattctgctgttccagcggacgcttaaaatactccactttcacgaaaggataagcgggtgacggattttctcccgaaataaaagaggaattcatcacttccagcacgactgtttctctcggacatcccaaggtgcgaacaatctccgagatcaatcgttcacctaccaagtccaatctacttttttctactgcatgaaatcttaaaaatggcataacaaatcaattaaatatatcttttcctagttctcgtaaagcaataattgtcctttctcaattttcaactttcaattgcttaaagaaccattccgccgtatccctcaccttcttcaccacatcatccaacggcaatggcatttgtcccccggcagcatttaaatgtcccccaccattgaagaactcttttgcccataggttcactggtatattcccctttgaccggaaggataacttcactttatctttacgctcggtaatttgaacagaaaccagtacttcctcgatagacaagggaatgtttactaatccttctagatccccatctttataattgtataattccaattcctgaaacgtgatcggaatcgtggctaccggaaaatgctcgtcaatcgacagcttattcaacaggcaatttcccgtcaggcgcaagcgggaaagcgtatttcgctgataaagctgttcgtgtacataatccttattcaaccccaaggccaacaaatcagcgatcactctataagtctccggatgggaagaattatggcttagtccccccgtatcagttgaaattccggcatagatagcattcgctatatccgtgtcgatcacctctttaccccatatctcagtgaccacattataaagcaactcgcacgtggaagaaacactcgtgtccgaaatccggtacgttacatcatctgggtccggatggtgatcgatcataatcacctctccttcaaattccttcacgaaaggttccaaatctccctcgcgagccacggtattgtgatccagcataaataatatgtctgctttatgtaaccactgtttacactctttgggacgattctgaaaagatattgcatccggaatacgcttcaaccattttaaataatccggaatatagtcgcacgtcatcaactgtgcctgaataccaaccttatccaacacttgccacaaggcggaacatgatccggcagcatccccgtccggtgaaatatgaggtatgatgaccgcactcaattcccgaccagtaagtctctcttttattttttctatgattgcttcgtacatttttgtattatcttttcagtatgaattcccgcaaaaataggaaaaaactgcttttctcatctaaaatatggaattttaatactcacaaacccagaattagatgtaatatatccgagttcctaaggaaaacataccccctattcgttgctttttcagagatcatcttttgctcatccattccccattgtataagctctgtatgagcttcgattattctacgaataatgggtatgttttctcttgtattacgacttattctgtgatagatctcttttaatttaataccgacaagtgaggatgtgaaaaaacgaacgtttaaacatattacaaatatagtctatttattgatatttttgaaggaatctaatttttgtttaatattttcattttcaatacacagcagttatcaaagtctatttttgcaaattataatctatctcaaagaatgtcaatcattaaacgttccatttatgatataaaaaacaatcgcctaactccttgttaatttgacactttaaaagaattcaataatagatatgcagaatagtttcgtatcacatttacccgacaaagacaaagaaaaaacttttcgctatttatatgagaagtatgtggtccccttacgctattttgctataaaatacattaataatcaatcaattatttctgatatcgttcaagatgcatttgtgcgtttatgggaaaaaatacaacaatttaaagatgaaaatgaggcaaaagcttttctgtacaaagttgtacaaaacgcttgtatcgacttgattcgtcatcaagaagttgcccaaaaatacgttaaacacgttatctccgaaaatacggaagagaaatcatttctggataatatgctggaatccgaaatattccaagccttacgcaccgtatttaatgaactcccacccgcttgtaaagaagtgtatttactcagcttgcaggggaaaagccatgaagaaatttctctacaaatgaatatcactatcaataccgtaaagaaacacaaaaataatgcgaatcattacatgagagaaagattaaaatatttactctctattttaacgtggatataaaaaatctcctcgtaaaattataaagaacattacgaggagaatgataaaaacacaacactattctgataacgcttctatcaacgccttatagctcccttgagctccaggtttggcattttccatcgatttctttgcataagcaattgctcttgctttttgttccgatgaagaatttttcactaaacgatgaagtattacatccaaattcaaacgaacctttgcatcttgatttgacgtcactgttttctcgtaaaaatccaacatcttgtcgtattccttcttatcatacatagaaataattttatgtaataatgtcaaagaatactctggagagaactgtgcggaatttacaagtttccaaacctgatccatactctctttcgaaacagcgcctttcaaataatcgataaccacgggaaaaataactctctcaatctttttatctaccgcactatcacctacctgcttagcaaactctttccggttattgaccaaaaacttaaattctgcatcagaaacatgattcacaaaattgtcatacaaagtccaagccgatacactatatgattcaggagccttcaatgttgccaagtaagatttaacctcaccatccacattcttaagttctccggcatcagacattgtctgaaaataatctgccatcaacttcaccgatctatcccctgtctcgtatttacttttcaaaatataataaggtgtgctttgcttcatacccctttgtattgcctccatgaacgcacgtgggtctcgacctcccagaattttgtagataatatttccatcaccattcaataaaaacatggtcgggaaagcgttgacatcaaattttttctgtaaatctattccttcccctttctccatatccattttcaggctcactagattctggttaaagaaatcaccaataaacttttgcttaaacacttgattgctcatcattttacaaggtccacaccacgtggtataacaatccataaaaagaagtttgccttgatccttggcttttttcaaagcttcctcaaaagaagattcctcaaattttatcccatctgtatttaccatatcatttatagcggccagataaaatttcttcgccccagaagtttcagcccgttgttttaaatacgtgaccactcgttcctgttctttcttgtccagctcttttatttccggtaaagttaaatctaaagcaaccaacgtctgctccggtagtgaatccagtttatgctcaaaaacatccatcatcttgtcaaattgcccctcaccccgataccttgcaatttcatacaggggatacacgtgatgattctctgtgattccggctttttgcatatcaagataaatattcaacaactcctctccatcataagccttttttccgctggcataaggataaatttcctgaaaatataaaccggcaataattcgatctactttttctgcaccattggatttcacaaaatcagctttgttttcaaccatgtatttaaacatctcatcatttacactcttcaactgacgggtaaaaaatttccaatactcttttttagaccattccttctttttcaacttgttgaaaagttcttcgatgatctttgcatacacctcaccatcttgatctgcaacacttaatatatcggcataatcactcaaaaatttaacactccgttctcccgcctcatatctcttgttcattccagcgaacgatgttttgggatttaatgccttctctaaaatcgccttgaattccgggatctgataccctcccacaatccgatgcacgatttggccgttttcatctagaaccagataatgagcttgaaacctgatacgatatttttctgccaacggccttccttcccggctggttacgtcaataaaaaaattcacgaaatgtttatccatccaatcggcaaactcttgatcgctaaacacaagcttattcatcgaatgacaaggaattgcccaatcggcaaaacaattgaaaaatatcaatttatgttcctctttcgctcttttcaacgcttcctcaaaagaataaacatacttcatttttacatctgccttcgcggcatccccgtacatactttgggcaaaactacccaaagcaaacatacatacaagatttaatacaataacaagttttttcatgtgatttctttttacatttttattctttaatacaacgaacactatatgctgcggtcaaatctgaagtcccacgcataatccggtcctctttcaagaaaaacactctagtgatccccaaatcgaccgtatcacgttccactttatgcgtcgatgaccagaaataagcattaacatctctattatagaaagatcctccgtacatatacgctccatacaacctccccccggcgtaaacaacgtcaaagccgatcccgtctttcccaaccttcaataaattcccctcgtaatttcccctccattcatccagcattccgatctgagaaaccgacattcccagtgttgcttccaatttcttccaatcatcatcggtaggaagtctccaaccttccggtacagctttcaaagccccctcatacgtgtataaaaaaccaaatttcttcgaatactgtccattcgtactctcggctttggcgagacgctggttcgcaacttccaatattgcagccggataaagattattatacatccgtttcaaagaagctgtcgcttctggaaaggaagtaccgtaatacgcttcaaaatttgaaagacaattttccggagtatatgattccatccacatttcaagtaattgtgccaaagtaaagaaacccaccgttccctcaaattcacccctgtcaatacccgcacgcacggaatcagcccacgattggctattcacacggatatcctgtgatctaatgttttcctcttcataagtgtaacatccgtccaaagtgccctgtggtaaacggtattttaggttttctgccatccaagtctgtcccccgattgtaatgcatttatacgtgttcatatctcgtgcatcttgaaaattagaaaaactaatttccggctgaatccaatcacgtttatcatcatcctggcaagcacaatacacaataacacccagtaaaattataattatctttttcatactttcatttttttacaattctacacctagttcatcggtgataattttacatagaatctcgtattttttcatgaccaaaggagaatcaccccataattgctcgaattcttcttttgaatgttgcaatatctcggtgatataaccatttagatcatcttccatattatccggagacattagtgaagtaaatctaccagcactgacaaaaccgaattgtccgattgcggcccgtacagcagctctgaattcagctaattcttcgggggccatctcattacatccaaaccaactgtcagacaacgcagcagggctgaaacaatacctgggccaagttgttccatccacgtaatcataccaatgaggatcaagctcgctccacatgggaccataccagactttatccgacacatcattaaaagcggctaataaatccgtgtaattcataatcttactcttaaccatttctttcatcatcgtctccggtaaagtgattatctgagaatcagtccaatctccggtcatcaacactgtccgataattaatcgtgtaactccctttttcgtaaattttctcttgatcttgagtatcaattgtttttgcggacttggtcacaaaaaaattaaacggccaaagaggttttgctgctaactttaaataatcttcaataattcccaaagcctttaattgttcttctggatctgtcatgtactcgtaagtatacgtgaggcggttgtacgatgtaaatccccaagctaaatccaatgtctcgtaacgatacacatctttccctgtcacatcccttttgacaaagattttcccgatcgtatcgttaaaataaaccggaaccccgtatctatcatatatttcatacacacgatgctttatcggatccgaaggatcatctttaatttcgtacaaattttcaagctcgatttgggaagttaatccattctccttttcgcaccccaagatcaaaagtgccaaaattaaatatattgcatttctcataacttattcattatttctatacatcaatctaacatactcccgatcttcccggatattatcaggcatatctttatcaaactccagtacggctttaggaatagcgaaaacatatgccggatcatctacattcaactgataaacttccgcgtatttaaatacacttcttccatcccaatcataaagcgcatacactcgttctataatctttttaaacgggctcttcttacacacggcatatcttctcagatccaaccaacgatgaccttccaaacaaagttcctttcttctctcgacacgtacctgctcgataatttcatcggcagtatataccacatcctcgtaatctttaattcgtttaccccgtaatcgattcaaccaaccagaagccgccccagcatctcccaacatggcacaagcttccgctgcatttaaataaccttctgcggtgcgtaacgtgaaaatatccgaaacataagaacgatgtttccccatctgatacttacgatttaaacccaagctatcactttgcgtcgaacgggtaaaataaatggtttgccgataatcattttcatcatatagtttatacaaatcattcgatacacaaaaatcacccccactacccgaaaattcacactgcaaattcaaaggaccttgagaaaacaataactccggacttttctccgatatagcatacccatccgtattttccgcaatactgctataatccaataacgccccgttttgggccaataacttttctgccgtactttttgcattttcccaatcttgcatatacaaatacacccgacttaacagtaacaaagctgcatcctctgatgcacggtagaaacttttcgtttgcgggctttccgtgaaacaacgtactgcctctttcaaatcttttacaatctgctcgtacaccttagctaccgaggtacggtcaaattgagtctctttctctttatcatgttccacatagtacgtcaatttcagaggaacaccgggttccgtggcagcattgtccggatcatatgcttttgcgtacagatttactagcatcaggtaaaattgagccctcagaaaataacactcaccctgtactcggatagcatcctttacctcctgttccgtattctgactcacgttgcccagctcatgcaaaataatattcatggaattgattcgctgatacaaagcatcccagttaccattatcaccggacaaattatcaccggtgtgatttctaccgacttccatttgccaagttgtatacccataatacactccatccatttctgttctgttttttaccgcattataagcaatcacggtgttaatatcatcatccaggatattgagttgccaaccaatggaaccatttcttaaatattcaatctccgaagaaggaatatacccgttccctaacaaaacttcatttaaatccgacaccgttttcggaacaaccagatcttgcgaatactcgtcaagaaaattcccacaactggaaagtaggattaaaataacaatataaataatacctctcatcttcatatacattaaaatgttacgttaaactgaaacgtgtaggaaggacgcacggacaaattcggttttgcaaaccccgcttgagacgggtcctgtccctttagttctttagctgatatggtgaataaattcaacgcattcaaactaagcgacaaattagaaaatggtgttttctttaaccattccggagcaatattataacgtaatgtcatggaagagcatttcaaataactgccgctcaccacccgcagatcagaattgtcatacatattccaaacattactagcgaaattctgaatatgagatatagatacctgagtcccggaaaaatgggatatatatttcatgtactcgggatctgccggactcataataaccggaatattcgtatacgattcatctccgggagccatccaacgattcaaaaactctttcctgacattcatttccgaacttacacccgaaagcacgggagaatataacgggaataatcttacttttgacccgatactgtaagataggttcatggataaagacaaattcttatacgtgaaactattggagaaattaccactgaaaatcgggtctctttgcccactttttttcatcgtcattaaaaccgtttcctccaacgtcttgtatttcaacaaatgctgacgatcattgtaatcatcaaacatcggagtcccgttggaaggattcaatcccaaaaacttgtatgaataaaaactaccaacagcaattccatcaaccaacgccgttccattcaggtaatcagctaaagtataactttctactgatccggttttcaccttgttgaaattcccggaataatacgtggagaatttccattgaaaatcttttgtttttacaggtgtagccgataaagaaatggaatacccgctattattcaagtctccgccattcataatataagaatgcccactaacaccgttcacggaagacactctcacggttgtaaagcaatccgttgtctttttggaataaacagaaaactccatacttaaccgggatttaaaaaagcccacttcaagccctccgtccagttgttgtgtttcttcccaacgtaaattaggattcggataccgtgcaattgaagacacgttctcgttatatataggatctattgtcccctgtttaataatcaaattcggactttgatcctccaacatgtttccttggataccgaaagatcctctcaaacgaagctcactgataaactctacatttctcaatatattttcctgcagattccaactcccggataccgaccataccggcaaaaagcgttcattactacgactaccaaatttattcgatgcatcaaagcgcccgttcacgttcaacgtaaagtgattcctataactataacttaacacgaaatacccggaaatctggtgagaaatcccgtgaccgatggaacgatgattctgattcaaccattctttatatttgggataatcatctaaattctgtaattcatctataaactgcaatccccgatctttcacaaaacctcggttttcatcgctaatctgtcgagttgtatttccgttcaactcaaatccccccatcaacatcatcatatgctgttgattctccccgaataatttacgataatccacttgagtacggaaagtatacccttccgtgatagaattcgtagtctttaaaatccccccgtaaggtaaataacaagaaccaacagtcccggtcatgggcaactcttcgtattcggaatttttccaacgagccacgtaattcgtcttttctccccaccattgctcctgcaatgtaccactcctgttataatttccggaaatcgatatatccaatcccgtgaaaggagttattttaacatcaagcatcgccccgatcgtgttcccatcgtactcgttagaactattttcaatttcattcaaaatattatatctaaacttgttactatacttgtttacccccccgtaagccactttgtcatagtaataaagtgatccgtcaggattaaaacaaggtagcgcacgtgtcgtattataagcataatccatggcatcaatctcgctcatcaagtgattttttttctgaacattcccgttcatggagaaattagccttgatcatctttgaaaaggtcatatccaaattcacacgggccgtgtagcgatccgtgtacgtagttttagataccccgttttctctgttataaccgacagacacgtaataacgaatatcattgttacctcccgacaccccgaacgtgtgatcatgagaataggtatcacgagtcaagatgtcaaaccaatccgtattcactgtctcgtaccacttcacgttttctacgaactcatcatacgtggataaccctttataatagctattcaaagctccttcgtaaccgaccatggtcatatctgacgggaattgatagtgcaaatccgacaattcctttccaaattgcacccgctgctgcgaattcatcaggttgatatttcggtccgtataacggggacgacgagtatatttagaagaatggttgtaagaaaaacgagccggtccgatggctccttttttagtcgtcaccacgatcaccccgttggcagctctcgttccgtaaagagccgtggcagaagcatctttcaacacgtcgatacgttcgatgtcctgcgggtttatcccagcgatagcattaccgatgatattaatataatccgggttattcaaatcatcattactcacgttgaccggatcatgcataataaaaccatccaatacccacaatggctcccggttacctaacaacgtggaagtacctctcacccgtattctaggagtagctcccacttcacccgaattactcatcaacacaagttccggaatccgtccttccaacgcttgatcaatactcgtcataccgggtgttaatatatccgacgctttaacggaacttaccgcactggtcagatgcctcttatcaatattctgatacccggtaaccaccacttcctccacctcggttaaatcctcttccatcttcacgtcaatcttcgtcttgttaccaacctttacatattgggttttcattcccataaatgaaaaaatcaacgtacattccccgtttttcggaacaccgatcttgtactcaccattggcattcgttgccattcccgtggtcgttcccttgatgagcaaggtggctcccggtaaaggattccccgaggcatcagtgaccacaccggaaacatacttcaaactctcgtcatcaatttttgtacttttcagtttaagcacgatcgtgttcccgttaatagtgtactctagttccgtgtctttcaagcaatcgtccagcacctgccgaattgtcgcatctttaaaagcgacatcccgttgccggaaagacttcagttgaggatcgctatacacgaaatcgtaaacggacactcgcttgatctcgttaataacatccttcaaggtagcgttcttcaaactgaatgataacttcatttcttgcgagtagactcgctgacaaaaaggtgtcgtaaaaaccaggaaaaggaaaaataaaaaacacctcttccttacaagattacaatttttcttcataactttgtaaatcaaatttataactattcgccccctgtttacccagagggagatataaagtagcgttcccgcgctactttttattttacaataactatattatcctctatatcaaattccacacatcccgtgtcttcaagcaggtgaaggacctcggcaaaagcatcgtgtttctttatattcagggaaaacggtattaaccgagcatcttcccgttcataacgaacgtcgaaatcgtaccatttccctaaatccttcagaatattttccagtgaacaattatcaaacactaaccgcccgtccttccaagccaagaacaaattcacgtttacctcctgcacgtccatctttgacgtttccttgtcaaaagaggcctgcatacccggggtaagaactattccactccctttgttttccacgctcacttttccctttttgagcgtggtccgaatacatgtctcgtcctggtaagcacgtactccgaattccgttcctagaacccgtacgtctaatgaattagcctccacaataaaaggtttactcgtgtctcttttcacgtcaaaataagcctctcctttcaaaaaaacccgcctgtcattccctctgaatttgaccggatacatcaactccgattccgcattcagataaaccgtcgttccatcggacaataccaacacatattcccctccccgtggtatcttcatcgtgtgatactcgataaccgtatcaacacttcctttcgtgtaagtcaacacgtcttcatccgcagaaagagccatcttcatggacaccaatgcggccagtgaaacggaatccttcaaattaatcgtggtcccgtcccccataaccaatatcgcttgtggttcgattttctttacccggtgggctttagccaccaaagaatcatcgggtaacaaggaatccctctctcccaacacccagattcctccaaccaacagggccacaaccagtatcgccgcatacggtagcaaccgttttaagaccaaacggtaacttcctatcgttttcccacggatcaacttccattcgttttccatctcttcgtttgtcatctcgcagaccttcaaactctcttcaaaatgaactcgggaagtcattctttgaaaaaggacctcattctcgggggaactttcccgccattcgagtaactctctttgcccctcatcgtccaatatcccctgtacttggcggacaattaactgtacgatatattctcttgttttcaatgtcattttcgtgcttttaataccaaaacgggaactaccccgtttggtgtaataagaaaatgccacttttttcaaaaaaaaatcacatgatgagttatttatttcttaatcatctattaatcaatacatacatatgtcgcaagaacgaacaaaaatatgaagttggttgacttatacaggaactttccttcgggaataaaatatgcttccgatcttttctgcttaaagtatttcttagtgttttacaaaaagagcgttcaactttaaacctgttgaacgctctttttattctaaatcctaaattttacaatctaaatttcccctctattcccactcaatcgtggctggtggttttgagctgatgtcataaacaacgcggttaattccccggacgttattaataatcttgttagacacttttgccaagaattcgtatggcaggtgacaccaatcggctgtcatcccgtccgttgactccactgcacgcagggctaccacactttcgtaagtacgctcgtctcccattaccccgacactcttaatcggcagcaagatggttccagcttgccatactttatcgtacagaccttcttcttgaagcatggaaatataaatgtagtcagcctcctgcaataatctcactttctctttcgtgatttcacccaaaatacggatagccaaacccggtcccgggaaaggatgacgttttaagaacttatccgctaaaccgaggctcttacccacacgacgaacttcatccttgaataacagacgtaaaggttccacgatcttcagtttcatgtaatcgggtaaacctcccacgttatgatgtgacttgatggtctgtgacggtccatttactgacgatgattcaatcacatccgggtaaatcgtaccttgccccaaccattttgcatctttcactttatgcgactcttcgtcgaacacgtccacgaatgttgctccaataaccttacgtttcttctcgggatcttcgatacctgccaaacgggaaaggaaaagatctcccgcatccacaccgatcacgttcaagccgagttccttgtaattctcaagtacatccgagaattcgtttttccgcaacaaaccattgtccacgaaaatacaagtcaaattcttaccgatagcccggtgtaataacatagcggcaacggtggaatctaccccccctgataaaccaagaatcacccggtcttcgccaatcttctcctttaattcggcaaccgtagtttcgataaaagaatccggtgtccagtcctgtttacaaccacagatgtccaccacgaaattcttcaacaaagcggttccttccgtgctgtggtacacctccgggtgaaattgaataccgaaagtttcttctcccccgacacggtaagcggcattctccacgtcaggcgtgctagcaaccaccgtgtaatgcgagggtaacacctctatcgtgtcaccgtgagacatccacacttgtgaatgttggctgatatttttgaacaacgggcaggaattatcaacaaatgataaattcgcccgaccgtactctcttttgttcgaggccttgacttcacccccgaaataatgggccaaatactgagctccgtaacatactcccagcaacggtaattttccttttatagaagacaaatccggttgtggggccttctcgtcacgcacggaaaaaggacttcccgaaaggatcacacctttcacggacgcatcaagtgcagggtagtgattgaaagggtaaatctcgcaatagacattcagttcccgcacgcgtctcgctatcaactgcgtgtactgtgaaccgaaatccagtattagaattttctcttgcatgtgaatcgcttatttattttcgggcaaagatacggttttttcgtcggaacttaaaaaaagtcctgacgaaaaagttacaggttacaagccaacgtaaccttaaatccccataaaccgtaattcacttgcactttacaattttaacctgtaacctgctaacttgtaacttttattcttatgcacaacacgagagatagttttggctctaaattcggggcaatagctgccctagctggttctgcggtcggcttgggaaatatctggaaatttccctacgaggtggggaataatggcgggggtgcctttcttctggtatacatatttttcacggtagccataggattaccggtaatgctttcggaatttgctctaggacgctattccggaagaaacgctttcggaaccttcgaccgactggaacccaaaacagcctggcgttatttcggggtactggttcttcttgcagccacgatgattctctccttttacgggacgattgccggatggacattggaatatgtctttaaatctttcaccttctcttttcatgccaataccaatgttaacttgaattccatgttttcggactttatcacgaatccctataaacccgtgttctggcaaatcgtgttcatggcactcaccggatttatcgtgctagcaggagtaaaaaaaggtatcgaacgatacaccaaactcatgatgcccctccttttcgtgcttatcgtaatactcggaatccgggcatgtacgctggacggggccatggaagggataaaatttcttttcttacccaagttctcagaacttacttcgcagggagtactttctgctctgggacaagcctttttctccttgtcaattggcatgggggttctcttgacttacgcctcttacatcaaaaaagatgaaaacctgacttctatatccttgcaagtgatttgcgcagacacgttgatcgccgtgttggcaggaattgccatatttcccgccgtgttcgccttcaacattgcaccggattccggaccgggccttgtattcctcacgttgccacaagtgttccaaagcatggctttcgggcaactatgggcgattcttttctttctcctgctaactatggccgctctcacgtcctctatttcacttctggaagtaatcgttgcctttttcgtggaagaaaaacatatcagccgccgcaaagcgactgtcatatccacagtaattgtcacgatcttcgggattttatgcacactttcttttgggccgttaaaagaagtccatatcggcaacttgtcgatcttcgggatatttgattacattagttccaacatactgctgcccgtgggtggaatcttgatttctatttacgtgggatggagattcgaccgccgtttactagaaacggaattaaccaataatggagaattgaaactaggattactgaaactgttgatattcgtcctaaaatatgtagcacccctgtttatcctcgtgatactattacactcactaggactattctgattattctctcaacaagctcttctctatggattcgctacctcaagtacatatcaacaacataccatgaacacatcattaacactggctattgttaatgatgtgttcatggtatgtttagattatattttaaaggtaaagcaaggatagtctaaccatcaagcagggggccagcatcgtaaaataaattagtgaggttcaccgcttttttccaataattctcgtgctgcacgttccggatcgtcagcagagacaattgccgagattaccgccacgctatccgccccggccttgcatatcgacgccacgttattggaatgaattcccccgatggcaactaacggatggcgggaaacggatctgatccagcgtaagccgtccaatccccattctacgatggtatttgttttcgtcgtggtcgaaaacacgggacttgctgccacataatccaagtcatagttattggcctccaacacttgttccggtgattccacagataagccgataattttcccttccggcagtaaccgcttaaccatctcgtaaggcatatcgctttgtcccacgtgtaccccatcagcattagccgccaacgcaacatccacccggtcattaataatcagagggaccccgtaaggagtcaacacttctttcaaccgaattgcccgttcaacaaattctcgggttgacgactctttttcccgtaactgtaccatactcaccccaccttttacagcagcctctaccgtacgatacaagtccttccctaacaataacctttcatccgtaaccaaataaattcgcatatccctcttattctgaaactcgtacagtctgcatgaattgttcccggctcaaattatacattacatcatacaaatgaagttgcaatgttccagggccttgagatatccccacggcaatctcgccacatacccccatgaaagaagtagcactaacggctgccataaatggattctttacaaccgcggcaaatgcccccagaatagccgaagctgtacaccccaacccggtcactttttccatcatcggagaaccgttatgcagatatactacccggtcgccttctaccactagatccgtctccccgctaacacaaacgatacaccctacacgctggcttaacgctttggcagcatcaaggctatttaaagaagattcggaactatctactcccttggattgtgttgataatcctgccatagtcatgatctcagatgcatttccccgtataaaagtcggagttccggctaccaatatatcccttaacgtttgattacgaaaactcgtggccccggcacccacgggatcaagtaccacgggatgccccacttcgtttgcccgccggatggccgctttcatggattccacggtaaaacgatccaatgtaccaatattaattaccgtggcacgacataaagccaccatctcgtcaatctcttccaaggcgtgtgccataatcggtgatgcacctgcggcaagtaacgcatttgcagtgttattcatcaccacggcatttgttatattatgcaccagtggggattctgccttcacccgctggatattttcccaaatttgatccaacatgattaatctattcttcttcctccaagtaaatcgtgtaccgatcccagaaattgtgatcggtgggtacttcctcatagtacactcttccggcaatcggcgtcgtcttgttcacactgaccttggtagtttggtactgcatctcacccttaatccggtcggcaccgtccttgtaagtgtaaacaatacttacgccactgaggaaatagtatgaactaacacgtttatagttcgtagtgattgtggccatcacctcatgccgaggactatccccggcaagcagcaagttacgtcccaacaggttaaacgcagaagaagttatatgcatcacgttctttataatcgcaaaactctttaattccacgtacaattccccgctgaatttcgttacgtttgccgtaccggagtttgacaaggaaggtttcagacattcataagtaacaatctgtacggaatccccttcatacacgaattttcctttacttctcagtttgaagtctcggaaattttgtaaatccagtatattacgagtattacgaacaatatctgccgtaattatatcatcgaaatagatcaaaccgtcaacagcagaaccgctttcaccgctccggcgaacctgcgagaaattataattcaacgctttaaacgtttgctccacgttcgaacgcttatatccttcactatcataaatatccacgatcgcctccttaaatttcttctccccgtcatttacctcaacaccatactcgaaatatccctcataattatagggacgcggaatataattcctcccgatattcttcaccacgttctccagtaatttcttcaacaccagagactcggccgtcacgtccacctctccgatcccgtaagttaccggtttcagaagaatttgcacttcccctttatctcttgcctcatacaccttcatctctgcggatgcatatcccacagcggacactctcatcatgtaagttgccaatttttccgacacgatcagctcaaacaaaccatccatatccgaggctgcacccgccgcagttccgataatcccgatatttgcaaaagcaataggttgccgtgttgtctcgtccagcacaacaccttttacccgaatcttcccgtcattctgagcttgcatgaccgagaacactcctaaaaataaaataattaatgatagtatctttttattcatagcatttctattattcaaaattaattttcttctgcaaagatataaaaaagttgcaggttacaagttcaccagtcgcaagttattaaaaacaatacaccagatcgcctttcattaacaataaattaagattctagcattccctacattctttgttatacacaaattatttactacttttgtcacacgacaacagaaaagttcaattaaaacatttcaaatatgagaaaaggattattttatatatcaggcatcttaatatttacatcacttctttcctcctgtgtttctaaaaagaaatacgaggagttagccagagcgaaaaggagcattgatcgggaagtggcaactttggagaatgacaaaaaatcattggaatccgagatgcagaaactgaaagatgacttcaatgctgttcgttaccaattaacggctaacaatgccgccaaggacaaacagattgatgacctaaacacccaattacgtgctttacaaaacaaggaatcggccttaaaatcagaattaaaagacgtgtcagaacaggtgaaatccaaagtacaaagtagcgaagggcaactagctgaactacaacttcaacttaaaaggacaaccgaagaacgggatcaaattcggaaacagttgagcgactataaaaccaacgcagactgggacaaccgcaaattgagcaatgaggtagaacatatcaagtcaaacctcaaattcaaagacagcgagattgcccgtttggaaaaagagattgccgggataaagaaacagttagcagacgccaaaagccagttaaccaagaaaaaacaagaagttgaaaaactaacaaatcaggtaaatcttctgaaaaaagaacttagcaggtaattaaaaatgatctatatcgtcatcagtataatagggctactagtaatagttgccctttttacatactcttcaaaatcaaaaacgaaaactgaagagcctcctgttgtagctccaccagccgactgctgcggggcccatgccatctgtgaaaaagggctaaaaaaaatagatgaaaaaatcgagtatttcgatgacgaagaactcgatcaatacaggggtattccctccgacagtttcgatgatcaacaaatcgaccagttccgagaaatcctttacacaatccgtcccgaagagttgtctgactggtttatcagtttggagaaacgaggaatcgaactgccggatgttctgaaacaggaactcaattaatgccgaatcaacctcttcctacccgacggaatatttccgctccaattttacaatgcagacaacgatgtgtatcacaatattcccgttttacttgtaacaaagcttgggactgcaaagcggaattcacctgtaccccgtaacgggtccacgcctccgaaacatgattacgttccgccttcagctcttccagccatcgtaacgccttatcacaatatcgttcttctccccgctctttcccgtaaatgaacaggaacggtatcaaggcattgataataattacattcttcatgctattccccagtttcttcacccgtttcatagaaaacactcctaatttatagtgagtatcccaataagaagaggcggttacgtccagtaaaccataaatttccgacacgtccgaggcatccagcacgctggaaagtaagaaattgaaacgcatcatcaaagaggccagcaaggccaagcgaaccgtgggaaaagcaatcggacgaatccgcatgaatttccattgagaaacattcatggctttcagttgaaatttggctgcttggtactcgtactcctcccgcaaacgaagggcatactcgtctgcttctggtacgtcagccaacaaaccggcatatcctaaaagcaatgcctccacccggaaaagagattcgctactacgaatcactttcttgtaagataagttttgagccaactgggcgaaaacatcagcattcacgttcccagaccagtaacgtaccaacatccggtaaaaacattcctcccagtcatttttagtctcccgcaacatcacctgaatatctttacatttacgttccaaccgctcgatcgcataccccgtaaacaacatttccaagcgagtcgaatcaatctctttcaagtgtcgatgacaacggggttcaacaggtactccctgcatgaaaacatactcatcccataaccgattatcatagactagggtgatcgcatcaatttcccgaccacgagaatcatatacttccatgtcggcctcacccaccacggagagaataacattattataggcagaatctttttcgtgagcatgacgaaaccaatcacttcctttctgatgaatctccacgtttcccacttgtacgacatcattgatacgcactttagcattaaagaaatccggtccggcatctcgattctgaaaaccgacattcaaaatttctactcttttccccttggttgacacacacgccatactcgtgaaaagcgaattcgcccatacatactgcaaaaactcttctgtcataaaattcacttgttaattgataagaatattttagaccctaaaaacgccattcacaatattacgcactttttagctaaaaaacaagtgctaaatttttataaattctaatcctttctcctttctataacgttttatacctatatttgttggaaagaataaccaaactttgactataacataaaacaggaaacgaatatggaaaatgagaatttaattaaaagcaagaaagataagacgttaatgataattatcggggtgttgtccgcagttttaatcgtactcttcgtgttcttcctcgtggagaaaaaggaaaacagggaaaatatgattgccattacggccgaaaaagaggaattgcagcaagaattgactgatttgagccatcactacgataatctgaaaacagacaacgacacgttgaacgccaaactcgtacacgagcaagaaaagattgccacgttgatggataaaatgaagaaattccgaaatgattcttacgctgaaattaatcgttacaaacgcgagatcggaactttaaaaactgttttaagaagttacgtggtacaaatcgattcgctgaaccaactgaatcaaaagctccttgctgaaaacaaagaggtgaagaaacagatggactgggtacgcgaacgcaataagaccttagaaaagaagacggaaaaaatggaagagacactcgaaaaagccaacacgctggccgtcgaaaatttccatatttacccgatcaacaaacgagacaaggaaaccacgttgaaaaaatgtttccaattaaaggcagacttcactatttcccgtaacatcacggcaaaacgaggtcctagaatgatctacttgcggatcacccgcccggatggagaagtactggctgcatccagcaagtcattctttaaattccagaatgcctccttgacctattctgccagaagagagatcacatacgagggagaaaaattggatgttgccatctattggccgaatgacggtagtctgacgaaaggagaatatgtagccgatctgttttcggataatcaacaaattggttcacttaaatttattttaaaataaaaaaatgaaacaagttacaagaaaatcagtaaactaattaacctagaatttgtaacttggaatttaaaactaaaattaataaacatgaaaacagatattgaaattgcaaactcgattgagataaaaccgatttacgagattgcagataaattaggcatagatagagatttactggaaccttatggaagatataaagccaaattaccgttaagtttaattgataaatcaaagatagatggtaaaaaattgattcttgtatctgccatatcaccaactcctgcgggagagggtaaaacaacaatctccatcggtcttacggaaggattgaaccgaataggaaaacaagcaactgtcgtactccgtgaaccctcacttggcccggtatttggaatcaaaggaggagccacaggtggtggttactctcaagtcgttccaatggaagacatcaacctgcactttacaggtgacttcggtgctatcgaaaaagctcataacctgctatccgcccttattgacaataatatccaaagtaaaacacattctttgaatattgatcctcgtacagtaacctggaaacgagtgatggacatgaatgaccgttccttacgccatattatcgtaggcttgggtggtacgtctgccggaatcccgcgggaaacaggattcgacattaccgcggcctcagaggtgatggctatcctttgtctgtcggatgatttcgaggatctaaaaaacaggctgggtaacatttttatcggttacacctttgacaagaaaccgatttatgcccgggatctacacgcacacggtgcaatggcggccttattaaaggatgcaatcaaaccgaatttggtacaaactttggaaggcaacccggccatcatacatggtggtccgttcgcaaatatcgcccaagggaccaactcaatcatcgcaacccgtatgggattaaccctctccgactacgtggtgacagaggccggattcggttttgacctcggtgcggagaaatttttcgacatcaagtgtgtgaaagccgggttaaaacctagtgcagtcgttatggtggccaccgttcgggcattgaaataccacggaggagccaagctggatcaattaaaagaaccgaacttggaagctttgaagaaaggcgttgccaatttggaaaaacaggtcgagaatatgaaaaaattcaacatctgccctgttgtagctatcaataaattcgttacggatactgacgaagagatcgcattccttgccaataaatgtaaagaacttgaggtacccatggaagtagctgaggtatgggcaaaaggcggtgaaggtgcggaaaacctagcacgtctggtttccaaagtagcagaacaatgtacttgtagcatgaagccattgtacgactgggaatggagcgttgaaaagaaaattgaaaccattgctaaagaattatacggtgcagccgctattgactacacgacagaggcaaaatccgatttgaagaaagtgatggacttaggcttggataaactcccggtttgtatcgccaaaacacagaaatcattgtcggacaacccgaaattacttggccgtccgaaagatttcgtggtaacggtacgtcagatcgagattgcatctggagctggatttatcatcccgatcacgggtagcatcatgagaatgcccggtttaccggatattcccgctgctgagaaaattgacatagataacaacggtaagattaccggattgttctaaataaattttaaactgacgtgtcaggaaagttcctcctgacacgtctcattttcgttctaagccatggataccattgatattgtcaagtttcccccgtatgcaagtaacgaaacgctacaagtgttaagttatcacctggaccgggagtgtaatcgtatcaccttaaaggaaataaactggccgaatacctatccttatcgcccggacatccatttccggattgcttataacgaacagcacattttcttgaaatttgatgtgcatgaaaatgaattccgagccacggaaatcacggattgcggacacgtttgggaagattcctgcgtggaacttttcatccaattgaaagatggggacggatactacaatatcgaaatcaatgcgatcggtacaatcttatgcgcttacggcacgggtagagagaatcgcagcctaatgccaatacaaataagtactaccattctcagggattctaccataaaattcaacaacgagaatcaggatgaagctttttatcaatggtcactgattatcagattccctcatacagcttttttcaaacacacttttattcccacttccggaaccacgatcaaaggaaatattcataaatgcgggaacaaacttccccaccctcacttcgtcacttggaacccgattccaacggaaaaaccggatttccatcgaccggaattcttcggaacacttatttttaaataactaccatgaaaacaggattatttatactgatagctggaattctctgcgtgttgctgaatgactcgctcctatttttacaaatcagacgttatttcaagcggaaaatatactcgtatttattctggttgcactccttgtttttcgtgtcatgtatcgtgtggtatcacctgtttatccccagtctaaaaggtccggaagcctatttctgggtagaaaaatgcatttctattatcttgctgttctatacccccaagactttgtatatcattgtaaatgttttctctatcttattgaggaaggctaaatgcattccagctgccaaaatcgtgaacagactggctctaggtatagctctagcctcctttattgtcatattgaacgggatcacgtggtacaggtacaactacaaaattgagcgggagaccgtgtgtatcaaaactctacccgacgctttcaacgattttcgtatcgtacaactaaccgatttacacttgggaagttacggggaacactatcccggaatcacgaaactcgtggatgaagtaaaccggttaaatcccgacttgatcgtgtttaccggagatatggtaaatagttttgcctcggaaatggacccgtggatcgaaaccttaaaaaaattaaaagccaaatacggcaaatatgccacgaccgggaaccatgattatggcacttacgtaaagtggtcctcaaaagcagaccaagagaataacctgaaacagtttttcaagaatatggaacgggctgatttcacgatgctgaataacacgaatatcccgcttgtcatcgcaaatgatacgctttatttggccggggttgaaaactggggacttccccccttcccttgttttggtaaattagctcaagccttggaagggacaaacggttatcccgtcattctcctttctcacgacccgtctcactggcgacacgaggtactaaattatcccgtggacctcatgctggcaggtcacacgcacgccatgcaactgggaatcaacatcggcagtttccggtggagcccggcagtatacatctacccggagtataacggactatatacagcaaacggacaacaattgtacgtctcccggggagttggttatctgggattcgccggacgtattggccaaagaccggaaatcaccttaatcaagttaaccaacgattgtaaataatgaaatcttcccggaaaaattctttcagtaccagattgactatctatatattatccgtttgcacggtcatatttctggtcatctttatcatcttgtatgtattgccgagaatatcacaatacaaaaatgtcacgatgtactcggaactaatcgctgaacaggcagaaaatcaaattaaagaacaaggcagggtgattgaaagaattaattccatgctgaaactcgagccgataaaagacctgcttattgccggagatcgtaacacgttcaagtccatcttgaaaaacactcccgaaatatgtggttgcgccttggaatatgaaccgggatataaaaatcatgatgtgtttgtttaccgccataaggattccatttatttcaagaaattgtcacatggtagtatccatttttccacagaacgtttggacaaagacgcccatgctcaaagaaaatcttattggagcaactactattacagtttttcctatatcaagcaacgggttttctcccgtttcgagccgatgtatgattcgaaaaatcaatttgtggggtatctacgactggatattttcttagaagaattcacggattttgtcaatcacctgtctctctataaaacaggttatgcctatctaatgaaccggaacggtattctaattgcccacccgaatcaagaaatccggatgttcagtgatattcgtaaatacgcagaaactaaaaatattgattacgagaaaatcctcaaaagagccacgaaagaagaaagcggatcgggtgaaatatccattgatcacgttcgtttcttcgtgtatttcaaacatatgccccacacgaaatgggtattggttgtaatctgtccgcatcacgaagtgtttgattctatcgcccgtattaacgatctgatcctgatctgttgcatctcctgcttgattcttctcttctgggtggttatccgggtgatcaaacgtttattctacccgttgaaacaattctcaacagtcacacgcatgattgctgacggtaatttcaatgaacctatacccatgattgggaataaagacgagatacaggaactacgggaatcatttgtctatatgcaaaaaaggatcgttgaatcgatcgagaatcttaggatcagcacgatcgaaaaagagaagatagaaggtgaaatgcgtgtagctcaacgcatccaagaaagattccttccctcaatcccccgaatctcgaaattccatttctccctgtatgcccgtttggaacaatccaaggctgtcggcggagatatgtacagttatttcgtgaaaagaaactgcctctattttatcgtgggtgacgtgagagggaaaggtattccggccgccttgtacatggcttcggtctccaccctctttaattatatcgctccccggaaacgtacttcctcggacatctgtaatactattaataattacatgagtgacaacgtggaagacgatatgttcatcaccatgttcgtcggtattctcgatttaaagaacgggatgctatcttatgctaacgcgggccatcctttcccaattctatgtacacgggaagagaaagaggtgaaattccttgaagattcattgggtattccaatcggtgttatgcgaaccatgtataaagaaagccgctatcaaatggaaagtggcgatatgctcttcctatacacggacgggttgaccgaggcccagaattctgaacgccatttttacgggaaggaacgggtgaaaaaggttatcgaatccaacccttgtgacaccccgcaacaactggttcatatcgtcttagatgatctgaaagaatataccgggaatagccatgaagaggcggacgatctgactttgtttgcagtgcaatatttataaaagggatagggataaaagtcgtttaccaaaccccctccccttttgattcattttttaaaatcccgatcaacaacttgtaaataagctttcaataactctccatcttggggattggtgttaggtcctatcggcttttttgttttcagatcatagatgtatgccccgttattcgtcaccactgccgccgcattcgtaaaagaataaaaagcaaaaggtttggccgtcgggttcaacagattcttgctgtaatggaatgcctcggcgttcattcccaactgggcaaacaatgttgccaccatatcggtctgagatcccaatgtattgaccacggaatcctgcacgttcatcgctcctcccgtgaagatcatcggaattcgataagcctccggcaaatgaggttgtaaattccccacgtgacgggttccatgatcggctaccagcacgaataaggtattatcccaaagccccgattttttacacttttcaaaaaattctcccagacattgatccgtgtacgcaatcgcattcttcaacttggaaccgctatcatctcccggaatctttgtctccataggaacgataaagggttcatgactactcatagtaaacgccatatacatgaacggtacttgggcaattcgtaaatcttcgtaaagacgatcaagcatatacccgtcatgtaccccccatttgaaacggttctcgatggcctctcccgaaaaatcatcctcggtaactgtaccttggaaactcatggtcacgtaagaacggaatccgccaaaattgagatcccccgcataataaaaacgagtagagtatccttctacctcgaaattcagcgggaaacggggttgttcataagtcttgttcggatatttcaacatggatgcgttcggataagcggggaaaccgctaatcacccccaaaataccccggtctgaacgatttccggttgcgtatatattagagaaaaatatcccttccttagctattgcttgtaaattaggcatggcgtcccaagcgtttaacgtgaatgtttccaacaagagtaccaccacgttaggtttatcggttttcaataccttgggataatctcccgtttccacatacacgctatccaccaactgttgagccttatcctccggcataaaagcataatttccctttactttgtcaatatgcattacctcgtacaggaagttccataccggattaaccgcagcctgattcgcatacatatttttgttattgaaaaacacgaaactcacgttcattggggccacgttgaaaccgcctctcacgggaataaacgcaacaccacctaaaataagatatacgacaccgtgccataatgcctctcgtctgtccgtacgaaaagtcttggccacccaacggcggtaaatcgcgtaaaaaacagccaccatgaccgcatagagtaacaagagcaacagaatcaaccctgtcggagttgaggccatagcctctccgggtgtcttcaagtaaaacaagggagtcgcatccatgtgatacccccaattcttgaataattccagatctcccacaataatcagactcgataccactaaaagcaaaagtgtcaggcaggagaaaatacgttttaatatttttgcggataaaaagacacctattgccatcagaacacaggacaacaaaatcacgtatccgccaaacgaaagatccatacgaaaccctttggcaaagatcatcatgtaatcatgtccggtaagagtggccgtctccttatattgatatatcaagaacaccaccttggccacccatgaaaatacaatccaaaagaggtagtatttcagcaaaaacagtaatttatcacgcataaatttattttagattttaaattttagattaaactcctccgtcagtttcgctgccacctcctctataaacagaggaggagctggtaactcttcccaaaggcaggaagtatttcaactctccctctgtttatagagggagtaccccgaaggggggagggagtttatttttcattttcaattctccattttcaattattaaaacggtgctttactactattcgccggattctcgaaactcttgcctccctcttgaaaatcggaatccaattgtggcatttgtggagccgcatcctcgttcatccgggagccgaaagtaaccgtcttcacggtagaaccacccgatgcaaacggagaaacctcttccagatcacaaaactgtgccaactcgttacggaatcgcaactgaatctctcctaccgcaccgttacgatgtttggctataataatatcggcaatccctttcaagctgtttcccatactgtcctccataatcccgtaacgttccggacggtgaatgaaaagcaccatatcggcatcttgctcgatggccccggattcacgcaagtcagacaacatcggtttcttggcatctcccgtacgttgctcaacaccacgattcaactgggacaaggcgatcaccggtatatttaattctttggcaataattttcaactgccgcgaaatcatacttacctcctgttcccggtttccccgcatatccgccccggcagtcatcaactgcaaatagtcgataatcaacaccttgatcccatatctttgttgcaaacggcgacacttggccctcaactcgaatatagagagggccggggtatcatccacgtatatcggggccttgatcaaggctttaattttcgagtgtaactgttgccactcttcctcgcttaacttaccattacgtattttctcggaacccaactcggtctcgctggcaatcagacggtttactaactgcaccgaagacatctccaaagagaataatgcaatgggctggttatgattcaccgccatattccgagtcatggacaacacaaatgccgttttacccatagaaggacgagcagcaataatcaccaggtcggaaggctgccaaccggaagtcacttcatccaaagcgttgaacccggaaggaaccccactcaatccatctgcgcgtttaccggcaatctcgattcccttgatcgcttcatcaatcaaagcattaatagccgttgtctctttttttatatttccctcggcaatttcgaacacctgcttttgggccatatccaccaagtcggccacgtctgttgcctcgtcgtatgccttgttctgtatatcagtacatacccggatcaattccctctggatatatttctgtaccacaatacgggcgtggaactcgatatgagccgcggatgccaccttcgaagtcagttgagccaaatagtaatatcccccgatctcttccagttcccctaaacgtttcatctcctcgctcacggtaagaatatccaccggttcgttattcaaggaaaggttttgaattcccctgtatatcttttgatgtgcctccttataaaaacattccggtttcaagaagtcactcacggtaataaacgcatccttctccaacatcagagatcccaaaatagcctcctccagatccacggcctgcggtggcatttttccgtattcggtttgtaacgatttgtaattatactccggttttttcgccatattaaatcacttttaactctttcaatttccagaaacaacgaacagttgcccgcacatctgccaaagcatcatgagcattctcgaatccctccccgaacaaaacctggtgtaactcggataacttcggagatttgaatccctgttttccacccggcaatttacaataattcgtggacattttcatcgtacagtatttcggtttcagaaataaagaagtcatcatccgtttccgctcgaattcagcccccacaatacattcgtcaaaactgatattatgcccgatcaaggcataggccacatctatcttatccgaaaacagctctaagcttgataacaaatctagcccttcctcctgggcttttattgtggtaatcccgtgtacactggatgcctccaccggaatagaaaacccttccggtttaataatatcgctacgttcctcgataatattccccttatcatcacacataatccacgcaagctgcaccaaccggggccaattatcaacctccgtcacgggagcattccaacgctgcggaagtcccgtcgtttccgtatcaaaaaataaaaacatctttactatattacgatttatgacttacgatttatgattttctttaccacgcctacacctgaaattataaatcgtaaatccgaaattatttcgtttcgccgttttcaaaactcttgttatactggtgcatagcccggtagctcatacccatgctggagaacccaccatcgtggaacaaattctgcatggttactttacgagtcaagtcagaaaacaaggtaatacaataattcgcacactcatcggcagaggcatttcccaacggggacatccgttctgcaaaatctatcagagaatcaaaaccttttatgccgctaccagccgtggttatcgtcggggactgtgaaatcgtgttgacacgaacccgtttttctcgtccgtaaatatacccgaaactacgggcaatagactccaacatcgccttggcatccgccatatcattatattcgaacatggtacgctgcgcagccacgtatgaaagcgccacaacagacccccattcattaatcgcatccaatttcttcgccgtctggagaaccttatgaaaagaaatagccgaaatatccaatgttttttgtaaaaaatcgtaatccagattatcgtaaggacgtttttttctcacgttcaacgacatggctaccgagtgtaatataaaatcaatcttccctcccaacaattccatcgcctctttaaataaacgctccaaatcttcctcactagttgcatctgcaggaatcaatggaacattattcttctccgcaaaatccttgatttgtcccatccggatagataattcagtgttcgtcaacacgatctcagccccctcttccaaacatttctccgccactttccacgcaatggacatctcattcaacgctccgaatattatccccttttttcctttcaataaattgtaactcataaaactgtattaaattaaaaaattctttctactattaaaattgaccgagtagcaaccgggcattctccaacgctgcatcactgacaacactcccgctgatcattccggctatttccgccacccgctcttcatctgttaaacgacggatacgggaaattgttcccacctgatcgtcttctttatataccttaaagtggtgatctcccgccgcagcaatctggggcaaatgggaaatactgatcacctgcatccggcgagccatctctttcatcatctcggccatccggtgagcgatttccccggaaacccccgtgtctatctcgtcaaagataatgactggcaactgtttcgtacgggacaggatgtacttcagcgacaacatcaaccgggaaatttctcccccggacgccacttttaccagctctcccggctcttgatttttgttcgccgaaaacagaaaactcacgtcatcttttcccgtagccgtaaaatgatccaatggggtgatcataaccctgaacacagcatgtttaatccccatgcttaccagcaatccccgcatctcttctctcaatttctcctccgatgccacacgggctttatgtagcttacccgccaacgaatccatttccgtctccacggacttaatttgtttttccaatatttcgatctgttccgcaaaggattgtattcctttcaacttcttccctaactcatcctttaaagcgatcagttcctcgactttttccaaccggtgcttgtgtagcaaatcatacatcacgttcaatcgctcgttgatcacgtcaactcttgccgggttgtattccactcgttccgccattcgttctgattcatcggctatatcttccagttcgagaatcaccgaactcaaacgctgctcgtagtcagtggcctctttcacaattccctccaatgttgccattctatttttcacccctttcaaggcctgaataacgggattatccgattccgttaatacatacgtcgattcggaaaaggcagatttaatattctccgcgttattcaacacggccagctcttcctccaactcctgctgttctccttctcgcagacgggcttcatccagctggttaaactgaaatttcaaataatcttcctcttgctcggcctcttttgcccgctgttttagtgaagtcagttctgacaacaatccctgtcggcgggtatattttacccggtaatctttcaacaacgcttgattaccgcaaaaagcatccagtatttccaattgatattccggttgcccgataagtaaggactgatgttgtgaatgtacgtcgatcaagaaactcccaaactctttcaataatttgttattaacgggagtatcattaataaacgccctcgatttgccgtctgccgtcaattctcgtctcacaaccacctcgtcgtcataatccaagtcgttatcagcaaaccatggctgtaaatcgtaccccacgacatcatacgtgatctcgaccacgcatttcctgttcttatccataatggctgcaacatcagcccgctgtcccaacgtcagcccgatcgcacccaacaaaatggattttcccgcacctgtttccccggtaataatcgtaaatcccttctctagcccgatattcgttttatcgatcaaagcgtaatttcctatatggatgttctttatcattcctacaacctttattgcataaatcatgcgaaagtactaataattttccattttcaattttccattttcaatttaattagtacttttgcgcaccggtttaaacatatagttctttataaaatgacaagtagaagattaattagaattaaagttttacagcttttatattcttacacgaagaaagagggagtgacaattacggaagtggaaagagatttgttcaaaagtataaccaaaagtacggatttatactaccacgttttcctcttaatcacggaaatccaacgtcgtgcatttttaaaaatagatgctgcccgtaatcggaaacttgcatcgcaaagagaattaaacccaaacacccgctttattgacaacccagtaatcaatcaaattgccaataaccggaaattcaagacctatgtatctacgaatctagtttctttgaacgagtgtcaagacgtggtcgccttattacatgaccgcatgatggaaatggattttttcaagctttatatgtccaaacccagtgtgacctacgaggatcacaaaaaactcgtactcgacatgatcacggaattaatcgcggaagacgaagatttcgaccaagccatggaagaaaagaatattttctggaatgacgattttgaactcgtgttgagtatcgtgtacaaaacggtgaagaatatgaaagaaagttattctgaagacacagttttctttatctccttatataacgaagaagaagacttgagttttgcgaaaaccctgttccgaaaatccattctcgacatgaaggaaaacctggaattagtggatcagttcacaaccaactgggaactcgaccgtatttccgacatggataaactaattatggatgcagcaatttgtgaactgaaatatttcccctctatccccgtgaaggtgactctggacgagtatatcgagatttccaaaaactattgttccccgaaaagtagcgggtttattaacggagttctcgacaaaaccgtagctcttctgaaagaaaagaatgaaatcagaaaagtcggtcgaggtttgatggagtaatactaccccctccagctcccccttacagaggggggaggggagctgattaccaggcggtttccctcccgtgtaacgagggttagaggccgtagccatttcacaaattcaacttttgggttactccttttctgttcatgaatttcgtttgaatctatcccagaatgttttccgtttttctgcctttggcgctttcaagcgattcatttcctttctttcctgagaacgtcgaaatgccgtcttgatacgccattccacttcttgcgagttacgagttcctttatcaatacactcatcaactccctcattcaaaaggctgtaatccggcaggccgctatatatcacgatggcaatatcatctcccgcttccctaacaagacgcatcacttcttcaccttgcattttcggcatatctccatctagaagtaataaatcataacgacctttttgatattcgtcccaagcttcctgtccatcctctaccgaggatacgttaaatccacactcttttaaacgcctaatttcaaatttccgtgtaaactcatcatcttccgcatacaaaatcttaattttcatatctcacgtatttagttattctttcaacaaaggaaaggtttatttttctaatataaagaattcaaatatgataaaattatgagaatttttagagaataaagatccgtacacgcaggcctatttcaatatagtctcaccgtagtctcacgcctagcatcattaaatatcgggaacaaatcaacaataacttaccgtccccgcctcggtaagttatcgttaacttatcgaatacttatcgaatagttacgcatgcgacactagtgagagtatactgagaaacagaagaataactaacgaaataggccccattcacacttgccacacaaaacatttattaacagatcacctattttatcccaataaataaagggtgacaaaagccaccctttacattctaaactaaactaaccaaacttttgtatcactacaatagtcaactcatacgctatattagctttgtaaatatagaatataaatattaaaaaaacaagttttttttaatatttacttgaaaaatctttagcctgataattcttaatatactccatcgcctcttccaccgtatttacaacagtatacagcccgtcataagcctttgacacgaatccttccttacgaatattactgataaaaaggaaaaaatactcgtaaaaatcattcgtattaagaaaaataattggtttattatgtattccaagctgtttcaaggtaatcacttccgtgatttcctccagcgttccccatcctccaggtaaagcgataaaagcatccgctttttcacgcatcatgctctttcgttctttcatatcgggtgccacgattaattcggaaataccttctgccgaaacaccccggtccacaatgcattgtggaataatcccggtcacctctcccccaccatttttcacggcatccgacacctcacgcattaacccgcaatttgttccgccgtatagcaactcccatcctcgcatcacgatctctttccccaaatcagccgcagcctcaaaatacacgttatcaacactctccgatgatgcacaaaacacacaaattttcatagattaaaagttacagtttgcaagttattcgtttcataaaacaagttgcagattaatagtacaaacctgtaacccattaacctgcaacttggaactacattgacgcttaagcgtcaatgttagcgtatgtagcgttctgttcgataaactgtctacgaggcggcacatcgtcccccataagcatggagaaaatacggtctgcctcggcagcattctcgatcgtcacctgacgcaacgttctgccatcaggagacatcgtcgtgtcccacaactgttctgctgtcatttcaccaagacctttgtaacgctggatatgcaaactgctctctttacccgctcccatttcctgaatcaattgcaaacgctgttcttccgtccagcaatagcgttgctcctttcctttcttcacggagtaaagaggcggagttgcgatatacagataaccgttttcaatcaccgatctcatgtaacggaagaataatgtcataatcaacgtggcaatgtgcgccccgtcgacgtcggcatcggccatgatcacgatcttgtggtaacgtattttttccaaattaaccgctttactgtcttccgccgtaccaatcgtgatacccaaagcttggaagatcattttgatttcctcactttcccacacgcgatgagccaacgctttctccacgttgaggattttacctctcaatggaaggattgcctggaatttacggtcacgcccttgtttagccgtaccccctgccgagtctccctcgacaagaaatatctcgcagttctccgggttattgtccgaacaatccgccaatttaccgggcaaaccggaaccggaaagcaccgtcttccgttgcacaagttcacgggctttacgggccgcatgacgagcttgtgcggcaaggattaccttgtccacgatagcacgggcatctttcggatgttcctccagataatttgctaatgcaacactcactgcttgagccacggccgacccgacctcagtattacctaacttagtcttggtctgtccttcgaattgaggttctgccaccttcacggaaataatagctgtcagaccttcacggaaatcctccccgctaatatcaaacttcaacttgcttaacatcccggaattatcggcatacgtcttcaaggtttgcatcactccccgacgaaatcctgcaaggtgtgttcccccctcgatcgtgttgatattattcacataagagtaaacattttccttgaactccgtgttgtaatgcatggccacctcgatcggaattccattcttctcggtcgtgatatgaatggtttcatcaatcaatttttcccgggtttcatccaagtattccacgaattcactcaatcccttttccgagtagaaaacttcagacttgaactcgtttgtgtccgaatcaattgttcgtttatcggttaacgacaaacggataccccggttcaggtaagccaactcccgcaaacgggcagctaaaatatcatatttatattctgttacataaaatatagaatcatccggcttgaaatagatcgtcgtacccgtccgatccgtctcaccaatcacttgcacatctgctaatgggaatcctttactgtactcttggcgccagattttaccttcacgataaatggttgcgaccaattttgtggaaagtgcgttcacacaagatacacccaccccgtgaagtcctccagaaaccttgtaagaacctttatcaaatttaccaccggcatgcagaattgtcatcacgacttccagagccgagcgattctctttctggttcattcccgtcggaattccacgtccatcgtcagacacgctgatcgagttatcctcgttaatcgttacatcaatatttttacaatagccagccaacgcctcgtcaatcgagttatcgaccacctcgtacaccaaatgatgcaaccctttcgtattaacatctccaatatacatggacggacgcatacgaacggcctctaacccctccaacacttgaatactatcagccgaatactcgttattcgtttgctctatttcttcactcatgttctgctctaattcttcactcatatgatatatttaattgttttttcttatttcttatattcgctaaactgttcattcacagccggaattttatcccgacacaaaacatacaaatataggaaaaatcagctataatatcgaaagtattaagatatattttcctctcgttaacacatcaattgaatcgtcatctataatgtcggaatttcaaatatccttactcttgaagcatctacaacaattttaactcataacttcaatcgcaacatcacgcatcaccttaaatcccaatcattcgtcctcctcgcagcccattgggggtgaagttgacatcatttagatgggctttccttatcttcatttcttcggggtattggctgcctgtcaggcaaacatttcatatatcgttctaaacgctcaaactgttcccgaatcggggaatattccatttcatctattttctcccgatacaaatcaaacaaaccgagagttccccgcttgtcataagtattcaaataatataaacagatgccatgcaaaatacgttccccagtccacacggccaaaggagcccaaccggaaacattaaaaatatccaaggctttctcaaccttctcataatcgttcatttccttgaaaaaagaaagtcctacgctctcgaactccacgatccacttttgcacgagtgaatgaagctttgctattttcatctgaaaccaaggcttatcatccaaaggtattcccaagtacttgtaagcccacccgacatccagcacgccgcaaataggcatacagtccttttccaatatagcctccttgtataattgactgactttcttacaagttacaaagtactccgtacgcaaagacaactgatcattctcccaattcgtgaatcgaagaatacactcgttcttccattcacgatcctcataaacaaacacatttttagccttcatgaaatgatagccatgcctctccatgaccggaacaatttgctcgataaaaagccccttgataccttcacctttcattttcgtatgcatatgcttatgcttatctataaattaaatgcctgcccctttttatcaacaacaaagagaataaaattttctttattttccctataaaagttcataaagtttacaaactttttattcattacctatatacaactcggccacaaagcgtgattcatgagatactggtgttaaatttatatatccggacacgattcgccccgcctctattagtaagggatgtacgtctctattcttctccaccgattgcataatttctcccgctttaggagaaaagcgaatattaaaaacaccctcaacactctcttgtaaataacgctgcaaagcgattgaaacgattcccatgttataacgcagatttatctcgacacaaggctgtatgccgaattctcctgactcgtcctcgtatatcatcatatccactcccatgtatcccacgtattttccgtgaaacaccgtcgtcactaccttttccaactgttcacggatttcacgtagaaatcccgttcccgtatattttgcaattatcccttccaaactagaattcgacgccaccgtattcccctcgtattccccccgtcgacttgtttgaaaaacagaatacccaagaaaattcaggtgaaataaacgatccatttcaaactccatggcaaaatccagcacccgattcaatcttttttccaccatcacgtacccttgtttacgcaagataccggataaaacttcctcttctttacacgtaatctctcctttcgggataaaaagaacacctttaccggaagaggaccaaggagctttcaccacgatattttccttttctgacaataacctaatttctgccaacgtgttacactcactaggaataatatctttccctagacagggaatagcctgtaccatctctgtcaaacaagtagcagccattcgcctgctatataaatccctccgttcatcactccacgttgacattacactctccttaaactgctcgttacaacgacttttcaaatctttcaacaaattgtgaacccggggactccatccccaaggctttaactcgctaaaagaaagtaattgagctttttcccaggtcaccggtttacaatccagaccaaaaacttcctctcgacttttcataaagtcgaagtctggcatcttcgtaaccaacacataatccccttttccggccaaatatgcagataaaaacgccagatcaccggccataacggaaatattcgtctttggcgtgtaaccatttgttccattggctattgaaatttcattatccggattaaacagatataaatcttgcatgaatgttaaattttagagcaaaagtaacacttttggcttaaattttgtattacatataaaagtttaaataaatgaggagaagaatgactatccacaatttatacagattttaaactaataacaacaagtttcatttattttgcaaaaagtgaaacattcatttcgggataaccgtaggatatatcgtgtaaacttgataatgattgaaaaattaaaactttaaataaatagatgagatgattttacaactagctttcgttttaacagcaatcatcatcggagcgcgtctaggtggtatcggactgggtgtcatgggaggtattggattgggaattctgacattcgtgttcggactgcaaccaacggccccacctattgatgtaatgcttatgatcgtggcggttatttctgcggctgcatgcatgcaggctgccggaggattggaccttatggttaaggtggccgaacgcttattaagaaagaacccggcacacgtcacaattctaagcccgttagtaacttacgcattcacgtttatcgccggtaccggccacgttgcctattccgtacttccggtaatcgctgaagttgccacggaaaccaaaattcgcccggaacgtcccctaggaattgccgtgatcgcttcccaacaagccattaccgccagtccaatttctgccgccacggtagcattactgggcttgttagctggttttgacattagtttgtttgacattctgaagatcacgattcccgccacgctaatcggtgtactcgtcggagccttcttctctatgaaagtcgggaaagaacttgttgatgacccggaatatcaaaaacgtttgaaagaaggtgttttcaatgacaaaaaatacgaattgaaagacgtttccaaccagagaagagcaagtctgtctgtttttgttttcattatcgccacggtattcatcgtactattcggttcgtttgataccatgcgtccttcattcatgatcaatggcgaacaagtattattagatatgccatctatcattgaaatattaatgttatccgcggcagctatcatattattagtaactcgtacagacgggttaaaagccgcacaaggttcagtcttcggagctggtatgcaagcagtagtagctatcttcggaatcgcctggatgggagatactttcttgcaaggcaatatggcagaattaaaatcttctatcgaagaagtcgtgagacaaatgccctggttgtttggtatagccctgttcgtgatgtctatcctcttatacagccaagcagcaaccgttcgggcgctcatgcctctcggtatagccctaggaatatcgccttatatgctgatcgccatgttcccggccgtcaacgggtatttctttatcccaaactaccccaccgtggtagcggccattaacttcgaccgaacgggaacaactcgaatcggcaaatacgtgttgaaccactcgttcatgatgcccggacttgtcgcgaccatcgtggccgtcggacttggactgctctttatacagattttttaaatactctaattataagtaaattttaaattacaggttatgaaaatgtttaagaatttaagtttgctggtagccttagtgctattctctgttgcgaccacgttcgcacaaaagttgcctaacatccatattctggcaacaggaggtacgatcgccggaaccggagcttcttcaaccggaaccaattacacggccggacaggtagccatcggtactcttttatctgctgtaccggaaattcagaaaatagccaatgtaaccggagaacaaatcgttaagatcggttcacaggatatgacggatgacgtgtggttgacacttgccaaaacaatcaacaaattactggcaagaaaagacattgatggaatcgtgatcacccacggaaccgacacgatggaagaaaccgcttatttcttgaatcttgttgtaaaaagtaacaaaccggttgtacttgtaggtgcaatgcgtccctctaccgctcttagcgctgacggcccgttaaacttatacaatgcagtggttgttgcaggagcaaaagaatccataggtaaaggagttttagtttccatgaatggtattattctcggggctcacagtgttttaaaaatgaacacgattgatgttcaaactttccaagcaccgaattcaggagcccttggctatgtctacaacggcaaagtattctacaatcaatccccgttaaaaaaacacaccagccaatccatatttgatgtaacgaatttgaactctcttccgaaagtgggtatcgtgtacagctattcaaacatggaaggtgacgttgttaaaatgatggctaatagtggttataaaggaattattcacgccggattaggtaacggaaacattcacaaaaacgtgttcccggaattaatcaatgcacgtaacaaaggaatccttattgttcgttccacccgtgtaccgacagggcctaccacgcttgacgcagaagtagatgacaatcaatacaaattcatcgcttctcaagaattgaaccctcaaaaatcaagaatcctcttgatgttagctttgactaagactaacgattggaaacagatccaacaatatttcaacgaatattaattcataaaagcacccaagtcctttaaagcaggacttggtgctttactcattggtaattctagttattagaactagaaattatatttttatcaaaacgccgaatatgaaaaaattagctttattaatacttgttatggggtgcgcagcaggcgctttcgcgcaaaatgccacgaacgaaaagactcttttcgaacgagtaacccaaatagagaaaaaaatggactggttcaacttctatttgaatatgcaaggttcttttgatgccagtttcaactatgaccaaagcggactaagcgaggctgcattcaagatgcgtcaattccgtattgaagcaaaaggtaacatcaccccttggttgtcctatcgctggagacaacgtctgaaccgcgggaacaacgggggcaacaacattgataatatgcctacctccattgatattgcaggtatcggggtaaaattaaacgaccaattttcattctttgccggaaaacaatgtgccgcatacggtggtatcgaatttgacttgaacccgatcgaaatctatgaatatagcgatatgatcgagaacatgagcaacttcatgaccggtttgaatatcgcttatcaaatctgcgacaaccatcaacttcaattccaaatcttggatagccgtaacggttctcaagaggaaacgtatggtcccggttttgaaaaaagccgtgccccactcttgtacacgttgaactggaatggtaacttattcgatggaatctataaaactcgttggtcagcatccgtgatgtccgaaacaaaagataagcaaatgtactattatgctttaggtaatgatttcacattctctaaaaaagtaaatatgtttgtagacttcatgtattctgacgaacaaatcgaccggaaaggtatcattaccgggattgtagggaatgaagatggccataacgctcttgatgcagaatacctgtccgtggtgacaaaagtaaactaccgtttccaaccgaaatggaatgctttcgtgaagggaatgtatgaaacggcctccgtgtcaaaaacacgtggtgatatcgaaaaaggtaactatcgtacctcttacggttacttggcaggtatcgagtactaccctttagaagacagcaacttgcatttcttctgtacattcgtgggacgttcttacaaattcacggaccgtgccgcccaaaaaggatacaacacgcaaagattggaagtaggatttatttaccaattaccgatgttctaactatcaataaattagacaaatcaagagagggaatatctttaagtattccctctcttgatttaacctattttattttgaacttgttttaacgaatgttatttttgcactacaaataaagcaaaaatttacggtctaaatttataaacaaaactattactatgaaaagaactaatctactcactattctagtgttaagcggaagcattattttttctggatgtgcctctatgagtaacacgggaaaaggcgctgctatcggagctggcggtggagccgcgcttggagccggcatcggagcattgatcggtaaaggcaagggagccgccatcggagccgccgtaggtggtgcggttggagccggaaccggagctttgatcggcaaaaagatggacaaacagaaaaaagaactggaagccatcgaaggagctcaagtagaaactgttacagatgccaacgacctgcaagccattaaagtgacttttgacaacggtatattattcgccacgaactccagtcaattaagcgcgtcttccagagatgccttgacgaaatttgccacgtcattaaagaactctccggaaacggacatcacgatctacggtcacacggacaacaccggaacccgcaccgtgaatgaaagaatctccaaagaacgcgcggaagctgttgccaacttcttggttggaaacgggattgctcgtaacagaatcaccacggaaggactcgcattcgatcaaccggtagccgacaacagtacagcagaaggacgtgccaaaaaccgtcgtgtagaagtatacatcacggcaagcgcaaacatgatcaaacaagcagaagaaggtaccttgaaataagatacaatcacaagtaaccactaaaagctggaaggctgttttcgaacgatctccagcttttagttttttttaattcaataacaatgatgaaaaagaaactatcactaatcacgctattagcactatcggtacagggtctgtttgcccaaggcctgttatcccacctaaacgacacgacaaacaaacgctcccttttcgaaagagtgaccaacattgaaaaaaagaataatcttttcaatttgaaactacatatgcaagccacgttcaacggtgcatttaccgatgggacattcaagcaggccgctttcaaaatgaaccaactccgtttggaagcccgcggggacatcaatgactggctttcttatcgctggcgtcaacgcttgaacagcagcaacacgcctcacgcgctggataacctcccctcctccatcgattatgccatgctctccgtacgtttgaccgacaagctcgtcacctccatcggtaaacaggcggcagcatacggtggtttcgagtacgatttggacccgattgaaatctaccaatacagtgatatgatcgattatatgctcttcgatttcatgaccggaatcacgttctcctatcaaatcacccctactcaagaaatagccttacaagccgtgaacagccggacagcttccatggatgatatttacgggcaactcccgggagacgtggaagaaagccgtgctcctctcgcttacacggccaactggaacggcaacttcttcaacgacaagttaaaaacccgctggtcatactccttacttagtctgacaaaagggtataacaatcacttttatgccatcggtaacgaactggatttaggaaagttcaacatgtacctcgatttctacctttccgatgaagaactcgacaaccgaggcatcatttcaagcctctaccgtcttcaaggggatgccgattgtatcaaaaacgcccgttacgaatcttgggtcaccaaattaaactaccgattccaacccaagtggaatattttcgtgaaaggaatgtacgagaatgcctctatttacaaacatatcgatcaattagaaaaagggaaataccggacagcttacgggtatttcggtggaatcgaatactatccaacaatggaaaacctacatttcttcgcatcgtacatcgggcgttcttatcgattcacgggtaaggccaaagcattgggagccgaaaactactccacctcaactttatctatcgggttaatctaccacatcccgttattttagatttacaaaataaataagggcaacctttagaaggttgccctcttccctgtctcggcacccccgacacagaaaaaaacaacacacacatgaatatcaatagcttcttcttcccactctcgcgttcaagaaaaagcatttactaaccctcctttttcgaggattttctgaaactccgcgtcaacataagggagcttgtacgccctctcgttcaaatataacagatgattttcatcatctatcgtcagttgttcccctgacgtgtaagcatccaccacagcccaatcaacaagaattcgtaacccatggttaatagccatacgataaaaatcccgattcaccgacttcgcgatcaccaatttcacccccacggccaccaatcccgtcgccgcgtgtttcacgagttgaccacacccgaaattctccccggcaataataatatctcccggtttcacgtcgcaagtaaaattcgggtccaatcctttaaacaaataaggtttaatctcctccacctgttcaagcgttaatcgacaggtcaatttttccgagaaaatctggttactcgatatattgtctatatccccgtaattccacaccccgttactcttgcggtaatcatattctcccagcacgacaggttcaacccggggaatgttatacttatactgcgttccctcgaaatgaatcatcggggtcaattcccctcgcaaagcagtcatggccacggttgccggggaagcgatatatttctcaacaccggagtgattcgtccccccgatgtactggctattggcggtagagataaaacggctattcccgacagacgccacgcgtcccactcccaagcaaggtccgcaactggagccgagaaccatcgcccctgactgtgcgatcttatcaataataccctcttcaaccgcccgtaaatatatatccctggaagccggaaccacgaataattggaacccgttagcaatatgtttaccttccaagatcatggaaaccaagcgtaaatcctccaatcgtcccgaagcgcaggccccgatgagcccttgctgtattttcagcccgacaagctcctccactccttggagaacattattgccagtgtcatacaccatcggaaagacattggccagatcaatctctataaaccgggaataaacagcctcttcgtccgcccaaacgccccgcaccgccggctcgttaaaatagtcagccaaccggtcgtccggagggaaagcagaactgaccactcccatttccgtggaaatattggctatcgtcattcgatcatcgatggacaacgaggcaaccccttccccgtgatactcgatcgccaacccgttcacgtccagcttactcaatatacccttgatccataaagccaaatctttagcgaacaccccttccggcagacggttctttaaaacgatcttcacggtttcaggcacccggaaccacatttttcccgttttccataacacagccgtctctgttttattaatccccatggctaacgtgttaaaggctcccgccgtggcggtatgcgaatcgctcccaacaaccaacattcccggacgtaccaactcggaaataatctggtgaccgatcccgcggtcacagtcatagaaatgctctatcccttgctcttccacgaaatcccgtatcgaattatattccaacgataactcgttgattactcccgacaccttcccgtccagcacgatcaccagctgggaaggattgtacacccgggttccatgaattcgttcaaacaaaaacctaacccgtgccgaattatcgtgactcatcacgtaatccggttcacggaccacgatactcccacgttcggcatttaatatcttctctacaaatgttcgcatatattgaatttagaatctagaagtcaaaatttaggatgaacatcgcaccctgaatctcacgttctaaactttacattgcactttatctaaaacagcttttatcttctccacgtcactataatactgctcgtattccggtagtcccggaaccccacccataaacacgttcgggttacggaattccatttcactatcccgaccgcttttcccgctcaagtgaatggcatccacccccgcttctattaacatgccggcattcgcggcgttcacgccacttcccgccataatttgcacgcgtccccccgcctgcttcaccaaggctttaatccgctccattccctcgtttaccgtgttgcgtcctcccgatgtcaaaacccggtaacacccggcctctataatcccctccaaagcctcttccatatctcgggtcatatctatcgcccggtgaaacgttacttttaaaggagccgccaactcgaccaattcccgcgtacgtcgcacgtcaaccgaaccgtcagcgttcaatattcccaacacgactccatccgcccggcacgctttgacaaaccggatatcctccttcatcatctcgaactccaggtcggaataaagaaaatcaccccctctagggcgaatcatcacgtaaagttgtatggacaacttttcccgggccatacgaatcatggccgcggaaggggttgtccccccatcatacattccggagcacaattctacccgggacgctcccgccaactgggcattcaagcacgattccaaagaaaaagtacatatttcgacatcaatattattcttcattccactctgtcaatttattaattcgctttacgaatataacaaaattattgacaaacttcaaataaaaaattaggataaaatgcaccttggccctcaagttatttctaacttacatacattcaacagagtacctcatgtcaaaaaagaatcgcgggagaaacaatgattcttagcctgtattgccttattatgatccattattggaacatacgggggcgctcttgaaacgtattcattatttaacgtttcccccacctgttccccacctgtgttatagtggtggagaacaggtgaagaagtggtgagagagtggtggagaagaaagaggttaagtgagattatttcgtttctcaagacccgtggggcctaagagagaatgaaagaagggtgaatttacgatatgttaaatgaattcagacttgttgacgagaataaattaacatttaatatataatatatgtgatttacaattaataaacataaaaatgacaacggggatattttgattttgcatgacaatattgttatacaggctttcacgtacgagagaaacaaagactatcgtgacacatgtatagaaaacacaaagtacgacgaaaccgggaaagatttaatgatggaggcttgaacgcccccaaaccataattatatatagaaatccatcccgaagagtttctcgaaatacctcttcacgatcgttttcacttccgccacgggaacctctgcccccacctctttcgcgatagaagttacccccttatccacgaagccgcacgggttgatataattaaaataattcaaatccgtattcacgttcagcgcaaaaccgtgcattgtcacgtaacgggaacatttaatcccgatcgcacatatcttgcgagcccgaggcgtgtgggcatccaaccatacccccgtggctccttccaaccgttccccggtaatcccgaactcccccacggtacggataaccacctcctccaacagatccacgtactccttcacccccaccccgaaattagccatgtcaataatcggatacacgaccagttgcccggggccgtgatacgtgatatccccaccccggtttactttcacgaattcggcatgagccgcctgcaactgaatggcactaaccagcatattcgcctcgttcccgctcttccctagcgtgtacacgtgattatgctccacgaaaatcatgcaattccccgtttcctctccccttaacttcgcggcaataatctcgttatgcagctcttcctgctgccgccacacgggcacgtagctcgcaactcccagatcaattaatcgtgtacgtttcataacttatctcacatgcttttcggcgtgataactggagcgaaccaatgggccactctccacgtaacggaaccctttttccaacccaatacgctcatattccttgaaggtatccggtgtcacgtactcttttacttcaagattcgcctcggacggttgcaggtactgaccgatagtcattactttacacccaactgccagcaaatcatccatcgtctgaagaatttgttcacgagtctcccctaatcccagcataataccggatttggaaacaatacccgattccgaaacctgacgaatcacttgtaaagaaatatcatattttgcccggctacgtacgccatccgacaattctctcaccgtctctagattatgagaaatcacttctggacgagcatcaatcacctgttgcacgagttcctgccttccctggaaatccggaatcagtacttccattgtcgtttggggattctctcgtttcaccgcctcgatcactttcacccaatgagccgcccccaaatcagccagatcatcccgatccacggaagttatcacggcgtgtttcaaaccgagcaacttcacggagttagctatattttccggttctgccgggtccaatggagccggacgccccgttttcacgttacaaaacttacacgaacgagtacatacatccccgccgatcataaacgttgcagttctgtttccccaacattcgccttgattgggacacataccactggtacatatcgtatgtagattatgttttctgactatatttaaaacttccgtggaactctgtcctttcggtaatttaattttcaaccattccggttttcgcctgctattacaacacgtcatactctcttttttttaatcgtacgcaaatatacgacgaagtttttaaatacatactgatatttctgatctttcaggttgttaaattcccggaaacacctcttttttttaactatatgcaaataacagaaaatgcgttaaataaacttggaaaacttgcattcattgggattataccctacatttgtttgcaataattcaaaaccaatttcgtaatgtacagagcagaaatacacacagaaaaaggtgttatgaaggttcttttcttcgaaaaagatgcgccgaataccgttgccaattttgtaaaactagccagagaaggcttttatgacggattaacgtttcatcgggtcatcccggatttcgtaatccaaggcggttgccctagaggcgacggaacaggaggaccgggttacaccatcaaatgtgagttaaacggggataaccagtaccatgaccggggagtattatccatggctcatgccggacgggataccgggggatctcaattctttatttgtcataaccgtagaaacacggctcacttggacagacgccacacgtgtttcgggcaagtttacgagggattggaagtaattgatgccatccgtcagggagacgaaattattaaaatcgtcatcacggaggaaaatgaataagcctgtgttcttagttgtttaaataattcagaaaagccgaagtgttaacacaacaacttcggcttttcacttgtatcttgtttatcttactttgcaaaaagagcagccaacgcgatagaattcaacttcgcatccacactgtcacccctggaagacaacacgctcggggcagttgcacccacaaggatagcaccttgacgagcgttagccaatttcgtgttcgttttgtagaacacgttaccagattcaatattcgggaataccaagcagtccgcatctcccgctaccggagacttgatttttttgatctcggcagcttccttatcgatagccacgtcaagagccaatggtccgtcgatgtcgatattacctaactgacctctctctcccatcttggcaagaatagcggcatccgtggtagattccactttcggaagaacttgttccgtggcagaaatcatggccaccttcggacgttgaacaccgagagcgttggcaatctgggtaacatacttcacgatagccattttttggctgaaatccggggccgggataatagcggcatcactgaacaccaacaacttgtggtaattcgggcactccatcacaaccacgtgagataacgtggccttcgggggcaataaaccgcaatccttgttcaagatagcacgcatatatttgtcggtactaaccaaacctttcatgataaagtcagcttccttgtcacgtaccatttgtaccgctttggcagctgctttcgtatccaccggctcgtgtacaattttaaaacgagagatatcaaaaccatgctccgcgcacactttcttgatttcgttctcgtcaccacacaaagtggcttcaacaatacccatttcaactgctttattcacagcttcaatagagtgactgtcgttagcataagctacaaccaaacgctttttttgggtattccccttcaataactcatagatgtcatcaattttctgtattgccatggcaaacttatttttttacttaattagtgatttatgttttaaatttggaagcaaaaataaagctttttgatgaaaatagaaacaaaaaggtgctttttgattttagattctaatcacttcgtttattcttaattttaaattacttttgtcttccgaataaaaaagcagaaatcacgtgtcgttaaaaaaaaatataatagcactttatttgatcaaggtttccaaatggtttaccctggtgatgccgatcatcgtgctattttacaaggaatgcgggctggatttggctgatatattcatcttgaagagcgtctattccatcgccatggtgtcgctggaaataccgacgggctacctggccgacgtatggggacgcaggaattgcctaattgcgggatgcatattttgctttctgggattcaccaattactcgatctccgacacgttcacggcattcttcctctcggaaatattgcttggattcggccaaagtctggtgtccggggctgattccgccctactctacgataccatgctacgctataaaaaagaggatgagtacttgaaatacgagggaagagttaccatggtcgggaatttttcggaagcttttgccgggatattcagcgggttgttagcagtttattcccttcggcttcctttctatgtgcaaagcgggattgcttttatcggcatcccggcagccgtagccctgaccgaacatgccgccaagacaagaattaaaaactcgtttgccaatatcgtgcaaatcattcaatactcacttttcacgaacaaggaactgtgttacaacatcatgttctccggcgtgatcggggctgccacactcaccatggcttggtttgttcaacccctgttgattgaactggataccccaacctcatggttcggaattatctggacaattctaaatctcaccgtggggatctcggccttatactccgacaaactggatcaacgtctgggaagtctgcggatgtacacgttaatcctgttcttcatcgtggggggatatattgcagtggccttcaatatttcttatattggcttggtatgcctgttcttcttttacatcgtgagaggattcgccacaccgatattaaaaggatacattaaccaaatcaccttctccgaaatgcgagcaaccgtactttccatccgcaacttcattattcggcttatgttcgcagccatggccccgcttgtcggctggctccacgacttatactccctttctgtcgccctgcaagccacggccgctatcgtttttgtacccgggttactgttcttaatcctgcaatggcgctacaaaccgaaagaaccttctttataaaataataatcccctaaagtttgttttgtctatttaaatacatatatttgtaacctaaaggttactttatgaaacctaaaagtatctcaatacaactttaaaacaataacaatcatggaaaattcaagaattgaagaagttgaaattgaaagatttaattcacttcgccttcgtgctatcagctttgccgtttggtttcttggcttgattttaatacaactcccgctcaataatctcgtgttggccacgatagggatcatctccgcattattctgtttatcattcatttacgccacgttcaaaacaacaaacgtgttcaaaaagatcaaaaaagattccacgctgaatcaagccttaatgaacgaaatgtatttaagttttgattataaagccgtatgcacgggattttactcgaccatgttttttgtaatgcttctattcatcgtgagcaactttatggagattcccggaaaaatcatatgcatgtccgtcatttacatccaagttgtttcaaccgatttacgaagattattcctgtataaacaataacgagtatgccaagccaagaattaaacaataaaataaagattcatagggtaatcaagaatatcagtcaggaagaactggcgattgctatcggggttacccgcaagactattaacaccatagaaaccggaaaatacatcccttctaccgtgattgccttaaagattgcccgatattttcaaaccacagtagaagatatctttgaactcaacgacaataaaccagcctgaacgctccccaacttcattattcgattcgaagaacgactctataactcaaaaaaatcccccaaaaacaaaggtacccggaacaacccggacaccctctttttttgataatgcaaaaaatgacttataaaaacatcctaaccacacaaaggaatgaatgaagccaaatacagataacatgccatcggctgaaaagaaacaggcatttacaacacaatatcccgataacacataccttcttcagcaagatgaaacagtcattctctcattaccagattcttttccctgaaattgaaggtggaacagcatgatctgacaccccccgcttgtaattgggacgcccactcatcacgaaatgcaaatccattccttctttaagatcatcataagtgatgtatgacttatcgtacttcttaccattcaaataaacctccttcacgtatacatttttcttggaccaattcttggttgtcacccgaatatgcttgccattactcatttgcatatccacggcagccaatcccggtgaacccaagttataaatattacttgacggagctgtggggtaaaaacccatcgtgttgaatatataccaggccgacatctgcccgcaatcgtcattcccactcaatgcatccggtgtgttcccgtaaaaagtatccatgatatagcgtaacttttcctgacatttccacggttgtttcaggtaattgtaaaaatacaatatctgatgacaaggttcattaccatgccaatatgccccaatacgcccttgaatatcatgggcccccggaatatcatcggccatcttggtcacgaacatagaatccaacctctccagcaacaaactttcacccgcttcattgatatatccctgaatatcatgaggtacataccaggtatattgtaaagtaaaaccttctgtaatatccccccaaccacgcacggaacccggtccctgatacgcgatcggagagaaaggtgtacgccagttcccctgactatcccgcccacgcatatacttggtttccgggtctatcaaattcttatatgacaacgcacgtttcataaagaagcgataatcttccgttttccccaacttctcggcaacccgggcgatacaataatcatcataagcatattccaagctcttggataccgattctttctccttatcaaaaggaacccatcccaatttcgtgtattccggcagacaatcatagtgcaggtttgtggcagtcgttttcatggcctcgtaagcccgctcgtaatcaaatcctttcacatctttcatgatggcgtcggcaatcacggacacggcatgataaccgatcatacaccacgtctcgttcccgtaaaaagaccaaataggcaacatgtgttccacacttttatcatagtgtactagcatggaattgataatatccgcatttatctcccgttgcactaaatgaaacaagggatgtaaagccctgtacgtatcccacaaagagaataccgtataattcgtgaaaccttccgcctgtccgatattcttatccaactcccggaaacgcccgtcggcatcttggaaaataaagggatgcaagaaagcatgataaacagaagtataaaaagtctctttttgttgttgtgttccttctatcacgaactttgacaactgttcttcccacaacttctccccttccgccttcaaagaagcgaaatcctttccttccagttcctgcatattgttcgcggccccctccgtgctaacagcagaaatagctactttcacggtaatcatttcgccttcccgggtcggaaaacgcatccaaaaacgtaaatcctttccccaagcctccaaatgactacggaaacgtttcgtgttatagatcactggtatcgtatcctgcatgattccaaaatcctcgaacggccgggaaaatactgccgtgaaatacacgtgacgttccggtccccaacctttcaccaacttatacccggtcaacgtggaatcattttctacccgaagattactccacggacaactttgccaaagcgtgtgattcaaatccagcaagacaaaagagctatcggaggccggataagtgaatcgtaaaataccactccgtataccagaggtcatttcggccttcaccctgtaatccaacaaatctaccccgtaataattcggggaagtccattcccgatcatgactataacgggaacgataaccggaatctggtttctcgtgtgttccgggagtaaaatgaatcttacccgtacccggcataaaaagaaaatctcccaaatccggaattcccgtaccactcaaatgcgttaaactaaaaccaagtaaggttgcgtgatcatacttataccctgccgcagcatcataataatcaaaatccgtgtcaggactaatctgaattccaccgaaaggaatttgtgaaccgggataaatatttccgtacccggaagtaccaaccaacggccgcacgtacgagattaacggctgttcctgagcatacacaaatttacatgccagtaaagctaaaacaataatgatatgtctcatcaattcaatatttattataacaatttattcttccgatgtccttggactattttcctccctcaatcacatcttgatgaaatgcatctaacatttcaaatttaacaacatcactatcacatgccattatcggtatatataaaaatcaaacgtccgggtttacactaatttgatataaatccagacgttttttgaatctattattttacactattcaatattgtttcaatctcttctttttcagaaggacgagtcgcaaaagccgtaataattttaaaatccctgtcgatcaaaataaaacgaggaatagaagccagatcccaagactcctgcaaagcataaggatcagccaaatattccttaatacgaggaggaatcccttccttttctaatttctctttccaacgtttcacctccaaatcaatagatattccaacaaattgaatcccgggatatttttcactcaattcttgaaaacgaggcatctgagccaaacaaggtaaacaccaagtagcccatatatccacgaacaacggttttcccttcagatcacttaatttcaattcattcccgtcaatatctttcaaaaggatatccggagccaaacgaccttccatcaaaatcgctcttctttgtaacttagctgaaaatgcttgttttaaatccttgttttggattttccgcgtgaaatctttatacaatttatagtctgccttcttcagtccacagtccaataaactcgcattctcctgtactttcatcaattccaaaaatgtcaccgattgtggaaactcaaatacattggaagaatagcattcacccaacacatcccgaacttccgcaagttccagataatcatcagaagctgtcaattctttcaacaacggttcaacaaagagtttgatcgtctggtagaaagcatttttcttttcctgtttcacctccgccgtgtcatcccatctactcaattgtccgtacgaaaaataatccaaataaatttgcacttgacaagctttaactcgaatagtttccaattcgcggaaccgatcatctactttcgtcaaccgattcaattcttgcaaccgaaccccgatcagagaatctatctttatccgacactcatcaaaagtcggtattctgctatttgaatccaaggcccatttcataggatcaaacatcttccagccacttaatcgctcacgtccttttaagtaaacatttgcctcttcccctactccttgaaattgtccacgagctacagcatgccccaacttcactttcaaatcatccccaggcgacaaatacaacaaattatgaccgatcaagtaataagtcggtcgtttcaatttcaactccaactgaaacaaaccgttagaatcaacctcgatcaacattttacggtcatgtatatttacagcaattccacagttttttatttctacttttcttattttgaaatccttcaacgagccggatatcttaacgatacccgcactcgcagaaaagaatgtagtaaatacaaataccaacaatactattatcctcttcatttccatatttttttaattagcagctctccaactcatttttttaatctttgtcaaacctgtccaacaagaatttgacacaggagttacctccaccttatccggattcatgtcttgaatatatttacgtaacgtacctccattcgcattattataagtcgccacgtaaaccggattagcagaaggttctatctgggtatcacacttcaacatcgttatttgatcttctccgaaatcctccaataaataacatttttcgttccccttattataatcataagcatacaatcgcgaaccgaccgcataaaatactactgtacgacgagaagagaaagcgtaaaaatccgctttatcaaaatctatcgccagagaagagctaatcgtgtaagcatctcgtttcgccacactggatgagacataaaacttataaatataaaattctccggagccatctttaagaagagcaaaagaattaccattcgtcgatcccccatccgtgttaaacgtgttttctccatacaccatcgtacgtcccgttttgcgctggtcccaatcgaaaggatcaccttccacatcattcattgtttttgagaacgaatcatatgaagacttcactcgcataaagcgttcattcgtttcatcataccatacaattccaccattatattttttcaaactgtacaataaataaggtttagcttttaaccaaacattaggatttgactcttctctatttacaggatcaatataataatctcctcccatcaatacggacgatccgacaaatatatacccattgttacaaacaacagcccgattataggtactggcaacatttcccaaattatcttttatacgtggaataatatccaccggcacaaagtccgaatcgtaagattgagataaatacaataatttagagaatacatccgtctcatttcccttaaacgttttacgatccatggaataagcctgggattttgtcaacacccacaatttgatacacttatcattactattgtaaccagtgtgaattacatccacaggatctctcaaaacaggtaaaccgctatctgccaataaatccctacataatacagtatcagtgctcatagccaacatttgtacatccgcttcaccttcccggttttctccgatcaacaggataccccttgaataaggagccccgacattaagtgaggctgttgcgactgccacaagatcagtctggcgatcaattactctaaaatacaacgtataactacgaggatccagttttaccgggtaatccaacgtgcgtgttgtccccaataaaacagtactattataagccacgttagccctccattcgtactggaaccgtgtcgtatcctctggatctgccattgtcatagtaactttaggatcaatctttaaagtcgttactcccatcgtcacattataactaccatttatcccctcgatagtagtttcatttacatcatgataatcgtaagaacccttgtcatcataacaggctgcaaaaaatattcctaacaatacatataatactttcttcataatcttctcaattaatagagtaacacatcaatcataataaccttcatccggaatccagggtaccccgattttagatgcccaaggacaaccgtcaaaatacatcagacgtccatcatcttccaacaccggatctttagcattataccgatcaattaaaagctgagacatcgtttttgcaatcaacatctgtaacgctaacggcatcgttgtcttactcataaaatcattatatgtcaaatcaaaacgctcgcaaatcatctctagcttcttacggctgaaagccccccaagaccccgattctgcaccatcataataaggagaactatccgttccgatccattccgttggcctgaccatcatatcactaaaccggatttcatgcaaggatgcatcaaaatgttcacgaacatctccactcgtaaaacctttcactgcatcccattccggaaaagcaagtttgaaatactgattttctaccaatttcaaccctaaaaccttttctccatgctggagagattcggtacgtattaacctgacgggaaccatcgccatatattccccggccccaatcataatatcgttctccagtggcagataatccacattcaccacggctgtagtgctatccggatttacttctacccgaaaagttcgatcataatccttcacagaaccggtaaccatcacttttatatcaaccgtggccgtatccgcatttcccaattgcatgaatttcacctctgtgaagggctgataaggccaagtgcgttcacttccccacgagtttccccattgcaccgcgaaatacactccctccaatccttcataatccatcaaatctttttcacaccccgataaaaagatcggtaacatcaatatataatagaatatctttttcataattcactatttagaagtatccgtattcgttctttgactggtttcactatccggtagcggaacaacatatttattcaactcaacattcttcgttccgcttgcctgcgttccatcaggaatattcacaatctctttccgtttatagaaaaagaacatttgcccctcacccaacatctcctttcgatattccaaagcaatataattttttaatccatcgactgtcggataaacactgaaacaattccgggcattacgaagggtattcaaataaccgacagcttcatccaaatcatcacaacattccgcagcgatcaaatacacctcgctcaatcggatcaacggtaccatgtaacgataagttctcgtaccggaattatcctcgaaatcttcatattttcggtgatataaaaccgaattcccgttattattataagtcgcccaaatcttgtagcgataatcattcttatcatcatacaactcttcaacccgtccgctattcaaagttccggcaaaagtcaagatttttgccgtctcaagagtaggggcaaacagcgtctcatgaattgtcccacgggaagaattataacaaccaaataatacctcagttgaaaacactcggtcaggagtagaactacttgttgcggccgcattcgttacaaatggaaacaattccgtacccgaatcccgaacggccttcaatatttctatcgccgtagcgtatgccaaagtcctatcacctccccacaaataaactctggctaacaaagctttcaccgcataataattcattctgaattgacgtaaattcacatccgtatcgtcatacacgtttttattctcaactaaataaggatcagacatcttcaacaaatctaaagcatccttcaaatcttttatcaccaactccaacgcttccgtcccgggtaacagggatgacatctgttgtttagacgttgtctgataagggatactctctttgctcaactcggaaggaatcggcccaaaaagccgcaacatatcaaaatgcagcatgccacgcaacgccaaagcttcccccttgatcatgctgaaataaggctcgggtaaattatcattcttctttccgcatttttcaataatcgtgttacaattagctatcaccaaatagcacttcttccacatattatcaaacaacgtcttttcattcgtttcagtaaaaattaactttatatactgatgaaaagcgtgcgatgatgatgaaaaattcgtgtaatactgtcccatggcatccaaagccccagccgtcaaatccaacccgtacaattgggttgtattcaattctatataaacaccattcaatgctttcacaaaaccttcacgatccttaaaaagcatgtcctctgatagcctatctgaaggtgtaacattaatccaagattcacaggaacacaaggacatcaggataactagcaatccattacttattatatatctcagttttttcatctcaaatcattttaaaatctcaaacctaaagacatcgaaaccgaacgagcaaacgggtaatcaattcccctttcatttttcacggtagacactctaaaaatatcattcatgtagaccctcacgtaaaatgaagaagcaccgatagttcgcagccatttcccttgagattcataccccatcgaaatagactctcccgagaagacattattgtcagcaacgaaacgagaagacatcggagtctcgtcggttattgaaatagctttaaattttgcgttatcgccaggctgtttccaacgatcatacaaagcccgcttatcttgattataatgagcatcatccacggaaatattctccaccttctcgtacaatgtagaaaggaatatctgtcctcccacccggtaacggaagttagccgaaatagaaaaacctttataataaaacgaggtcccgataacaccttcaaaatccggatcactattcccgacaacaacctcgtcatcataactatgcgtgaaagtttgagaaccatctttacgaataaagatttcacgacccgtgattgcatcaatacctgccgaacgaactgcccataaatcagaaggactaccaccgtcataatacctcagcatatttttcgatttattatccgcgttaaacttatccagataccgactaacatcccggtactcggaagccaaatgacgtaatgtcgcattcacggaccaaagcacattttcacgttttatcactgcataattcaacataaccgtgtaccccttcgtcaattgttctccaacatttgtaggcgaggaagtcgttcctgtcgacgaaggcatcccgacatatactagcaacgggtctgttttcttcgaaaaataatcgaaattcactcgcaaacgattatccaataaatacaaatcaaaaccgatattacgatccaacgttttttgccattccaaatcctcgtttccaaacgtcttgatcaacgtgctcaccccccacgggtttgtatgatgactattatagtagtaaatcttcatagcgatataggcatcaaaattctgattaccgggattcccgatagaagctctcaatttcaactgatctatccattctacaccttcaaagaatgcttcattatgtacattccatcccaaccccactgaccaagtattagtgaacaacttattgactccgaaaactgaagccccgtctgcacgccaactggcatcgaacaaataacgattccgataagaataacctaaattcacataataactagctgttctacgtttcacttcttggaatacttttttatccttattataatcttgagcaaagattggatttgaaaactcatcatcactaaaactacgcatcgtgtaaccgcttacatctgaagaagactgggtaaaacgcatcccggcaacagcattcaccatgtggcgctctgccaacaatttaccgtaagtaacactcaaatcaccatcatacccgaaaatatatttgttggattccgtgtattctccctttttatccgtctcgacacccacgtacgctgcattaaaaggagaagaaaatttctgggccaactcactcgatttatttaacccgatctttcctcttacctgcaactcttcaaccggccgccagttcatttcgaaattattcgtaaaaccaaaagttttggtatgatcaaaattattattacataaatcataataaggcccatatacattctccgtttttattgaaattgtcgaaagatccaaataagaataagattccagaatttttaccggatctccattctcatccgtcttacggaaataaggatttactcgggcaaatttggaaaaaggtacacttacccttttggctatagtataatcaacattaaacgaattagtaaaagataactgccctttacgatacatcaaccgaacatttccatttactacatcccgatcagatcctttcattaccccctgtgtcttaccgtaactcccacctataccgtaacgaaaactctcatcaccaccttcaagaaatacattatgcttatgagttgttgcaaaccgtaaaggttcattcaaccaataagtatctactcccctccgcacttcggctaaacgattgttatatttaacttcttgctcaacagaccccagatatccgtcgggtcccatactctggtaaatcgccccacaaagtaactcgtattccaatttttcttcggcattcatcaaattataatccgacaaatcggcaaaagtaaaatttaagtttcctgtataattcaacctcaactgcccggcttccggagctttcgtttctacaacaacaacaccattggctgcttttgccccgtaaattgcggtggctgccgcatccttcaatatggtgatacttgccactctatccacactcaaatcactaattgttgccaatgtcgattcaaaaccgtccagaatgaacaatggttgattgggatctgtattatattcttcagtcaaaccaataacactagtcttaccacgaatctcaatattcggcaaatgattcgggtcagaaccaaattcattattttccatgatcgcaaaagcgggatccaaagtcttcaaactttgtaaaatattagaattaccaaccatcttcaactctttcgtcgtgaatgttgttgaagaacccgtgaaactctcttttttacgagtaaatataccagtaacaaccacttcatcaacctgtttcacatcttcccgcagcacaacattaatcgtgtccttcccctgatactttatttcttgagattccatcccgataaacgaatatatcagtaaaaaatcttctttcatccgaggtaatctcaatgcatacattccgtcttgatctgtcacagcacctaatgtagttcctttaacaaccacggttacgcccggaatgggttgtttctgcgtatccgtcactttcccaacaatcttaatttctttcgtcttttgctgcaaagcctctgttcgtttaactagcataaccaaatctttgtcgaaaacggttgtcaaagaagttcctgccaacacgtccgtcaacacgtcacatacctttttattcttcacgctgacatcaaccgaagaaaccgtattcatctgttccgcattatacaaaaaacgtaaccccgtttgcttgtgaatcgcatcaaacaactcgtacaagcttaccttcgtcaactttagcgttacaacctgttcctgccccaagcttctagccgacacagaaaacacgaaaaacatgacaaaaatgcaacacaatctcataattttccagattttttcatgtgctcttattcgaaagagacacaacattctcttttttttcataaatttgtaattaaattttatagttaaacacgataacaacatccggcaagatgagttatcaattactatcattcggagagtctccacaactctccgttttttatttatcgctaacaatcaccgtctttccttttatactaaaacgaacatccgaaatcttttccaacagcgacaacaactcttctatatccgcataccgctgcatatttccataaaatcgcacctctttaagtgattcatgctggaaaaacacatccacatcataccatcgtgccgctttatccatgactgattccaaacgctcgttcacgaaaacgacatcctgattcttccacgcgatatacgggtacacgtccacattcgtaatctccgattctccggtaaaaacattcaccacggccagttgattcggtttcaattgtttttccggagttgcctcgtttgccttaaaaccgatagagccctcaaccaaaacagcctgtatctcatccggcttataagtattcaggttaaactccgtcccgtacacccgcaaactatactctccggaatgtaccacgaaagaacgttgtacatccttatgtaccacgaaatatgcctcgccttttaaccgaacttcccggctatcccccgtaaattgaacaggatactccaattccgaatctgcattcaaccagacattcgttccatccgccagagtcacaaaaaactctccgccccggggaactataattttattgtatagcaaccgtcctgctttcggagttgcctgggccgtatcgtaaacaagccctttcttctctttcacctgcacgaaagacccatcctgttcccggatcacttcttcgtcctgcatcagatcaaccacctctccggaagaaagaatcagtttcgccttcggtgatccgggacgaatcgtttcaatcccattcgccagtttatcttctctggaaggactatttaataaatacaatcctcccaaagtaacgattatcgccaccgaagccgccaccctatagcaaatttggcgaatcttcgcacgacgaatgcgacgcaccataagtttttttccccgtacaagatcaacgctttgctccttctccacccaacgaaaatgctggcaatctctcaaaaacatctcgaatgcttttcgattttccggtttttcttccacccaacgttccaccacacgacgttcctcctcctccaactctccgttgaaataagctaacaaacgggcctccatttctccttcgatatattctttttccataaagtataataaattttcactattaataccggaaaatgaaaaaaaggtctaatggtttctgtaaaaaaatcacatctattttattcccgccgacagaaaaaaagcaaaaaaccggaatacatctctttattcaagcgttctctcaatttcctcaccgaattacccagcaatgtcttcacagtcgaaacagaaatcccataacgctcagctacctcccggtatttcatcccttccacgaaaacacatttcataacatccctactccgttccggtaattgactaatttcctccaacacctttgagacgattatatcatggcgctcgttatactcctcgaaaacaagatccacctgatcaagcgacatcacatgacgaaatacatcctgtttctcgatcttcttcaaacaacgattccgcacggaaacatacaaaaaagaagccaatgtctccggcctcaattttcgataaatcttaccgttccaaatatcaataaaaaactcttgtatcacatcctccgcggaatccatatcatgtaaaaatgtatctgcccacacgaccaaagtactgtaatagacatcaaaaagcatttccattcctttgggatcatcggaatgtaacaccacgcatatttcttgattcctatctaatctagaaccattcactttataccttcctaaattgtactcgattaacacagctttatcacaaaagtaaaaaataaatacttctccccaaaaaagctccagtaaattttctgaaaacgtaatatcactaatcatgaaaaacagaagagaggttagtcttgtcgattaacctctcttcattttattttccgatataaacttaccgtatctcttcgagtattttggttatagcctgaaatacatcttccacggtaccatgaccattcactgaaaaatgtttcttctgaaccttgtaatgatcggccacgggcaatgtctttgccttatactcgcggaaacgattttcaatcacttcctcgttgtcatcggcacgtccctcgattttagcacgttctagcatccggcgcattaactcgtcatgaggtacgtcgatactcaccaatgcacttaacgggtgtcccgtcttagccagcatctcatcaagaatttcagcttgtctcaccgttctaggaaacccgtcaaacaggaaaccatccacgttcttgtgatgttcgatgctgttttcgattaacgcaaccacaaactcgtcagataataactcgcctttattaataatcccggcagccattttaccaaaatccgaaccttcggcaatctctttacgaatcatctctcctgttgacagatgcgctagattgtatttttcaactatctttttcgcctgagtaccttttccggctcctggagggccaaacaatgcaatattcagcatgacaataactttattttattccttttgatgtattaattgtttcatttttatgaactcagccacaaaggtatactttaatccaaactttaaaatagaaaagtcagaatattttctaattttatgttcggaataatcttatttttacattattgtgaattccagtaatttaaaaactccatgctaaagttattcatgttaatttgcctcctccataattactctttcaccttttcaagcacgtccagatccgtgtaataggtacgatgttgtgattttttacccgttacgttcattttggccaaaacatacttgatatttccctggttatcaacctcataatcttctacaaatccgtatttacattcctcgtccatgtatcttcgaccactctcgtccgggatagcccgccggaaagtgggagttgtaattttcaccttctcgttcacctcaaactgcttgttctcatcaatatactgatttttcagttgcttttcctgctctcgatatttggctataatttcttctagctcttttatagaagctacatactcttcttttgtcatggttctattcatttatcgaaataatttacttactctttttacattatgaatgtaattatcaccttgcagttacaaatatataaaataaattaaatataccattcaatttgttctaaattcgacaatattggatacaaacaaacaaaagtaattataagaccttatctctattcttgaaaattacattgcaatttcgtacattcgcagacatttccggaatcaataacatgaacaagaaaaagaccacaacacgaaaaaaagccacgaagaaaaaacaaagtatctttgtccgtgttttcaagacaatactattgagtgccttactgggcgccattctcgttggactcttcgtgtgttgcgtgtactacgggatgtgggggaaaattccggattaccggaacttgagagaaattcgtaacaacgaagcttcttctctgtatagtgaagacggggagttactcggaaaatattacgtggaaaaccgtacgaacgtcatgttcggcagtatatcccgcaatgccgtaaacgccttgatcgccactgaagacgtgcgtttttacgagcatcacgggttcgataaagtcagtatgctgagggtattgttcaagacattactattaggcgataagagttcgggtgggggaagtacgatcagccagcaattggccaaaaatctctatcctcgccagtatagcagtcgtttcatgattccggtaatcaagatcaaagagatcatcacagcacatcgtcttgaaaaattatacacgaaagacgaaattctcaccctatatttaaacactgtatcttttggtgaaggcacgttcggtattgaaagtgccgcccaaaagtatttttccacgacggcaacacgcctctccgttccggaggctgccactctgatcggacttttgaagggaccttcttactacaatccccgggtgcatcccgatcgcacgttacaacgacgtaacacggtgatcacccaaatggttaagtacgattatctgaccgaagaagaaggggaaacattaaaacaagaaaaactgcaactccgcttcaaacctttaaatcattattccggcttagccccctacttacgtgaacaaatccgccaagatgctgtcaagctcattgccgaattcaacgaagcaaacagtaccaattacgatttatacaaagacgggctaaaactcgtcaccacgatcgacgcggagatgcaacgttacgcggaaaaagctatgcgacagcacatgaaatcattgcaacacgctttctacacacacctgggaaaacaagaaccatgggacaaagagaagaatctccttgataatgctatccgggaaagcgagacatataaaaatttgaaacgccaaggacttagcgagaaagccattctcgtcgccatgaacgaaaaaaagcccatgactatttacagtgcataccagggagaagccgaaatgcaaatgtcctctattgattcgctcaaacactacttgaagatacttcaacccggcatgatagccgtagagccacaatccggaaaaataaaagtatggatcgggggacttgatttcaagtatttccaatatgaccaagtgctggcaccccgccaagtcggttccgtgttcaagccggtcgtttacagcgcagccattgaacatggagcccgtgttgatgcctattacaataatgaacaaaaaagttacccggaatacgacaactggacgccccgaaattcaaacaaccagtacggtggttactacacgctgaaaggggctctaagtcaatccatcaacactatcgccgtccaagttctcctgcagacaggaatcgacgccacgatagaacatgcctgccgcttgggaatacaaagtgaactacccgcggttccctccatcgcactgggagctgccaacattcctctccgggaaatgattctcccctacttgtgctatgcaaacaatggagtgtcgacaacgccctattacctgctttccataaaagaccgggacggacgtatcctttacgaggccgaacctccacgcagagaacgggtgatcccggcagagcaagctcatatcatgtcctccatgctttccgccgttattcaagaaggaacaggaaaaagactaatcaacaactatgggctgaacatacccctagccgggaaaaccgggactacccagaatcaagccgacggctggtttatcggctacaaccctcgtatagtcgtgggtgtaagagtcggagccaacaattcccgtgtacatttcaactctaccgcactaggccaaggagccaacatggctcttcctatcttcggcttgttcatgcaggaatgcctgcaaagtaacacttacgcctattggtccggtctgtccttcccggttccacccgtggatgtacaaaaggatctggaagtacctactttcaaggaaaacataaacttgttagaaagattgaccaaccaaaaactggaaaaagtaaagaaacaagatacaggaaaagataccgattctcccaagaaaaaaggtttcttccggaaaatcggggatctattcaagaagaaagataaaaaataattcaccatgaaaacaataaacaagacatccctgctccttgcccttatcatactggccattgctttcagcatcatatcaatgattgctgccccggctgaaatacgttacacgtggcatgggctgaacccatggaataccgtccaagctgttcccctcatgttcaaacgcttccttaaaatggacgattggattatctattccctatccgtgttaatcatcgcttacctctggtggagaatctatgcactcgtgaacaaattcagaagatcataaaccctttattctttcaccccgtacacactctgggatatacgtttcacagctaccacgaagaaacctgttaaaacgagattaaggaccaaacttaaaatggagataatcaatgcggaacctcctaactggtaccccatagcaatcacgataattcctgcaccgacttcccctctcgtgaacataccgatcgaaagtgccagacgctcttgaatcttccggtcacgataaaagaatagcgggaacatcttcccaagattcgaaagaatcgttaccacaattacatggaagatcagcatcccccatccgggcatcccgtctcccccggtctccaaaccgataaaaataggcgtactcaacccgactaaaaacataaacaggtacgagataaaactagaagctctttcttcctcctgcgagtgattatgcacggttttcatcaccattcccagcacgaatgccggtaacagcacctcaatatgaattgccccatcctgtcccatcaaagccttcgaaatcagatacacactctcgaatgccgccacgatacacacggaatagagcagaatagacttccaagattgtggcaagttcagcgaactcaaccgtttccacccaaaaatcagaagaatacaaaccaccccaataatgacaaacagttgccatttgaaaccgatcatcaatatttgtaacggaatcatcaataaaatcgtatccaagtcatcaaatatagccagtacttgcgttttcttgtagatccactcctttttcagcccggcagcagcaagcatcgtgaaaagaatacctgcggatgtaggagcggcaaaccgactgatcagcaaattattctcccacgataatcccgtatccaagaaaaagatataataaccagctatcagaagccaaggtactgcagctgtcgccattgcaataaaataatctgtcgtgtacgaacgccattttgccttatccaactcgaattctctccccacgttaatcataataaaagcaagacaaataaacatcaaccatttacttatcgatgccagagttccatatgcgctccctaacgccgagggaagtatttgagaaaaaaacaagccgcaaagtaagaaaatagaaaacaaaaaaactttcttcatccccattaaaattaatttgccacaaagatagggattttcaggtaatttattatcgctatttaaaatgaatctagttaaaaaatgtatatcaaaagctttgatctactcgtatttaatcgcatcgggtttataaacacggtaatcataaaatccacttttccgacgactggacacgttcacctctatactatgaatatcaggtggtcctttggggtaaaaagcaaaacgtatacttacattcttgagaatcaggttatcatttcgcaaattcaaactaaaaccaatcccccagtacgattgactattcaacaaattcttctcatcccgagccaacactccccaatctacgaacccggtaaccgatgcccgaaatcctcttttaatgtaaggcaggaacaacgttgcggacattgaagcggagagtcgttgtgtcccacgagtggtatcggaatcaaatcctcgaatgttagcatcctcgaaataaatataatcatccggattcctcttgattcccaacacgtaatccacgttactataaaaacgtaaccgatgccgggacagatcgtataaacgactaatatactgacttccaactttaaacacgccactctctgccgtgtaaccattcaaaaaagtccccaaggctgcataccaagaataatacctttccgtgtacttgttgaaccaagaataatgccattccgttcccaagtacccgtactccgtgaaatcactcttctcgtacccgaaaagcaacgttcctgacaatccggatggtatatcctctgttcgcccgaaatcatagattaagttcgccttgaaatacttgatcttggtaaatgtcaaggctcccatgatccggtctcggtcgtaatagaaatgattggaatcacttgacacttccggacgatcgacaaaactagtacccgtgtaacgccccgtcagataaaacattcggttataactatacttttccggcaaataaaaagaggttccaccccaaaagtcccacaaccggtaattaaataactccacgggcttatttatatcccgatcaactaatgttttcgaggaatacacccgactgtacgcagctcctccagcccatttcgtcttgtacgtcaaaaactctttatccagttccacccgcaaaatatcctgattataggaattctcgtacatcccatagaaatccatgtgagacccaagaaggttactagccttatactcgattaagtttccccattttttatctttacttcctcgaaagctggcttcgtaatgcaaactatgccccagtttaaacaagttttttgtttccagtcctaagtcgaccgcattcaagaagttactccacacctcccccgtccatgaaaattcatccttacaaataaccaccaaatcgacttgattcgtgtcgctctgtacttcctgtattccgatcaacgcatcatccacgttcgacatcgacttcaacaactgctcattctgtactaactcgaaagggtcgacggtcatccccggtctcactgtcaactgtttctttatcacccgttcagccgatttctgatgaacagagtttgccacacttaaaagccattgcaaactgtcctgcaaaggagtcgtgtcgttaacgctcgttccaaaaggaggtaaaactttcacgtaaatatcacgaatagtctttccccggtaaggtttgtaacgatcctcgctattctccgtttggacaatatcaatattaatcttccgaggattcacgaagatcatcttgtacagctctttcgtccacttccgacgataagcgacctccttaatcttggaaaactcgtactggagagtatcccggattaaactatccggcaagaagaccacgttattttgtttcagtgtatcaggtagctttataaattcatactcgttattctcacgcacgccgaatgataaaggccttgcatttgcttgactttccacgagtaacacccatgccagcatccatatcatacaacgaataatcacacgcttcttttccaataaaattactcctctaacactaacgttttcaatcgatcagacatccaaacctcacgttctccctgtttattttgataaataaaacaagcctcaaggtgaggattatccttcacgattcttttggcttcttctgttcccaacaccataaacgctgttgcgtaagcatctgcctccatacaagtcggagcatatacagaagctcctagtatatcttgttggacaggataaccagtcctagggtttattgtatgagaatatttttttccatccaccacataaaaacgacgataattcccggatgtagccaacgctccttcccgcaatgccagtacaagctgcaactcccggtttgccgccgccgcatcgtcaatcggcttgtctacaccgatatgccacggacgctgtttattactctcccccttcacccgaatttcgccaccaatctcaatcatgtaattttgtactccttcccgatcaaaaaactcggccacgagatccacccccaatcctttggcgatagaactagcatctatctgtactccctcaactagtttcactaaccgcactccttctagttgcaccttatccattccgacgtattgcaacagagaatcaatcttcccgtccgaaggcaatttctcgtttttaaaaccgaatccccaagcgttcaccagtggagcaactgttatatcaaatccacctcccgttgcctcatacacctctcttgccttctcgtacatggttacaaaaagtgaatccacccgctcactctcaccccggttccatcgggcaattaccgactccttgttgaacatcgacaaggactgattcacccgttccatctcctgccggatctccacggtatagtccacttcactctggtatgacacatgataaacagtaccatacacactaccttccgtgaaacggtatatattacgctcacatcccatcatcaacaccaacccgcaaataataatccccaactttttcatacacttttctaaaaataatatcccaagttaaaataaaagcctagtttctttgaccaatccgaaagactgaacatgaaatcaatcggccccacaatactatcataagaatatcctactcctcccccaaaaatatcatcgcctccgaatacatcaaagaagttagattcctgttttgcataattcccagctagagaaatataatgattacgaccgatattgtatctcaccttaacttttgccaccaccaccgaattgtcaaatatctccaaatgctgaatgcccaagaaaggcaactgttgatcgacatatctcccggctacatctcctcccatgcaattcaaataaggatagggaatgttatgtcccaccaacactcgcccgtagatagacggaataaatttcacccgtcgagtgatagacaacacggactcgaaatctaacccgatagccgagaacggagccccgtcgttataggtaatgaggttatccgtgtacaaagagtaatccactttcaatgacattccccgtgtcgggtaataacgtttatcaaaagtttccaagtgagccagtccgtaataactaaagaatccttccggttttaccgaaatattgtgatctttgtcagagaaaaggaacgactcgtaattgtaatactcgtaacgcacgcccaactgcaatttgaagttacggaaataaatatcagaacctcccaaggttacccgatgaaccccgtaatccacgttatccgttttctttcccttggtataaatatctaggttattatatttaaacatatactccaattcaaaacgccgcaggaaagtatttcccagtgaatagttcaatttcacgtaaggattcatactcaaacgtccggtcagggaaagccgtgaacctctcaactctttgtgcgtaagtgtcgtgttcaataaaatagcagccatttcctccgagtcaaaccgaaatcccaagttcaaagaactcatcgatttttgtttcaatatcaattccaaatcatacaccggaccaccgctaagtttataactcacactcgaaaacgccccgatcccgtacaattcagcaatcgcctcgtgcagatcgctcaacgtaatccgactataatcttttatccgtatctttttccgtaaccatttttcatcccgttcatcaattcctgacaaatggacgtgttctaccatgatcgtgtcattctcgataattatatcttcagatacttttttcggttggtaactttctgcaagtcccagctccttcttcaactgcattaattcatcccattgactccgggccacgtcctctccccgcatgatcagcgtgtcgatagcacttgccgagaaactagcagccgaataaggagtaacatccggcttaatatagatgtttaccatctttttattttcctcgtacttctgaattccgagaaaagaggtcatttggtcaagaattccagtcacggattccaacccggaagcatctttcagttccgcctgcacgtctaccccgataattatatcggctcccatcgctttagctatatccaccgggaaattattcgagattcccccgtccaccaataccataccatctttccgcacgggagcaaaagcccccggaatcgccatactcgcacgcatggccaaaggcaacacgccgcagtcctgtatcacctcctgaccatccaccaaattactcgccacgcaggcgaaagggattggcaatttcttaaaatccaacgaatcatggtaaccaatcgttaggtccgaaaatagattgtaaatattctgcccactgataaatcccgatggaatcttgatttcccgattattctttatcggtacggaaaccaaatacttttccgtttcctccttctccgaaaaagggagattataacgatacactttatcactcaacagaaacgtccagtcctgtcttctcaccaaactatccatcgtatgcgcatcgtacccgatcgcgtacaacgctccaacgagagatcccatacttgtccctgcaatataatctatcggaatcccggcttcctccaacaccttcaacactccgatatgcgccacaccttttgcacctccaccactcagcaccaacccgaccttttttcgttgtccttgaacatctaacatgacaaataaaacaagaagaaacaccaaaattcgtttcatacatttcagaatttaaatttaagaggttagaatcaaaaaagataccattcttctcgctctaaactccccaaaaatacaaatttatcggaacattagcaactcgcctcccctagttcgtacaacatttgacatttctttttccaaattatttagctaaatttgcggtgagacaaaaagaatgtagtatgacgaaaatattagtgattgatgatgagagaagtatccgcaattcgatgaaggatattctacaatacgagggacacgaagtcgtgctggctgaaaacggaatggaaggactcgtttccgtgaaatctgaaaaacccgacattgttttctgtgatataaaaatgcccaaaatggaaggtatcgaagtactggaacgtatcaaggaattctccgcggataccccggtaatcatgatttccggtcacggaacaatcgacacggccatcgaagccatccggaaaggagcatacgattttatcgaaaaaccgttggatctgaatcgtatactgatcacgataaagaacgcaacagataagcatttattaattcacgagacaaagaccctaaaaaacaaggtcagcaagaaatacgatatgatcgggaattccgaggctttaaaccatatacgagccatgattgacaaggtagcagtctccgatgcccgaatcctaatcaccggacctaacggttctggaaaagaacttgtcgcccatcagttgcacgaattaagtcaccggaaagacaatgctttcgtcgaggtaaattgtgctgccatcccatcggaactgatcgagagcgagttattcggacacgagaaaggttctttcacctcggccatcaagcaaaagaaaggtaagttcgaactcgccaacgggggaacgctcttcctagacgagatcggtgatatgagtctcaatgcccaagcaaaagtactaagagctttacaggaacaaaagataactcgtgtcggcggggatactgatataaatatagacgtgcgggtcattgccgccacgaacaagaatttaaaagaagagatcaagaaggggaatttcagagaagacctctatcaccggttaagcgtgattattattgatgtaccccctttgtgccaacgtttggaagatattgatgatttggccaatcacttcttgacggaagtatgcacggaaatgggcattgcccctaaaacgctgtctcccgatgctattgccgcattgaaggaatgcgaatggacaggtaatatccgcgaactacgcaacgtcgtggaacgattagtcattctttgtggtaacaccatcacccgggaagacgtgaaaatgtatcgataataggaaagttaaaaattaaaagataaaaactaaaaagttgaaaatccaaaagcgtcagcttgtgcggctggaatctaaaatctaaaatttaaaattagctcgcttt

SEQ ID NO: 10932 - DNA, 9173 bp, Unknown
  gut microbiota DNA sequence
ataaattacatattatattattgggacggagaaacagcgggaaaagctcgttaatcaacgccttaacaggtcaaaatattgctatcgtttcggatgtggccggaacgactaccgatctagtaaaaaaaagttatgaaatcccggactttgcttccgttatttttatcgacacagcaggtatcgatgacacgggagctttgggtgaaatgcgggtggaaaaaactagaaatgccatatcacaagcggatatggctctacttgtggtcacgaataaccatttcggggaacacgagcagcaacttgccgaacaattaaaaaaattggaaatcccatttctggtgatccataacaaacgggacgaatccgccttgactcccgctttaaaggagaaactgacgacgacctataactgtccggtaatcgactattccacccgaaaagacaacacggatttaattctgaataccttaaaaagtgtatggaaaaaggacaataccccgaaatctttaatcggtgatttgctttctcccggggacattgtgttactgatcaccccgatcgattccgaagcccccgccggacgattgattctaccgcaagtacaaatgattcgggatatactcgacaatcattgcacctctatcgtattgcaaccggaagagattaccccttttctagaaaaaacgggtattcgccctcgtctggcaatagccgatagccaggtattcaagaaagtgactgccatcatccccccagagatccctctcacgagttttagtatcgttcttgcccgccacaaaggaaactttaaggcttatctcgccgggactccccggatagaggaactaaaagaaggtgatcgtatccttatgctagaatcctgctcccatcatgtttcctgtgaggacataggacgccacaaaattccccgttggttacaagaatataccgggaagaacttccagtttgactttatcgttggcttggatgccatcattcgtcccatcaccgactatgctatggtcattcaatgcggaggctgtatgattactggaaagcaattaaaaaacagactccagcctgccattgatgcagggatacctgtcagtaactatggaatgacgattgcttacctgcatggaatattcggaagggcaatgaaagtatttcaagattgatgattttagattgaactcccgaaagagaaaaggagttcaatccaaaatttccatatttctaaacagttattccaaaccctacggcaaaaggtctcaactccggagcccgattcttgttaaacatatttgtcaatgaataatttccccaaatacacactcctcggtaaccaatgcgtaacgtgtaatctaccttaaaaggtaccatcccgtaacttccgttttccttcaatttccgtttatttcccttctcactcgtgtaaacgacctttgttttcgagtgcaagcggattcccccgataaacccagtggagacataaaaccttttccaatgtggagccgggaattgcttttccagcatcaggggtatcgttaaatagagcgtcttgaatgtacttcgtttcacatccgtaatgtcccactcggacaacggcacagcatgtagcatctcacctttctcccgacgaatagtaatatctccatccagacacatacgggagtagtccaggccaaatcccgtgaatataccgaaacactgccggggactcaaaccaaagctaaatttggcaaagttaaaatgcatcgtaaacgaacttgcccaatctaattccataaagtcatcaccaccatatttggaatagtttgttttcccaaagttcacaaacccaaaatagaacccgttccagtgtcctcgaaatttgttcggacggctaggcttttgggataataccctgacatcccaaggaagcttgactggatcgttaatccttttctcgctgctttctcgcaccgtattatcccaaattatcatttccgtttccttactaatggtgtcggagacctgtccttttgcacgaatcgtatctttccgccagccgtcattgacaatcacgctgtctcgttgcgccgaaaccgatagtccacacaccatgaacatgataaaagctgctattattctcatgatcttatctttaattaatttctttcttacatgacgtttaacccccttgattagttacaggtttcccatgtcttttctctctttactccgaagacgttccaacacattccttcccgcatcaatcaaattattcacgatattatccgacttacctgatcggtcaatcaattgaaacacgggttcccgttgctctttcacctgcacctgaaattgaagcccctcatacggggaggttagtatctcacttggctgtggagccataatctccacggaaattttcagttgttttttcaactcaatgacatccggaggaatcactcgttccacaacctcaaccggtgcttctctctgttccgtcggctgtatcatcatcctttccggttcctcaattattcccacttctccggctttctccggttctaatacctgcggcaacgggagagtttctgtcttcaccaccgtcataggtatatcttccatagagaattcttctttcctcgtggtataaatagcaaccacaatacccaaagccacaaccgcggcaatggccgcataacgtttaacaagaagtatcactccggacttacgatataacccggcttttccttcgaaccgacatgctggatcaggtttcactttgatcttagcatacacatcaacttcccgttcaaacacttttttatcagtattctcgtccacccacgcccgttcttcatccgtgataaccccttcggtgacagcgatggcataatactccatttccctttctctcaccgcttgttttatctcctcttttttaccgaaaacttccgtgggaacttccaacctcacctctcccatcccgtcaagttgttcttgcaaatcggggtgaactagcaaaaacgcctccacctctgcccgttccctctccgacaaattcccgtccatgtaatcaataaaataaatctcgtaattctctctcgttatcatatctcctcccgcttaaacaaccacatccggcctgcggatgtatgctttcataaatgctctcgctcgaaagatgtacactttcacctgcgattcgttcaaccccgtgatcccggcaatttcctcgtaggaatacgcctcgtagtcccgcagaagaatcaccgttttctgcaccgggggcaatttttccaaggccatatccaatatttcctgtaatcccgtgtatccctcctgcacatctcccgcccggtcagccacgttctcgatgtccccgaacttcgtttcccgccgcaatacatcaatcatcctgtgatatgccgtgctaaaaagaaaagacttcgccttgtcgtaggcaatatattccacttcctcccagagtttcatgaaactatcctgcacgacatcctccgccatctctttcgacttgcacattttaaggataaaacgatacacaccatcagagaaatggtccacggtccggttatactcggttctagtcattctgtttccccttggtccatagctcaattcgtttcacatcccgccaacgcacgtaaacaacttctcccccggtccggaagatcagtatcccatcattcgttgccatcacgtcatacattccccccaacaccagttcggttcctcccgacaacttgacccacgtgtatttatagtttttaggttctatttcccgcacatacttgaaaggtattcggtaagatatattcccgttctgcccgtccagtaattcaaaatccatagcctcgtcgagatcatacaccagtacaccctccaacgaacgtccatcccgtgtctcaactctcccgaacaaacgctccggagccctaaaatcatcgtaaacgggaagtttcaactgatcgagaggaatcgcacgaaacaatttaaaatcatgccaccccacgatcacctgcccaatcgacggcatattgatggctatcccccgattcgtggcattcacgtcgttctccccccacatgcaaagttccctgccactatgaagagttaccaaggaagagtttcccaacgacttgatactcccgatatttttaaatgccacggaaacccagctagattctgtccgcccgtcaagtaacgattcctgtgaattctcgtccaaatcccattgaataagccccttgtacatcccgtaaggcgtttccacgatacctgcgattggatggtctttcggctcgttaatcgaatcaggagcggcagaaaaaacgatctcgctaatatgctcccagaccacgttttcaatcttcccattccgaggttccacggcgatccaattaccgatagcaagcgaccgtcctcgttcaagctcgatgacatttccccctttcacgcccaactcgatccgtttatcaccgattactctaatcgatcgaatattcccgaaacggcaagaaaactcatgctccggtggagtatccctccgaccatcactaaaacgcacgttttctcccataatatcccgataccgcatatacgggtttccgatttttcccgcggaaaaaatgtccgtccagtaaagattctttccccacgtgatgtatccgcatattttacgattcatcacggtagtcacttccccgtaaatccgtattgcccgactcccctgtgccaacccgttagtagcacaaaagcaacaaattaagcatccaattatccatgtttttaacataccactacttttgtttattgatgggacgaatgaactaggcgaaaagttacaaaactaattaagaatagaaaacaatttaaactaaaatccggctcaacaaaagagatttctccatgtcaaaccggatttccaataaatttattacgaaatgatattcttgactcattcagcatccaaccgcttgaaacctttcccgagaatttgtttagcgtcgaatatcgtcacaaaagcattcgggtcaatcttgtatatggcctgttgtaaagttaccatctgccgacgattaaccatcgtcatgatcatctccttttctgcacggttgtacataccttgtatcggcacgatggaaccaccgcggtgcaagtcattcaatacatactcccgaatttcctctgctttgtcggagataataaagaaacttttctctgcattgaacccttgaaggattatatcaatcgttttacccatgaggaaaatcgaaagccacgaatacatcggcaccttccagtcttggaacataagaaaaccgaaaaccacgatacacgaatcaatcattatctgcaactgtcccagcggacgatgagtccacttgtaaagtatgttcgataacacatcggttcccccgcttgacgcacgtgttttcatgatcatccccacgccaacacccatgacgacaccaccaaaaatacacgccaacaacacctcatcacctaacttgaaaggatcgagtgccatcatcggatccgtgggtatcggctcacccatcaatgttaacaagagcgtaggcaaactatcagagaaaacagcgacaaggatgaaacaaataaacgttttcaccccaaaaccggaacccagtacccgcaggcccaacaaactcaatggcaggttgaaacacaaggcggctataccgatcgggaacccccacttgtgttgaaggacgatcgtgataccatagattccccccgggacaattttataaggtgccataaaacaactataccccagtgctagcacaaaagcacccccgatgagtaaggcatatgtccggaaccactcacgggtaaacggtttctcttttaaaagtatattcaccatttcatctaatttaaattcggccgcgaatatacacctcccctacctcacgaaatatgacaaaagtcatctttccgagggaaaatatcttaatctgttttttaacacttctgtattacccgtggcattgattttgctcgtacgagaatattaattataattgcacactttttccaatttgtgaaattaaaatgagaacaaccttactgattacgaaagaaaaaattatcagcgtggcacaaaaattgttcatagaaacaagtttttatcgaacaacgatgaaggatattgcccgtgccgctaaagtcagtcggcgcacgctatacactcattttaacagtaaggaagacatttttaaccacatcgtggatcaaaaaatagaattaatcgaacaaaaacttgaacaggcagtcagaacggccttgccagccgacaaacggttgaagttatacatcaaggaacgattcaatttaatagcggaactcatgggcggtagccaacctatcaaagaaacttttttacacaataacagcaagattgaaatactacgggagaatattgacagacaagagctcgaacttctctattcaatccttcggaacggggccgatgcgggaatcttctcgatcaagcaaccccggcgtttggctaattccctgcaatccgtcttcaaaagcctggaattcggtttcatacgccagtacgaacatcaaccacgaccacaagtgattaacgagtatattaacatattatttcacggtataattaagaaataaactaacacgcactacgatatggaattatatatcaacgcctttgcccattatctcccggacaaccgagtacctaactcttacttcaaagacgtgaatggtctggatgacgagtggattcgcactcgtactggaataagcacccggagtaaggctggcgagaacgagaacacgaataccatggccttggaagccgttaagcgcttgcacgaaaaactacccttccccatagaggaagtcgacttgatcgtggctgctacttactccccccacgacacggtagcaacagcagcgcacatgatacaacgtcattttaaggcacgagccgcacgctgtctcactgtttcggcagcctgttcctcgtttatcaacgccatggaaattgtagaaggatatttcgccatgaacaaggcaacaaaagccatcgtcgtggcctctgagcataacacggaatacagtaacgagacttgcccgcaaagtggtcacctgtggggtgacgggtctgtggcaatcgccatttccaccataccggaaggagaaaaagcagcccgtatacttaatatatttacccgcggactcggacacatcggcaaagcagacaccgccgtttacctacgcccacatcacgggggtatcggtatgccggaagggcgtgacgtatttatcaatgcctgccattacatgatcgagggattaaatgctgtaactaatagccaaggcataaaactgacagacttgaaattcatcgcctctcaccaagccaacaagcgaatcatggctaccgttgcacgtcagatcgatttccccgaagatcacatgttatcgaacatcgaggaagtaggtaacacgggatgccctagttgtgctatcgccttatcgcaaaaccttgaccgagtcgaccatggtgacctcgtggcactctccgtgttcgggggtgggtactcttgcggggcagtactcttgcaatttttataagcaaatacagaatcaaaaaaatgaatcccaatgaacactcatttggattcattttttagtctatacgcaataaaaaagatatacctttgcacgaaagaaattaccatgaatgaccagactgtaatatgtgccattgccacggcccccggaatgggtgctatcgccgtgattcgcctatcagggaaaggatgtattgaaatttgtgaccggatatttgtttcaccttcctataaaaaactggtggatgttcttccgaatacaattcatttcggaaagatcgtcaacaaggaggaactgattgatgaagtactaatctccgtgttccacgccccccactccttcaccggagaagactccatcgaaatttcctgccatggttcagtatacattcagcaacgcatattacaactattaatctcctccggagcacggcttgccgcccccggagaatttactcaacgggctttcttgaatggtaaaatggacctttcacaagcagaagccgttgcagatctaatcgcctcatcctcggcagccgcccacaaaatggcattaagccaaatgcggggtggattctcggacgaactgatgaaactgcgaatggaactgttgcacatcacctccctgttggaactggaactggatttctcggaggaagacgtggagttcgccgaccgatcggaacttcggagtattgccatcggtattgacacgttaatttctcgcttatgtgcctccttctcccttggcaacgtgatcaaaaacggcatcccggtagccattgtcggtaatactaacgtgggaaaaagtaccctactcaacgctttgctaaaagaagatcgtgccatcgtgtccgacatcgagggtaccactcgcgacgtgatagaggataccatcaacctccagggaatcaccttccgttttatcgatacggcaggcatccgccacacagacgaccgagtagaaaacatgggtatcgaacgtactttttccaaaattgaacaagcccgtatcgtattgtttttaatagatgccaccaaaaacacggaacaattccttccctattatacccaagtgaaagaacatctcggaccggatacccgcttagtcattttactcaacaagacagaccaaacagattctgccgacatgatcttgtcacaaatcacgtctctatcttccggggaaaagattctcccgattgctgcaaagactggatataacatccatcacttggtggacgagctagtttccacgatcaacctaaacgcacttcattcaggagatgtcatcgtcagcaatgcccgccattacgaagccctctcccatgcccgcctagccatcgagcgagtcattaccggcctggactcccatcttagtggtgagtttgtatcacaagacattcgggaatgcctgcattatctcggtgaaatcacgggacaaatcacgacggatgaggtattgggaaatatatttaagaatttttgcataggcaagtaacggcttgtaaacagccataaccaact

SEQ ID NO: 10933 - DNA, 1390 bp, Unknown
  gut microbiota DNA sequence
ctagaaccatcaggtaattgcaacgagtactctccccctttggggatacacaaagtattataagacatcaaactcgaatcctccacaacaaaagatccatcatatcttaattcgccatttttatcatcattaacgaacttcatcccagaaatttccatctcatgcacattcatgtccgaatccaaaatcacgctcttaccgttcgccaatatcaattctgctttccgagtccccgacgaaatagaatcaacctcagcagttacagaatgatcatttttattcccttgattcatccacaacacggcacaacatattaccacagccaacaccgccgcatatttgaacacccaagttaccaacttccgagtatttcgttgcttagttctggatacaacattcgaccaggcctgtctcatatcatacgtttgtttttttcccggtttacaagctctcctaaccagaaacaacgttttcattaactctttcacctgcttgtcggaataatcaggttcttctgcttcctgtcgtctttccttatcccataataaagaaatcttctcccatatatcctctgaaaatcgaaacttcatctccgtattactttaaattttctctaaaggcaaccggaaatcaaaaaagggtgagtcaaaaacagtttttttacaaaatttattctatcgcatttcgatgactctcttgagaatagactttataggccacaaaaagtaaaaaagaagaagatgtagtaacccctacgtattcacgaatagtacgataagccttcaatacatgtgatttgacggtattaacagatatatgaagctcctctgcaatctccctatacttctttccatccaaactactcatcataaacaccgtacgacattgtaatggtaaaatttggagagcctgacgaattttttccaattgaacagcctcttcctcggagtattcttcttgggataaatcttctaaaaactcaaccaacaaacaaccatgactacgttccactgcccgatgctttaaaatattcaaagctctatgttttacagaagtaaataaataagacttcacagaagtatccacaacaattacctcccggttattccatacatagacgaatacatcctgcacagcatcctctacttcacttacatcatccagataagtcaatgcataattgcacaatacctgataatacttctggaataaatcaccaaaagcatctcggtctccttgtacaactgccgtaaatatccttttatctacttctatttcacacatgttatctgccattgcacaaatataaaacaaaacaattgaaaattgaaagttgaaaatgagagaaattttcccccgggaaactacaagttacaggtttgcagcttac

SEQ ID NO: 10934 - DNA, 2023 bp, Unknown
  gut microbiota DNA sequence
actagtcccaattctttcaaatacacctcaatctctttgtccagttcagcacgtttggcttcaagttctttaatttctgccattacagccttgatgtcgataggttcttcttcctcgaaggtatcaacatacctgggaatattcaggttgtagtcattatcagcaacttcttttaaggtagcaagatggctgtatttttctatttctttacggtcacggtaggtttcaacaatcttctgtatgtgctgtggacgaagcttgttttgagtctttactttttcaaactccttgcttgcgtcaatgaacaggatattgtcatcttccttgcggcattttttgaagacaagaatacaggtcggaatacttgtaccatagaaaatgttggctggtaatccgataatagcatctatatagtttttcttttctatgaggaaacgacgtataataccttctgcgtttccacggaacaacacgccgtgaggagctacgcaagccattgtaccgccctcattcaagtgataaatcatgtgcaggataaaggcgtaatcggcggttttcttcggtgcgagtcgtccggctttgctgaaacgatcatcattattaaacttgtcagctgcactccattcggcagagaacggcggatttgcgactactgcatcgaactgggtatctccaaaagcgtcccattcgagtgtatcaccgttttctattttgaagttgctgaacttgattccgtgaagaagcatattcattcgggcaaggttataggtagtcggattcttttcctgtccgtaaatatatactgcctttcctatacttgcagcacgtaacaacaacgaaccgctgccacaagtaggatcatacacattgcgcagacgctggtggccgatagaaacaatctccgccaatatacgactgacttcctgaggcgtatagaactctcctgctttcttcccagctccggcagcaaattgggaaatcatgtattcgtaggcatcaccgagaatatcaatttcctgtgaggcttccacaccaaaatctatatcatccaaagcaagaagcacattgctgaccaatgtattcttgtcgtcagcggtcttacccaacttaggagaagccaaatctatatcagagaacagtcctccgaaatcctcttcgctatcctgcccaagtgtactgtcctctatgcgtttcaaagaacgttccagcattggcaggatattttcttttcgtttgattgtgtctatcacagatgaaaacagatatttgggctctataaaataaccgatattttccaggcactggtttttgacctcttcctgtaactccattgcatcggcatcggtcatatcccacaattctttaaaagtgacttcgtcatcttcaagtgcactgttggcgtatttctctattttttccgacaggtatttataaaagataaaccccaaggtaaaatacataaagtcgcttgccgacatattgccacgcaaacggtttgcgacctcccaaagctggtcacggagtttctgttgtaattcttcgctcatatttgcttatctttttcttattcttaacgtttcgtcaatataaatatcgttcatctgtttgtcagagatgcttgtatgagaataaactttgccctttgcatcattaattctgataacagtattccaataggaatagtcagcgatgggatagcctgggtctaaacaaaatattttcgtcaattcatcattgcagaattcatatccaacagccaagatagcatgtgcaccacctcccttaaacacttctgcaatcattattggacagctatcatcaatagcctctttaatctgttgtactgcatttgactgatcgaaatctgtactgttataattggaagaaacagcagaaacttctttcgagaaagaatgtttcaatttttcgacaattgtggaaaaataaaaaccgtttctacataggccttctttctcaaaaaattccttgaacagtcgccctttagatgtctgtccattaaatt

SEQ ID NO: 10935 - DNA, 807 bp, Unknown
  gut microbiota DNA sequence
tccgccaactgctccataaagtagaacatcagcttggctttttcgtttaccaaatagcggtggtcatccgccaatgccttgcccacctttcggggtgaagccatttttccgtttacatagtttgagaactcgtccgcaaagcgtttgtcgttctctgataattgattgttgtactccatttctaatgaattttgatgttgaacattttttcttttccctctggtcggttctttcccgtctgaaccgccttggaattttatggatgcggtaaacggctgtcggtactgcttcatgcgacggctttcccggccaattactctttcacggaaaggaagaatttgcagggaatgcacttcaagccggagaatcaagcgcgacagcagacctttgcatctgataaaaccaagagcggtgtggacggaagatgagccacggcagttatacctataaaaggaagatggcttgggcaaaatataaaggttgagatacaaaaggaagctgccaacgcagtttaggcaactcataaaaacgggtatcgtgcttttgtgaaaccacgtaagcacgacactcattgataagagctaaaaagatgaaggcagtaaatcactcatcctctgttccggcaaaccgcaaaagccccgaatgatagtatctccgtttacgccatcaagtttgctgaacatctgcaaggagtcaaatcctctgtcgaattgctccttgctgacagcaggggcaaaatgaataactccacgtggatagctttttgatacacctatccacccacgcaaataatcatcgaaatgtccg

SEQ ID NO: 10936 - DNA, 1021 bp, Unknown
  gut microbiota DNA sequence
ttctatttcaataatttactacaaattcagaacaaataaaagtggtgcacaccctttaatgcttagaattataaagaataggaaaacaaattatcaaagtcttgggatatatattcatccagatcattgggattttaagaaaaataaacctaaaaaaaattgccccaatggaattgctattcaaaggctaattacagaaaaaatcaaagaatatacagacaaagctattgatcttgaaattgagaaaaaagatttcacaggcaagactctaattgataaagtcaacactcctgtaaagagaatgaatgtaaatgatctctttttacaggaaatagcccaattaaaaaaagagggaagaattagatatgctgaatgccatgattatgtgtacaaatctttgctcaaatttaataagcatctggatatatacttttcagaaattgatgtgcaatggctaagaaggtatgaaacatggcttagaggtgagggaaacagtgaaaatactattggaattaaatttagaactttaagaaccatgtataacatcgctatcagagaagggtatgtaaaagctgaattctatccattcaaggattacaaggtatcaaaactgcatgaaaacactccaaaaagagccattgttaaagataatgtgataaaggtcatgaaccacaaggagcctgtttcaaattcttcctacaaccagctggctattgatctattcacattctcatatctaatgggtgggattaatttcacagacatggccagattaacaggagaaaatatcatggatgaacagctagtgtacaggaggaagaaaacaaggaaacttatacaccttccaatccatccaaaagcaatggagatcatcaacaagtataaatctgacaattcctatatatttcccattttatccagttttcataaaactgaacagcagaagataaacaggattcacaaggtgattggaaaagtaaatgcttgtttaaaaacacttggggatgaacttgaattggac

SEQ ID NO: 10937 - DNA, 830 bp, Unknown
  gut microbiota DNA sequence
tgttcttcggcatcttccatatccgctacaatatccttgatgtgataaggtgcgccattcttgccgtgtccgtcatcgcctatccacaaataggcttcataatcggggtcaaaaccctcgtaatactcttttacattggctatgagggaatcaatatcctcgccctgcatatcggcattgaagagaaaatcctgtccgtacttggtatagcgttgaaactcaaacaatactcttgtctcgtttttgtcttcaacgttcacgctccagcctttttcttgggcaatgtcggttattctctgtatctgttcttcggtaatcatcttgtgaggggtttgaagtggggaaactttttacatttccccacacgtggcttaatccgttacttgaaaataatactcctgcttctcgtccgaccattcagaggtcatttcgtccgcttctctccatagcttgtcatagagaatggctctttggttgtctctctcgtgccactgccatatcttgtgattaagtacaaggcagagttccgtccaatacttgtagttgtctttccattcggacttggctcgcctgtatgtgtcggctatggctttgtctccgaatttatcggcaatggagaagtcctgccaaaaggtggttatcggctcgtaaccgttcaactctgttatgttccatcttgggatggcgatttgaagtgctttcataatcgttattgtttatggttttcgtaatactcttcgggtaaatgatagaggtcgttctctgccaaatggtctatggcttccgctgccagacggcacgcccattcgttacgctggtcatatcttccc

SEQ ID NO: 10938 - DNA, 158 bp, Unknown
  gut microbiota DNA sequence
ccctcgacttgcatgtgttaagcctgtcgctagcgttcatcctgagccaggatcaaactcttcatactaaaataatctttcagaaatcttatctggcagggtcatgtgttcatcgaatctcgactcgcgtcgattccgattcacgctcgctacgttgt

SEQ ID NO: 10939 - DNA, 758 bp, Unknown
  gut microbiota DNA sequence
aaacggtgcagatgaaaaagagaattaacggagaacaatactatcttccgagcaatttaacatcggaacaagaagccatttatgttcagattatagactggaaacgtaaaaatatcaccacgcaaagaggtttgtatagagggcatgaatatgatgctattttcccggatgagagccctgtcccggaaatgctgtacaaaccaataataccattactggataaaatgcaacaaggtaaatttgcttataagccacataagtttgcctttcatgccgtaagctctcagactgcctgcatcaatcttttcatgccgttactcctttctgaagatgcagaccgcatattgcctatgattccaggatgtcctgcagatttcagtaagatagcaagggacaaactgttccgtggattctgctttgaatattggggacaagatattaaacaaggaactggtttattgaatgaccattccaagcaagctgggacagatgctgatgtagctatagcttactataatacggaagacaaattatgtctgtggctgatagagcataaactgagtgagcgggagtttactgtctgcggagcatatgaaagcaaagccaatgagagcaaggctaattgcactaagtgcaatctcatggatatagccagagaaccgcagaaatgtcattatcacacgataggatataaatattgggatattctcaataagaatcttgacagattccaaggtgcaatcgaaattaaaggttgt

SEQ ID NO: 10940 - DNA, 209 bp, Unknown
  gut microbiota DNA sequence
cgtttattattacgcgaagagggatcatctgggaagcacccgggttttgtgtcacgcgagcggtaacacgcttgtggcggatcaagcgacgggctattatcctttcggtctggcgcacggtcacgagaacttgaacctgaatcgttacctttttagcggtaaagagttgcaggatcaatctctcgggggtaagttgctggggctttacg

SEQ ID NO: 10941 - DNA, 160 bp, Unknown
  gut microbiota DNA sequence
acaagcagtggagtatgtggtttaattcgacgcaacgcgaagaaccttaccaagtcttgacatcctgcgacggacatagaaatatgtttttccttcgggacgcagagacaggtggtgcatggttgtcgtcagctcgtgtcgtgagatgttgggttaagtc

SEQ ID NO: 10942 - DNA, 762 bp, Unknown
  gut microbiota DNA sequence
tggagcaatcagggacgagcgtcgagattgatgtttgcacgaagatgctgtaataaaaataggaagggggaaaatggatacccccttcccgcacgaagtcttttcactggttgcaattgtgaaatgtaagtccggacttcgtgttggtctgaaccaagtcaacgatgaaaattttaaattgtcttatctgatgttggggtaaaaagcaacagaaaaaatagccggatcaatgcaagttccggctattcctgttcctatatcccggtcaatgaaaaatccggaccgagcaagtcaatccagagtatggcataacggctcgggattgacttaattcatggaagtagcgatctgtcaacatgaaaaaagcaaccccacgccactataagtataattctgaaaagaatatacgtgtaacaaacgtgagtgttgcaacgatacaaggtatgattatttttgatttattacaagttattgtgtcaatttttagttgtttattgtcgtatatagatgttgttttagagagttcggttgctttttaatattagtttagtagacgatataatagaaaaataaatgcagatagggggtatatggatcaaatacggtaacaataaagacgagttcgacttggctttatcttgtctgtaaatcgtctttgtctcagctttaattacttaacagggaattattacggtagtttatgagtttgaaattgaatactaagttgatgttggttttatgcaagtgttctttagtctaatc

SEQ ID NO: 10943 - DNA, 418 bp, Unknown
  gut microbiota DNA sequence
atcgatcgctttcacgtgcagaagctcgcttgtgacgccttgcaagagttaaggatcgagcaccgctgggaggcgatcaacgaggaaaccaacgagatggaaaacgcccgtctggaagggaaaaagtacagggcgagaagattccgtaacgggggaaaccaggaaggagattttgtcccgttccaggttgctgctttttaaagacccggctgcatggagcgtgaaccagagaaagagggcttccgtgcttttcgagctatatcccgatatgcaaaaggccctcgccctggtgcaaaggttgagaaggatctattccccgtgcaagtccgtggcgggtgccaggcttaaactcgccttgtggtacaatcaagtcaacgaggctggctttcattctttcaattccgttgccgcttccgtg

SEQ ID NO: 10944 - DNA, 756 bp, Unknown
  gut microbiota DNA sequence
cttatatcgaactcacgttatttagtaacgatcctaaaaatcccattcaagaagtcttaattcaaggagaggttgagaaattctaaattaatatgaaaatttatgttcaaaaaaaagaattactatatcttctaatttgaatttatgggatttaattcgctttttttgacaatacggcattttgtttcctgaatataccaaaataaagaacaacttgttttcaatgatccattaattttatcgggaacaattctgtagaggcgaatattgggttatagaagtgacgaattttgctgtgatacattaatttgaattttttagaacgcaaagataagttaaaaaacgttttaattgatcattcaatattagcactattgtatctaagaatagagaaatgcttcgtttcaatactaggcacttttctttttttagtatatttttatggtttcacaaaggggattaatcttgaataaagtattgttaataccttgtttataatgaataaaagaatatttcaggatcacttccaaattacttccgaatagaatatttttagtatcctatcaaaaatctaataaaacactattctaagtatagcgttttattagcgttttaatagcgttttaatagcgttttacacgatagtgattcgctatttatcatgatgtgataatgaaatatactatgtcttatcctaaaaaagttgacttgttcaacaagtaaacttatgtcagtagcaacaaaatccagtggttt

SEQ ID NO: 10945 - DNA, 44070 bp, Unknown
  gut microbiota DNA sequence
caatcggcaaagatcacttctgccgaccaagcggccaagaaacccatgatctcggaaatatacaagtattaccaagcccgttgcaagcaaagcgacgtcatggatttcgatgacctcctattgcaaacgaatattctcttccgggattttccggagatactggaaaaataccagaagaagttcgactacatactcgtggacgagtaccaggacacaaactattcacagtacctcatcatcaaaagactggctgaacagcataaaaacatctgtgtggtaggtgatgacgcgcaaagtatttattcattccggggtgcccgcatcgagaacatcttgaatttccgaaatgattacccgggctacaagttgtgcaagctggaacaaaattaccgttccacgaccaccatcgttgacgctgccaatagcatcatcagccggaacaaggaacaaattccgaaaaaaacattctcccagaacgaagaaggagataaaatccgggtgatgaaagccttatccgacaaggaagaaggtttccaagtggcacaggagatattccgcatctcccaaaacgaacaagcggagttcaataatttcgctatcctgtatcggacaaacgcccagtcccgtatcatggaagaggccttacgaaaaagaaacataccttataaaatatacggtggactttcattctaccaacgcaaggagatcaaagacctgattgcctacctgcgactgacaatcaaccaaaatgacgaggaagccttaaaacgaatcatcaattatccgcggcgaggcatcggagacaccacgatcgacaagctgaaagaagtggcacaaaaatacaacgtgagcatctggacgttactttgcaacttgaacaaagttccgggtatggtttctgtcatgactgcagccaaactaactcatttcagacaacttatcgagggattcaccgagattgccaaagaagagaatgcatacgaaacaacttatcgagtggccaaagcatccggtatcatagaagacctttcttccgatgacacgccggaaggagtatcccgccgagaaaacatacaggagttaatgaatgctgtcaaagatttctgtgaaaccgcttacaaggaagggcgggatgacaaactccccgcatttctggaaggtgttgccctgttaaccgatcaggatagcgagaaaccggaagacaataataaggtgaccctaatgaccatccactccgccaagggactggagtttgaaaacgtctttatcgtgggcatggaagaagaacttttccccgcccagcaaagtgcctattccccttccgctttggaagaagagagaaggttgttttacgtggcactgacccgtgcagagaaaagagtgatcatgacctattccacttcccggtacaaaaatggtaacgtggtctatccgcaaccctcccggtttatcgcagaaatcgacccgcactacttggatggatttttcaccccggcccgtccctccatgggacgctcattacacggtcccggaatacaggaaaaagtagcacgtcctaacattacccttcaacccaaggttgaagtgccggacattgacacctcgaaactggtacccatcaacggggaacagattattcccggcatggtgatctttcaccccaattttggcccgggaaaggtaatttccatagatggcttgggagtaaataaaaaggcaaaagtgatgttcccaaagcatggtcaaaaggttttattgttaaagtttgcaaaactttacgtgcaaggacatacaaattaatgacttaataaacaaaaaatattatatttgcaacatattctaatttctaatagatgcgagggattgattattccggtattttaatgtgattttccggcgttttcccataaaataaaaaatttttaagaccaaaattatcctgtaatggactataatagccaaagaaaaaaacttattcttcccgaatatggaaggaatattcaaatgatggttgaccacctggcaacaataacaaacagagacgaacgtacccgtgcagccaaaacagtaatcagcgtgatgggaaatctttacccacaccttcgggatgttccggatttccgtcataaattgtgggatcacctgatgatcatgtcaaacttcacgctggacattgattctccttacccactcccggaaaaagatattctggaagaaaaaccggaaaagttaccgtataacaatcaccggatcaaatacaaacactacggtcttctcaccgaaaaactaattgagaaaatcaaagaaacagaagaccccgaaatcaaaagagtacttacggtgttaaccgccaaccacatgaaaaaatcattccttacgtggaataaagactccgtggaagacgatcaaatttacaacgacatcaacacattatacggtggcaatatcgaaatgccggaagggatgatcctttctcattcgaaagacttgttgcagaagaaaaataccaaacccacgaataacaacaagcaacagaaaaacaataagaaacaattttacaaaaaacacaactaaaatcatccaatctaaaattacttgggatgttagttactctaatcttcgggggaaatcaaggggatcggaaaaccttgatcggtgaggccataacggaaatgtcaagcatagggaagatcgaactctgttcttccctttacgaaaccgccccgtggggattcgaatcatctgattctttttataatcaaattgttacttacgaaacaaatctactcccggaagaagttttggataaatgtcaggccacagaacaaaaactcggacgagtccgctccggtactcagttctgttcccgaaccatggatatagacattcttttctgtgattcccaaatcatcaacacgcctcgcctgacagttcctcatcccagactagcacaacgtaatttcgtacttgcccccctgaacgaaatcatgccggccttcattcatccggtcattcacaaaaacattgccactcttctcgcagaatgcacggacacgctaaaagcggagataatttgaaaaaataaactcctccgtcacttcgtgccacctcctctataaacagaggaggagctggtgactcttcctgaagacggggagtatttcaactctccctctgtttatagagggagtaccccaaaagggggagggagtttgagaaatgactttttggacaactcctacccgaaggaggggtgttcaatctaaaatctaaaatccctaaatctaaaattattgcgttcttcctcagtcaacccgtctgatctccgcaccaatcgcattcaacttttcatcaatatgctcgtaaccgcggtcaatctgatcaatgttatcaatgacacttgtcccttgcgcagacaacgccgcaatcaacaaggcaattccggcacgtatatccggcgacgtcatcttggtggcccgtaactgagattcatgattttgcccgataaccgtggcccgatgcgggtcgcaaagaataatcttcgcccccatgtcgattaatttgtccacgaagaacaagcgactctcgaacattttctgatgaatcagcacgctcccttttgcctgagtagcaacaacaaggaatacactcaacaagtcgggcgtcaaccccggccaaggagcatcggcaatcgtcagaatggaaccatcaatgaaatcttctatcatgtaatgttcctgacgaggaatatataaatcatccccacgttcctctacccgaattcccaacttacggaacgcatccggaataatacctaactgaggaatagcaacattcttaatcgtgatctccgagcgggtcaatgctgcaagtcctatgtaactacccacctcgatcatgtcgggtaaacaacgatgctgacaccccccaagactttcaaccccttcaatcgtcaacaaattggaagcaatccccgaaatccgggcccccatagcattcaacatccggcacaactgctgcacataaggttcgcaggccgcattatagatcgtggtcaccccttccgccaacacggcagccatgataatattcgccgttccggtcaccgatgcctcatcaagtaacatataagttccccgtaatttctgggcagaggccttataacatcccgagatagcatcgtactcgaacgtggctcccaatttctcgaaaccaagaaaatgggtatctaaccgacgacgcccgattttatcccctcccggcttgggaaccaaaccgcaaccatgcatggctaacagcggacccaaaatcatgatcgacccgcgtaaactagccgctttactataaaaatcttctgtttccaagtaatcgaaatttatctcgttcgcccggaaagaaaactcacctttttgaagtctctccaccttcacacccatacctcgaagtagatcaatcaattttatcacgtccaatatctccgggatattactgataaccacttcttccctagtcaacaaacaagcacagatcacctgtaatgcctcattctttgctccctggggaactaactcacctttcaatcgtctcccaccaataacttcaaatttgctcatgtcgtataattaaagagttacagttttcgctacaaacattttagccacgcatcgtaagggtatatctatctcccgaaacgcaaccgaattctgcacgtaaaactatcaaaaaaacggacgccaacaaaaatatttataggaactttaattatttcaatttacaactcttgtaaatacatatataactctcaggaatattcgttaaacaaacaatcagctaaaaatatattacagaaggggattagttaagaaaaatctcaataaataaaacttaaatccaattgtactgaaggggaacacttcatttagatttgatcaatctcacaactatatgctatcaaatctaatctcttttccaaaaagaacaaattttactagaaacagaaacattaataattatggtaaatagtataaatgaaactttagccgtattttaacatagaagaatgaacgattagttattttaactcaaaaagaacccaaattagatacactttcatacatttatattatctacctttagaatgtatacaataaataattaaacgcatcttgtacaagattattttcaatttaaaacttaaaactatgaataagaaattattttttttcattcacatagttactattttagttgcttttatcgcatgcaaaaatgatagtaattctgttcccattcaacaagaagatctaagtctagaagcacagacagcgttagatatagtgaacaccttcaggaagcaggtggctcctagtggtatgtctagatctatctcgagttcagatttgaatattttagattgccaacaagaagaggtgttattacgtaagactgaaaatagtgaatcaactttagcccgtcccacggctgatgaaattgaaaaagtaagcctttataatatcaaatttgaattaaacggtaaaaagggatttgcttactcttctcctgacctacgcataaatcgggtcttagcttattgcgaaaatggcttgattgaagacactatatacataaagggtatggccatggctattaaaggaattacccaatcttgtgcgaatgatttaaacgaatattactctaatgacagagcatcgtctcgcaccaatgaaaaaacttcaaccaatgggccatttatgcttactgagtggtcgcaagatgcaccctataatgaaaattgtggaggaagtggatgttccacgacaaataatggtaaatacccagccggttgcgttggtattgctgtagctcaaagcgtggcttttcttaataaatacgattcacagttcaatcttgctgcgttaaaaaaagaaaaacacatatattctttcagccctttagctgcagaagttgcaaaattcgtatatcatgttgcagccgggtgcaagactgattttgcttgttcaggtagtggttctacattagcaaaagctacagattatctccaatcgatcggttataatcaagattttctagattattattatagaaaagcaagttccatagataaccaattaatcgggtgtttgttgatggacaggccagtttgcgtgggaggaaatacaggtaaaggaaatggtcatgcatgggtatttgatgggatatctgcaacaacaacagacagagttggtgaagtgaaaaaaattcttgcccttcactgcaattggggatggggaggattaggaaatggttggtatgataatgggaattggtataatcctgtagatcaaacaacatttgaacctatatccgacaacggttctttttacaggaacaatgaatatatttactttagatacacaagacgttaattaatattcagcaaaaaggggagaaaacaccccctttttgctaataaatcaaataaatcttacttcaattgttcaattaaaattccatcaaaacaatttccagattgcaaaccgacaaataactctctcaatgatttttctttattttcatcaatagaaattgtaagtccaccatcaaaaatatcaatagaaaaccacttttcctttattggaaaattagatgtactatcggaataatacaaggtagtaattatggtgtctccatctactatcgtcctccatgaattaacccaccaagcactattattaacttgaaagaaatgttttcccccttcttcaccaaaatccatgtaattttctttcaaaccgacactaccatcacatccaagttctgaataatcctctttacacatatagcatgtgcaaatgaacgtaaaaagtatgatcccgcaaattattgttctaattttcatacaaaccgaccattagttgttatttctttcaaaggtattgaaaataaaaaaaataccagtaagatttatgttaaaatagaatgttttattcaacaaacttaaaagaattcatataaaagatgacgaacatcataaagactcgaatctcccttcgagtaattcttagaggacccaagcctcgttattaaatttctctcagatatcttctaatattatgaactttataaaccgaatcgacaaaatcaattaaaattttgtatgaccggaattatatccatacatttgtaaacaagatttacaatataagccatattttgtatctctaaattttaccagagattattaataatttaaaacaacacataatgaaaagctttctgaaatacttgttagcgaccattgtcggtattattatcgtacatgttatcctgtttttcgtgtttatcggactcgtcggggccatagccagtttctccaatcccacgatcgagatcaaggacaacacgatactaaaactatcactgaagacagcgatcccggacagggcatcagagaacccatttcagaactttaacttgatgaccatgagcccagagaaacaaatcgggctaaataaaatacttgaatacattgacaatgccagcaaggattcccgcatcaaggggatttacttggatctgacagagattaactctaatttcggggccctcgccacgattgacgaaatccggaatgctttgttgaggttcaagaaaagcggtaaattcatttacagttacaccaatctggggtattcccaaaagagctactacttggcgacagttgccgatagtgttttcgttaatcccgaaactccgctactgttaaccggaatgagcgcaaatatatcattctataaagaccttttgaaaaaaatcggtatacaaccggaagtcattcgtgtcggtaaattcaaatcagccgtggaaccctacatcgaaacacacatgagtgatgccaaccgggaacaggtactgacttatttaggttctctttggggtaacatcgtgaaaggaatttccgccagcagaaatatcccggtagaaaagatcaatcaaatcaccgatgatttcaaaatctacccgacagaagaattcgtgaaagaaggatttttcgatggcgccctctacgaaaacaccatgctcgataaactacgtgaagcatgtgggctaacagatgatgaaaaactatccctgacaagtttcgaggattacacgaaagccactttccctaccgtgaatctagctgccgacaagatcgccgtgatttacgctcaagggaacattgaattccaacaaggaccggaaagtataggaccggaactagccaccaccatccggaaagcacgtgaagataaaaatatcaaagctatcgtgctgcgtgtaaactccccgggaggtagcgccctgacttccgacattatctggaaagaggtacaactagccgcacaggctaagccattgatcgcctccatgggtaacgtggccgcatccggagggtactacatatcctgcgcagcagacactatcgtggcagacccgacaaccctcacaggttccatcggtatattcggtttactattcagcggagagaaactgatcaaagataaactaggaatctcttccgacgtggtgaagaccaacgaacacagtgatttcggaggtggttacccgctccccatccctatcagtgatcgtcccttaacagactacgagcgtaacgtgatgcaaacttacattaaccgaggatacgacaccttcctcgatcgggtaagccaaggacgccacatgaccaaagaggcggtaaacgaaatcgcacagggacgggtatggacaggagaggatgcgctaaaactcggattagttgacgtgttaggcggactggaagatgccattgccatcgctgcacacaaagcaggtctgaacaactaccagatcaccgaactaccggttgaacgcagtcctttcgaggatatcctgctaaatctctcgcaaagcatcagaaccagcatattaaaatcagaactgggcgatttctatgatacttatcgggagcagaaagaattattaaaaataaaagggatggtagctagaataccttacgatctcacgtttaattaaagcgaaacattgtgttgaaaaatctcattctatggcctttaagcgtactgtacggcatcggagtcagtattcgtaaccgcttgttcaacttgggcatactaaagatccgggagtttgacattcccattatttgcgtgggaaatatcaccgtgggcggaacgggaaaaacccctcacacggaatccctgatcaacgagttgaaaaatgattaccgtgtagcctgcctcagccgagggtataaacggaaaacttccggtttcgtgctggcaacggaaacctccacggcaaacgagatcggggatgaacccatgcagataaaaaataaattcccaaaaatcatcgtagccgtagatgcggatcgggtacgcgggatcaaaaagctcatgcagcttccggaaaaaccggaagtaatcatcttggatgatggttttcaacatcgctacgtgaaagcggatataaacatcatgttaatcgattacaaccgccccatatacgaggatcatttacttcccttgggacgtctccgggaaagtattcatgccaaggatagggcaaattatatcatcgtgaccaaatgtcctgcgaatatctctcccatagagaaacggattatcctgaaacacttgaatttaaaagcctaccaacagcttttgttcacttccatgagatacggagaaccccgttcgctggacgggaacagtcatcatgcagtaaccccaaaaacggccatactctgtgtcacggggattgcccaaccgactccctacgtggaatatttaaaacagatgacggaccaaattgctcacatcacatttcctgatcatcacaattacagtgacacggacataaaacgtattattcaagagtacgagaaaatcagtatcacggacaagtgtatttttaccacggaaaaagatgctgttcgcctcacgctatgcgatattccggaagagattagacgacagattttctatatcccgatcgaaccggaattcctgactccaagagaccaactcataaaaaatatatacgactatgttagacaagatacaagaaagtagcaaatatttggctcctttcgtgaaaggagagcattccattggtattatcctgggaacaggactgggagaactgggaaaatcaatagagatagaacacgccatcccatatatggcaattccaaactttcccgtttccacggtacagggacaccggggagaattgcttatcgggtccttcgggggcaaaaaagtcattgccatgcagggacgtttccactattacgagggatattccatgaaagaagtgacctttcccgtgagagtgatgcacgctctcggggtaaagaccctttttgtttccaatgcggccgggggcgtgaacacgaattacctagttggcgacctgatgatcattcgggatcatatcaacctattcccggaacacccgctacggggtaaaaatatcgacgaactcggtcctcgcttccccggaatggccgaggcatatagcaaacgcttgattcaactggcagaagaggctggaaagaaactaaatattccattgcaaaaaggtgtgtacgccggactgcaagggccatccttcgaaacaccggcagagtataactggattcgggttatcggtggagacgccgtgggaatgtctaccgtaccggaggtcatcgtggctcgtcacatgaacatggaatgctttggtatgtcggttatcacgaacagcacggccagcgaggaactcataaaaacgaaccatgcggaagtacaggacgtgggcaaccacgctcaacctcgaatgggagccatattcaaagaaatcatcagcaaattatgatttttttcctcactgacagtgaggaaaaaaatcatgaaaaagactcaacttcgacaattcaatcatgatttttgccgcacctcgggcatcacttaacgcctcatggtgatttaacgctatcccgaaatgatcacacaaagtattcaatttataattgggtaagcctttcacccacttccgggacaaccggcaagtacaaaaagattcaggcaaacgagcatataaatccgcccgttccaggcaagccttcaaaacacttatatcaaatcccgcattatgtgcaaccaatgcttccgtatcaaagtaatgcccgatcacactccacaaatcataaaacgaaggcgcatcttccaccatcgcgggagtaatcccgtgaatctcgataaacttcttgttaaaatagtacggctccggcttaatcaaatgcgagaactcttccgtgatctcaccatcctgcacgacaacaattccgatcgagcaagcgcttgtcgggtaacggttagccgtctcgaaatcgatagccgtgaaattctttaacatcctagaataatgacatgacccattcaacaataggcaccaatatagcggtcatcacccccatcaaaccaatcgccaacccactaatggccccttccaacgcacccagttccattgccctagctgtacccaacccgtgagctgcggcaccaagggataatccccgggcaatcttactatcgatattcaatttgttcaacacgaaagggcccacgatccccccgaatattcccaccacgataacaattaccgccgcaatggcaggaataccccccgctttctcggctacccccatcgctatcggggtcgtcacggacttcggttccaacgtcgctatcaacacgtggtccgctcccatccagcgagcaatacaaattacgctcacgattcccaccaaactcccgacaaaaatagaagtcatgatcgacaccgcattactcttcatatattccacctgttcccacaacacgtaccccaaagccacaacagaaggtcccagcaggaaattaatcatccggctcccttgtcggaaagattcatacggaatcccgattacgctcatcaccgccaccaaggccgggatagaaactaacaaaggatgtaagagcgccaatctcgttttccgatacaaccagagcgctgccaagtataccccggccactaatgttattataaatatctctgacgaaataatagactgcatcttcctacaaattaattcgttttaccatgtgcccgatgatcctcttgccattgttgcaaaaccgccaccacgatcaaaactaacaaagtcgtcaccgtccccaccaccaatacgatgtcccagtaacgagacaacacatccatagacgtgataatccccactcccgccgggagaaagaaaaacgccatattatcacaaaggaaacgagccaccggacgcactctctccggcctgacccaacgcatggataatgccaagaacaaaaacatcattcccaacacgctccccggcacgaaatcgtttatcaaccaggcacaacattctcccagtaaataaaaagccataataataaaaattcctcctaacattccatttatatatttaacatgattcccgccccgaatcgtcccgtgttaccccggtcccctcgataggaaaaaaattgatcatgatgacaaacggtacaaatgcccgctacttcgatacgagcatcttccactcccacttgccgtaattgacgacggttcgcctcccacagattcaactgatacttcccggggtgtttccccgtttccactaagcccttcaaatcccccaagccctcgagtgccgcctcaacgacctcttctccaacctcgaaacaacaagggccgatagaggggccaattccaacaatcatatcccgaggatcacatccgaactcctcccgcatccgttcctcggtcttcgcagcaattcttcccaccgtaccccgccatccggcatggacggcagcaatcacccgcatccggggatcgtacatcaaaacaggcacacaatcggccgcaagcaccatcagacaaacacccgtttctctcgtaatcaaagcatccgtcgaaggcaagcgggttgctttttcccgtcctccccgaccacgctgtgcccgggtcacgacttctacgtgagtggtgtgtttttgttctccaaaaataaaatcatccacgccacagccaaccgcctctgccagcaatatccggttagtcaacacccgatcatcccgatcctcatccatgaaccctagattcaacgcagattgcccgccgacactaacgcctccttcccttcccgacacgaaatgaattaatcccggaaaatcccgtaattccaaaaactggtagaacgcaactttatctctctcaaccctaatcatatttattcgttcttttgagcgcacaaagatacaacattccaaacaaaattgtcaacataaatcgccttgtcacaaataaccataaaaaaacaaccccccgttttgtttacacgtatcatcgataaaaaagaacgattatgtggcaagaactatgcaaaactcgcaaagaatacctcgaaagagcgcaactggacacgaaaggctattcaccccgacggtcggaaacattactctacgagattgcccgcctagacggcatggacatcaagaaacaggactttttcaatatcctgaacgatattgagatctcacccaaagttacacgagaagacacgcaccggataaaagacctaagtaacgccttcctttacctggttaaatgcgcacaacaacgcaaaagactctcgctcgacttcgtacgggaagtcagcgcaaaagtaatgcaacacacgggcaaagaagtatacaccacaatcggtggttacgatacctcactaggcgattttcggttgggagaggagtattatgaagaaggcgttctcgccaactacgctcaaatcccggatatgctggaacaattatgcaaggagacaaatgaaaagctaggtaacgttcacgacattctgaccgtgaaacttgccgcagactttcactatcgtttcatgcatataaaacctttcggggctgggaatattagcgtcggactcctaatgatgaactatatccagatgatgttccgggagccgctcatcatcatcccgggagaagacaaggcaaaatacctcgctgccataaaaatgcagaaggacaccccaacacccgaaacattcgaacgtttcgtgggagaggaattactttcccaacttcgcaaagaagtctccccgcagaaataacattatccatttcccaatgccggaagtaggttttgacaagcataaactccggcatcactttttaatccagaaaccaccctccccactacaacacgtgaatttcaacccgtttcatcagacttttctcgctctcaattaaaaaagtctctgaaattctttgtgatttataatgaatcaactatctttgctgcccgttaaaccaagaaacaattttaaaattatatacgaaatgaaaaagggcatacatcctgaaaattacagattagtagcgtttaaagatatgtctaatggaacgactacaatcaccaagtctactgctgcaacgaaggagactatcgagatcgacggagttgaatatccattagtaaagatggaaatctccaactcttcacacccgttctataccggtaagattaaactgatcgacactgcaggacgtgttgacaagttcatgaaccgttacaagaaccacatggaaaacagaaagaaataatttttctgatataatacaaaaaaaggagattccaagaatctccttttttttgtattataccaatatagccttgcaatcatcattccatcgcttttccttggtagacccatttaatagcatcaccaacaataatctgattttcttccccttcatcactaagcgatattttatttacaccaggaaggcaattatatacgcccaaagaacaccactcgcctctagtatcaacataaaccactttctcctccccacccaacggtgagattttatatttctgcatcatatttaatgaataacttggaatatacacgaaagcctcatacacaccttcttttggaagatcagcctcccaagtcaaacgataatcacccgattttccccgcgtaaatacaaaacttcgaattgtagttccttgacaattttgatcaatatactctttccattgggaagttgggaaaattgcgttttcttctttaaaatttataaatcgaatccatgatttgggcgacttcaagtgttcgttttttactaatttcaacaaagtcgaaggttgtgtgatcttgcaacccgggtccgtattatccacaataaattcgttcgtgtcagataaaaaataatctctagaaacttcttccatgtattgagtcgtatccgatgcaaatatccccgttgcccgacacaaaaaagagttaggcaaatttccggcaatattagtatttatcatgaaatccaaaaattcattcacctcgaatgcaaatcgtttacctgttccggcttcaattttaaatgcatggtatttaataatagattcccgtcttttttctttatgagcccgttgcatctccggccaacctcccggtaaataagtagatgttctaaaattgaccaccccatccacatcactatcattaaaaacagcaaattctatacgataacggcaatcttttgaattttcagtttttactctcaatatttttgcaatttttagcaaatatgtcggaattttattgttcatataccaagaaggcaatatcatattccaatctacttgaaaaaccgctttaaactcctcgtttaattgttcaaaatcaaccattttgaaacggtacttattaaaaaaatccatcaaaaaaaacactagcttatcctgatcgaccccttgggtttgaagtatatccaccaactcccgttcctttaatacaaaaatggcatcaagtactgccacatccaaagaattatcgtgtaaagcatctttcaaactacgcgaacgaagataatcaatcgcctgctgttcccaaatgggtgtcaaagcaggtcgtgcctctattctcgtctggttgttatcttctattattagattcattaaagaattcaagaaaggataagtttgagaaactatacccgaaatttgattattaaattgggcataaattaaatgtggatttttactgcactcaacatcttccaaacgatattttctccacaacatattccatcctaaaattttgttccatgaaaaggtatttcgccatacttcttctcgaaacaataataaatgaacagcaacttctacctcactagaaaatattttagtcccgaatcctcgttcagggaaatacaaaacttcaggctgcacaaacccactacacttcatctcattacggaaataagaggtaaaatccaagggtgtttccacaaattgaaaacgtttataaggatatttattccccgcagaaatttcagccacgtgacgagctccacggataattgacctcgcagaagttccctctcgtacaggagaaggtaacaaccgatcgttcaatagttttaacaatgaagcgtgtttacgccacacgtgaagctcgtaagtcacactatccacaatcaactgccgggtaacgtaatcgcctatattaagcgtgagacccggcaacggggattcattccgaaacacaagttgatccccctttttcattcgcattccctgggaaataactttatttttcccgtaattacgtactcgcaacgagtaacgagtaaaatccctagaattatcatacggggaacccggattttccggaggaacagtcgtcgggtaccacaaaacctccgggatcaacaaagtaaaatcttttcgtaaatacgaataacgtttccccaaacgacaagccaaatacatacgctcgcgtgtatctgcgatttctgcatccggaacattcagataacaaattctctcgtcgatttgacctttataagatagttccaatagcaacgaatccccgggggacaatctcgccggtacgtcaatcacttgcttttcccgttcataaagggaagtcgttccatttatgaacaaggaagtcacctccaaactcggattcaagtaaagcaacaccttgtcaagttccacccccgtacaattccgcacaacgagttttgtattcacaaacatttcatcctctcgttgctcataatcaatatcctgagactcaagataagctttcgggtaagaagaatatttttcgtaaatagatctataattcaaacgttcacgaaattcatcctgccgcaaaaagaaaaaagaacttccacacaccacccccatgatcaaaaaaaagaaagccattatccatttacaacgactacaaggtcggttcggaattcgatcgaattttaaaatggtcaacccgacaaaaccaagccccaagaaaaaacatgcccctcgctgtaaaagataacccaacatatcagaatggcctgttatcctggaaaaggcactcggtaaagaaagccccaacggatccaacaaaccgaattgataatctgaaatataaaatatcgtggacactaaaaatccaaggagaagaatcatactcaacacccgattctttaaccaagtaataacaaaaaaagaaagtcccagcatgaatacaagggccggcataaccatcaaaaacaaataaaatagatagtaaattccacccaacgggaaaggcataaacaacagatgcatcaccataatcatcaacaacgaaagtactgccgcaccaccaaacacactaataaaagcaataaacacgccacacacgtattccgcattactttccggccgatagtacaccgtttccatgctatccacataacgttttttactcaaaaagtgacaactcaaaatcaccaaaggaagcgtttgaaaaatcaagaaaaagaaagtattcataaacgggacagatgaggaaaaatccgcaacgcaaaacgaatacctccctaaaatactctgattactcaattgagcaaacaagatcacgatatacatccctaaggtataaaaccataataatttttcccttaataataatcgaatgttgtaaaatgctatcgtgttgatattttttatatccataatcttttaagtatgcatttcaactattcacaaatatagtgaaaaacattcgtataaatataaattatttcactacattcgtaatgatagccataaactacaaatattacctaacacgcccatgttttcgtactggaatatgcagttatgacctaggggatccatcttatataaaggggaagataaagttttctaaagtatgtattttctacattaccacaagtgactcccaaggtaatccgaaatgtcatcattgggattaccttaggattacacatgatcatctaccgttcaggatctgcaaacacatgttcgataatccggcgatcgacatcatcaaacgttttgttccggcgtttcataacagcttcagccgtggaaacgaattgattcattttatgctccgtgaatccactggcaccaccccatgagaaggaaggaacgaaattccggggaaaatccgaaccgaaaatattggtacccacaccgatcaccgttccagtattaatcatggtggaaatacctagtttagcatggtcacccatgatcagaccgcagaattgaagtccggttcgacggaaatgcttggtctcgtaatcccacaacttcacctccacgtaagtgtttttcagattggaattattcgtcccggcaccaatgttacaccactcgcccagcacggaattcccgaggaaaccgtcatgagccttattcgaataaccaatcatcacaacgttgttcacctcacccccgcatttgcaatacggacctaaagttgtcgccccatacaccttggcacccatcgtcaacaccgaatgttcgcacatcgccaacggtcctcgcacgagaacaccttccataatctcggcatctttaccgatatataccgggcctccttccgtgttaattaccgcacagcgcacaacagccccctcttccacgaaaacggggtacttcccgtacacctgcacgcaactattcaacagggcactctcacgcccttccgtaatcaatcggaaatcaacctccaattcttgggcattcagtgaaaacaaatggtaaggataaacaacacgggtaaactctcccgtgtattctttacgtgtaaaatcgggtatagccatcggatcaaaggttgcaacatcctgtatacccatccgcacggcgatcagacaatcaccctgtaataacatctctccagcctgtaaaaacctgattttctgcatcaattcatcattcggacataccgaactattgataagcaaattatcgtcttccacagacaacgggaacttttcctgaaggtagtctttagtcagatatgcaaccttatccccaaaccgcttttcccacttttcccggatcgtgagaattccaaccctcaattcagaaatcggacgagtaaaagtcaagggtcgtaaagtaccccaacttttatcatcaaacaaaattattttcattgtgtgttttatatttgcacacaaaagtaacaaatgcatcatatttcacaaaaaaaatctttggcataagaattgtcctatgatgtagtggtttatttttcagtacctttttgtcaaaatgtcagttttttgaaacaaggctaaccacgggaaaaccggaaataaaccaaatgtggaaaagtttaaaacaatcgagataaggagatcataatgaataaaatagatttaaaagatattttacaagaaaacttggcggacgataatcaagattatttatccatcttgggagacgagaaggagatgctcaacgaccacacggatattccagacactctgccaattttaccgctacggaacacggttctgttcccgggcgtcataattcctataaatattggcagggaaaaatcattgaaactcatccgttacgtgtataaaagcagcgtacctttcggtgttatcgcccaaagagacaccaacaccgaaaacccgaaactggaagacttatacacgatcggtacagttgcaaccgttttgaagatactggaaatgccggatggaaccacaacggctatcatacaaggtaaaaagagattcgaactcgatgacatcctgtatgatgaaccctaccacgtgggaaagatcactgtcaagcaagaggatacaatcaaggaggatgaccaagagtataatgccatcggagaggctttaaaggagatggccctcaagatcgtaaaatactccagcaacatcccgaacgaggccggcttcgccttgaaaaacatcgagagtatgctattcttgatcaatttcatttcctctaacacggatattgactaccggaataaacaggaattactggaaattgacatcctgaaagaacgggcaaccaaattactggaacttttaggcaaacaagtcaagattctggaactcaaagaagacatccagaagaaggtgaaagtcgatctggataaacagcaacgggaatacttgctccaccagcagatgaagaccatccaaaacgagctgggagccaatccggtagatgaagatcttcaagaattggaagaagcggcccaaaagaaaaagtggggaaagaacgtgcaggaaattttcgaaaaagaacttcaaaaattgaaacgccaaaatccttccaccccggactattccgtgcaattcaattacgtgaaagaattgaccgagttaccctgggaacactattccgaggataatttcgacttgaagaaagcatccgagatactggatgccgatcattacggactggataaggtgaaagagagaattctcgagtacctcgccgtactgaagctgaaaggagatatgaaatccccgatcctgtgcctgtacggccctccgggagtcggcaagacttccttgggaaaatccgtagctcgggcactcaaccgggagtttgtacgtatgtcattgggaggtttacacgatgaatccgaaatccggggacaccgtcgcacctatattggagccatgcccggacgaatcattcaaagtatcaagaaagcgggtacatcaaatcccgtattcatactggacgaaattgacaaagttggccaagactttcggggagacccacaatcggcgctattggaagtgcttgatccggaacagaacacgaccttccatgataactatctggacgtagactacgacttatcaaaagtcatgtttatcgccacggcaaacgacatttcgacgattgctcccccgttaagagaccgtatggaaatgatcgaggtgagcggttacctcatggaagaaaaaatagagattgccaaacggcatttgatacccaaacagctggtgaatcacgggctaaaagcagaacaaattgagtttaccgatgatatactaaacttcatcatcgataaatacacccgggaatcaggagtacggggattagataagaccttggcaaagatcatgcgtcaagtggcaaaaaaggtggctatggatccgtctttcacgattaaaccgacaaaagctacggtggaagaatacttgggtacacccatcttcacccgggaagaataccaaggtaacgagttacccggagtggttaccggtttggcatggacagccgtgggtggtgaaattctttacgtggaatcaagtatcagcaagggcaaaggtgtcctaaccatgacaggaagcctaggtgatgtgatgaaagagtctgccaccttggcattagaatatatcaaatcgcacgctgaagaactgggaatacagccctctgccgtggaagaacataatgtccatattcacgttccggcaggtgccgtacctaaagacggcccctcggcaggtatcaccatggtcacctcgttagcctcatcgctaaccggaagaaaggtaaagaaggctttagccatgaccggagaaatcacgttgagaggcaaagttctccccgtgggaggtatccgggaaaagatcctagctgccaaacgtgccgggatcaaagagatcatcctttgccgggaaaacaaaaaagacattgacgagattaaaaaagaatacgtaaaaggcattaaattccacttcgttgaccacattcgggaagtattggacattgccttgatctaaaaaaatctacccatgttgaagtgcatcttaaaaatgaaacttgttttttaagatgcacttcgttttttaccccctcacatgatgacactattcaatccatcatcctcccaatcatattcgaagctatgaggaaagcaattctcgctaataatcaaacaattacttttacttattagttttacctatccaaatatagaataattcaatcaaatttattgttttaataaaaataaatgatatatttttgtattgagaaaataaaaacaagaatcaattataaaaataaaaaacaatggaaccaattatcaattcacaacttcctaagttcaaagttcaggcatttcacaacggagagttcaaaacaataagtagcgaagacgtaaaaggcaagtgggcgatcttctttttctaccccgcagactttaccttcgtttgcccgaccgaattagttgacgtggcagagaaatacgagcaattcaaagcaatgggagtagaagtttactctgtaagcacggattctcatttcgtacacaaagcatggcatgatgcctctgaaagcattcgcaaaatcaaatacccgatgttggcagacccgaccggagtattgagccgtgccttcggggtcatgatcgaggaagacgggatggcttatcgcggaacattcgtggtaaacccagaaggaaagattaaaattgcagaaatccacgacaacaacattgggcgtaacgcggacgaattacttcggaaggttgaagctgctcaattcgtggcagaacacccgaacgaagtttgtcctgcaaaatggaaaaaaggagcaaatacactgaaaccaagcatcgatttagtcggaaaaatctaacaagaatcttccacggggtgttatgatacaccccctctttatcccacctttccccattttaaattctaaatttcaaattctaaattatatgctagatacctctttgaaagatcaacttaaaaatattttcgctgttttagaggctcgatacacattggatattgccgtggcccctcaacacgaaagttggcaggaattaacggaaatgctggcagacgtggctgaatgttcagataaaatatcttgccagattaaagagggaaaagaactggagttctctttactgaaaaacggagaacccacaggcatcaaattccggggagttcccaatggccacgagttcacctccctcctacttgctattatgaatgcagacgggaaagggaagaattttccggataagaccatctgcaaccgggtgaaagcattgaaaggccccatacacctgacaacttacgtatctttaacttgtaccaactgtccggatgtcgtacaagcgctgaatgcaatggttactttaaacccgcaaatccatcacgaaatggtcgacggggcaatctaccaagatgaagtagaaaaattaaagatacaaggagtaccttccgtgttcgctgatggaaaactcctccatgtcggaagaggggaattcggtgaattattaaacaaacttgagactcaatacggaatagaggaaaacacgttagaggtaaaagaaaaaagttatgatgtcatcgttttaggaggaggaccggcaggttcggctgccgccatttactccgcacgcaagggtttgaacgtggcagtcatagcggaacgtatcgggggacaagtcaaagaaaccgtgggaattgaaaacctaatttccgtaccggaaacaacaggtaatcaattggcagacaatttacggacacatttacaatgttacccgattgacctgctggaacatcggcagattgaaaaaatagcattagaggacaaacaaaaaatactttccacggctaccggggagaaattctccgcaccggctgttatcgtagctaccggagccagttggagaaaactgaacgtatcaggtgaggccgagtatatcggtagaggcgtcgcgttctgcccgcattgtgacgggccattctacaaaggcaaacacgttgcagttgtaggagggggcaattcagggatagaagctgccattgatttggcaggaatatgttcaaaagttaccgtattggaatttttggacaatttaaaggccgatcaagtgttacaggaaaaactaaaaagcttacccaacgtggaagtctttgtcaattcgcaaacacttgaagttatcggcaacggggataaggtaacaggcatccgggtaaaagaccggacctccgaagaggttcgtaccattgaattggacggaattttcgttcagatcggtttaatgcctaatagcggcgttttccgggatgtagtcgacacgaatcgaatgggagaaatcgccatcgacacgcattgccgcacaaatattccgggaatctatgccgcaggagatgtctccaccgtaccctacaaacaaatcatcatcgccatgggagaaggagcaaaagccgcactttctgcttttgaggatcggatgcgaggggtgatttaaagtaaaagataaaagtgaaaactaaaagtgaattagacttcgcttttagttttcacttttcatcttccaggcctttggtcaatgacttaaccagtttatatttattaaagaattctcttaatattacccttaaaaccgtataccccggtatcgccaagatcattcccggtatacccgccaaatttcctgcaatcagtatcaccaaaaaaatctccatcgggtgagcgtgaacactattcccgtaaatcagaggctgtaacaccacattatcaatcaactgggtaataatgaaaacgatactcatgtatatcaacaagggaaatactaccgtgtagaaatcgacatccacattcgtcgcaatcccgacagacaacccgaaggccgccccgatcagaggcccgatataaggaattacattcgtaatccccgtgatcaaaccaatcagcaccgcattattaaacggtagccccacaatcgttaatcccaatatatttaaacccatcacgatcagcacctcgaaggtaatcccgataaaataacgcatcagcaatctttgaatcgaatccaacgcattccccacaccttccccataacgtgtcggcacgatagtcaataacatccggtaaaataacttgctatccttcaggaaaaagaatgccatgaaggtcacggaaaacaaggcaatgaaaatactactgatcgtacccgccaaagaaccgaacatattttgaatctgcgtaacatccaccaccgacttcaagttcgtcacgatatattccttcacgtcctgatccgattcaagaattccaaaccgtttcaatccctgctccaaatcggccaaaggatcttcaagcttgttcacgatattcgtgatactaatatcactcaacgactgaaattcttggctcactaacgggatcaccgtgtaaaagaaaaggatgaataccacccaaatacaaatcagagctatcgcagctcgcaaaccttctggtatatgataccccttaatttccaagcgctccaaacaattcatcaccggtcgtcctaaaaaagagatgatcacggcaatcaagatataagctattatggaagaaaaataccaacacaaaaatcccacgatcgccaaagcgaaccctcccagacaatattttcctatattattcataattcaatctttacaaagtaacaaacaacactccagttacgacaaaagcaactcgacgttacatatttcttacttcaaaaatagacaaataaatttattctatcggcacataggtattatttatgcgaaaaaaacatggaaatcaagaaaacatttttatctttgattacgttctttaatggataaataacaaaataaagtcgtgtatgctaagaaaagcttgggatctatattacgacggattcaggaatatgccccggtggggaagaactctttggcttattatcattattaagctatgtatcatgtttttagtctttaaactttggttaatgcccaattacctcaactcccactatgacagtgccgaggagaaaagtaatcatgtttttgaagaattaacaacaaaaccttaatattatgcttcttgatctgacaacaaccactctggtggagtggtcacgatggcaatttgccatgacagcaatctaccattacatgttcgtacccctgaccttggggttagccttgatgctcgctatcatggaaaccatgtgggtaaaaacgggtgatcaaaattggatgaatgccactaaattctggatgaaactgttcggtataaactttgccatcggcgtggctaccggattaattctggaattccagttcggaacaaactggtcaaactactcttggttcgtgggggatattttcggcgccccactggccattgaaggaattatagcgttcttcttagaatcgaccttcgtggctgtcatgttctttggctggaataaagtaagcaaacgcttccatctgatctcaacctggatggtatttgtcggggcaaacatttcagctttatggattctggttgccaatgcttggatgcagaatcccgtcggcatggaattcaacccgctgacggccagaaatgaaatggatgatttttgggcaattctcttctcccccaccgcaatcagtaaatttacccacacggtaacttcagcctacacgctctcggcctgtttcgtggtaggagtaagctcatggttcatcctgaagaaaaggaatcttgaattcgcccgcaaaagcatcatgcttgcctccgtgttcgggttaatcagtattcttctcaccatgtacacgggagactccagcgcacaggatgtaaccaaaacacaacccatgaaattcgccgccatggaaggccttaacaagggtggtaacggggttgaattcaccgtaatcggtattccgacaaacgatccgtcattaccgacttccaagatgaaaaaaatggaatacgcgatccatgttcccaaaatgctttccttcttggggtatcatgatttcaacgcctatattcccggtattcaaaatattttagacggttacacctcacaagaaggtatcacctatccttctttggaacagcgtatggctaacggccgcaccgccattgatgccttgaaaacatataaacaagccgtcaaggacgaagatcagccccttgccgacagcacgttacaagtctttaaagccaactattcggacttcgggtacggctacttgtcttctccatacgatgcgatcccccatgtgccactcgtgttctacagcttccgaatcatggttgggctgggtatgttatttacacttctattcattctttccctgtggtatgcaaagaagagaaaattcgagaaattcaaactcattccttacttggctcttgtctgcgttcccttggcttatatcgcctcccaatgcggttggatcgtggctgaagttggtcgccaaccttgggtcgtacagaacctgatgcccacaaatgtcgccgttaccaaaatagcgtccgactgggtaatgaccacattctggatgtttgccatacttttcaccgtcctgctaattgcagaactgaaaattatgttccaccagataaaaaagggaccggaaaatcattaaaatcataaatcataaatcgcaaatgaatatggaatttcttcaacactattggtggattttaatatcattacttggcggattgctcgtattcctgctgttcgtgcaaggaggacaaacactattatataccattgccaagaccgaagatgaacgtaatctcttggtcaacagtttgggacgtaaatgggaattcacgtttaccacattggtcgtattcggaggtgcattttttgccagttttccgctattctattcaaccagtttcgggggagcttatctcgcttggatggttgtactattctgtttcgtgatacaagccgtttcctacgagtatcgccggaaagccggcaacctgctcggggaaaagacctacaacatatttctgatcattaacggggtcatcggcaccatctgtatcggtgccgttgtcgggtctttcttcacgggtaacccgtttaaactgggagaaatgaacgatgtcacctggatgagcccttggagaggcatcgaggtgctgttcaatgtcgcaaacctctgtctgggtctagccatattcttcttggcccgtacattagcctccctctattttatgaataacatcaaacacgatgtaatctacgaaagaagtaaaaagcaagtattatacaactctatccctttcgttgtacttctacttgccttcctagccatcatattgttgggcaagggttatgcgattatggaagataagagcatccagctcgtcccgtacaaatatttccacaacctactggaaatgcctctgaacacgcttattttactgatcggggttgtcggagttttattcgggatcatcaaatccatcctgaaacctcactggagaaaaggaatctggttctccggaatcggaatcgtcttggctgtaatcgccctgtttatcgtggcaggattcaataacacggcattctacccgtcatacacggatctcaactcgtccttgaccattcataatgcctcatcttctctctacacgttgaaaaccatggcatacgtatcactggcctccccgatcgtgctggcctatatattctacgcttggcgggccctcaacaaaaaacagattgacatacaagatgtgaaagacgaccaccatgcgtattaagacaaaaactaaaagttaaaagataaaagatgaaaactgaaagatgaaagccgggaaacattttccacttttaccttttagtttttaacttttatctttcttcttatatgtaaaaaaagggctgtttccagcccttttttttacatataagaagaattgtcccaacagtgggtacaaagctcctccttcggcaatccgattgccttcacaatatcttccagacgttggaatttcaatgagtccagctgtaaatgctgagccatcacctccaacatcttcttgtatttatccgaatcgggatcggtatacggttttaaaatctcttccgtcaaatcggacgtaccctctaaatcccggatcacccgacgggtaaacaaatcaaaattagaacgggaagaagagaaattcaagaacacgcaaggatataccagcgggggacaagcaatccgcatatgcacttccttcaccccgcattccttcaatttcaccacattatccttcaactgcgttcctcgcacaatcgaatcatccaagaaaagaatccgggcatcccgcgtaaatgcctcgttaggtaataatttcatcttggccactaaatcccgcatggcttgattctgcggcataaaactacggggccacgtgggcgtgtacttcacgaacgggcgcttgtacggcaggcaacgggcattcgagtaaccaatcgcatgaccaactcccgaatcaggtattcccgccacataatccaccttcacgtcatccttttcggcaatagctgctccacaacgataacgggcatcttccacgttaatcccctcgtaataagaagaagggtaaccgtaatacacccacaagaaagagcatatctgtttcttacatcccggagtagtcacttgcgtgatcccatcccgggtaatctgcaaagcttcccgcggttgaatatcccgcacgatcgtgtaccccagattcgtgaacgaagaactctcgctggccactacataaccatgctcattttttcctaggataatcggagtccgaccgtatttatcccgagccgcataaattcccgtctccgtcaggatcaaaaaggagcaagaccccttgaccttgttatacacattctcgattccctccttaaacgtatttccggcattaatcaacatggcgactgcctccgtcgggttcactgtcgaactcgacaattcggcaaaatgcttgcgttccttcagaaactcgtccacaatctcgtccaaattagccaaacgaccaaccaccacgacagcaaaccgtcccaaatgcgaggtcaccgtgatgggctgcgattccatatcactgatcaccccgatccccaagttagacccggcaaaacgatccaattccggttcaaatttattccggaaataggcactctccaaactatggatggaacgattaaattccgtcccgttataaaaagcaagtcccgcacgtttcgttcccagatgagaatggtagtctgtgccgtaaaacacgtcggcaacacaatccttacgagatacacagccaaaaaatccgctcatacttcaatatctttttgtaattatttctcttcaatcttctctttcgcagcctgtaaagccaaatcgaatttcgggtaaatattctcaaccccgacaagctcaccgattcctcccttcaacaaatcctttttcaccgattcgctcactcccgataaaacgatatacgtaccctcgttctttaattggagaatcgtctcccttagattcttcaacccggtagagtccacgaaaggaacatgacgcatacgaataatcagcacatcgtaattcacgcccaagttacgaattgtttcacaatatgtctttgccgacccgaagaaaaacggcccgctaatctcgtatatacccaaaccttttggcaaattcttataattctcaagcacatcactatccatattcgtggcaccgataatctccttcggggcattatccgccatacgcttcataaacaacagggcagccaacacaacaccaatttcaatcgccacggtcagatccaccaacacggtcaagaagaatgtcaccaacaaaatcaccacgtcggacatggaagcccgtaaaatagaacggaatgaccgccattcactcatattataagataccacaatcaggattcccgccagacatgacatcggaatcaaagacgcccatttcccaaagaacaacatgattagcaatagcaccacagcatgggtgattccggcaatcggggtacgtcccccattcttcacgttggttgccgtacgggcaatagctcccgtggcaggaataccaccaaacaaaggagaggcaatattagcaatcccctgggctatcaactctgtattcgaacgatggtgcccactaatcataccgtcagccaccaccgcagacaataacgactcgatagcacctaaaatggctatcgtcatggcaggctgcaagtaatgagacaactgatcccactcgatagacgggaacaccggggtcaaattacatttaatctccccgaactcggaaccgatcgtcgtcaccgcaccttccggcaaaaggaaagccacgataggcgtgaccaccagtatagcgacaaacgaacccggcacccggctcgtgatcttcggcatatacaccgctatcaacacggtcacgaccgtgattcccacggcataccagttcaccgtatccatccccctgaaataagcgccccacttaccgataaaactccccggcacatcagtcagcgtcaatcccaatgcgctggatatttgcgtggagaatatcgtcaaagcgataccggaagtaaaaccgacaatcaacgggtgagggataaacttcagcaaagtccccaaccgcaacataccgaatccgatcatgatcaccccggcaaatatcgttgaaataatcatcccgtccagaccgtaatcatttacaatcccgtagacaataatgataaaagctcccgtgggaccaccgatctgtacccggctaccaccaaaaaacgaaatgagaaacccggccacgatagccgttataatccccttttcaggagaaactcccgaggccacggcaaaagcgattgccaacggtaaggccacgatacctaccacgattccggcaagaatatctttcgataaattcttctttaccgaaccgtctttaattaatccgaataacttcggactaaacaccttttccatactattatacccttaatttaaaaacgcacaaaggtatatattaatttcaaattcagggcttcgaaattaatagaaattaataattccacggattcaatccatcaactcgatgacgattattcgcataccgacttcgacgtttcgaataacctcatcaaatatgaaatacttgattaaagaaatgttttaattcccccttagacacagccccgcatcccacttgtggctgcccctccacgggaacaaacatcaaggtcgggatactccgcacattgaaagccttcaccaactccttctccatatcgctatccaccttgtaaatatcaactttcccctcgtactctcgctgcaattcttccagaatcggggctatggtcttacacgggacacaccagttcgtgtagaaatctatcactaccggacgctctccctcgaatctatacactctgctattctggtagtcaaacactttctgtttaaaactatcctttgtcaaatgttcgatcatagttatatcattacaagttaataaatacatgaatcatacgcactcctctcacaacaagttacaagttcctttccatacctgttcctaaattgcattctttatcgtatctttggaaaaatcattataaaacacgattacacatgaaaattcttggaaatattatctgggtcctgttcggcggtttcttcgtcgcactagaatactttgtatccagcataggtttgtttatcacgatcatcggaattcctttcgggatacaaaccctaaaactcggagtgctggccctctggcctttcggcagtcaggtggtagacatcccgcaaagtagtggctgtctttcctttctcatgaatgtcatctggttcttcatagggggaatatggatattcttgtcccatctccttttcggggtaatcttctgcatcaccatcatcggtatccctttcggcatgcaacatttcaaactggcccgcttggccatcacccccttcggtcacgacgttctataaaaaagcgggccccatccctaaggcccgctcatctgataaaaagctctagacaatcgtccaaagctaaactaaaaattcagtgatcttattaattttaaattttagattgtaaattttaaattccagttacttaaatctcctctcaatttaaaatctaaaatttaaaatctacaactctagattcctttcaacgccttcagcgtcttttccgtttccgggttagacggacgtgtcatattaggatttacaatctttccttccttgtctaacaggataaaacgaggaatacctctgataccgaaagcggtcatgaattcacgatctccaccattgtgtaattgaactccgcccaaaccttgttccttcaccattttctcccaagcagctttatctttatcgcaagaaatacttacgaacacaattttcttcccatgcatctttttctccaactctttcaaatgaggaagctcatactgacaaggtccacaccatgtagcccacacgtcaatatagacatatttacccttcaaatcactcaaggaaacttccttaccatttatatccagatatttaaacgtgggagcttgatccccttcttttaactcttttttctcttgtgcattcactgtaacaaatgacaacaagatcaacatacaggataaataatgctttaatctcataacttttctttgtttattttttattgtaacacaaagctagcgattaaaacccagacccatatcacgtaaaaaaggttttaagatagatttaatacatccccttattttttatccacgaccacccggaaactatcgtccagacgcaagatgccgccaaacgtactaccatcctcatttttaaagccattcagtgacccggttttccctttcaataccaaaacctcgacctgcttctgtgttaattttttcccaaaaaattccatggggataataaagtcacacgattttctatacagactacatccccaggcagcccgtcccttgataatttcgccgttcccacacttcggacatttcaacacaacgggctccgcgggagcttttgctttcttcggggctttctctttcgcagcagtttcttttttagcctcttctgccacctccacggtaatcgctttccggggcgaacacttcaccacgtgtaccagctcgttcaccatcaccttcaactcctccataaaatccgacacgttgtaagtcccctcctcgatcatccgtaattttttctcccattgcccggtcagctcggctgatttcaacaggtcattctgaatcgtatcaatcaattcaatacccgtagcagtggccaccaatcgctttttatccttccggatatatcctcttttcaacaacgtctcaataatccccgcccgggtagatggacgtccgatcccgttctccttcattaaatcccgaagttcctcgtcttccacctgtttcccggcagtctccatcgcacgcaacaaatctgcctccgtgtaatacttcggtggctgcgtctccttctcctgcaattcgggtgtgtgcggtcccttctccccgacttcgtacacaggcaacacgttctcatcactctgcttgttcgatgccgcaggaaatactacccgccaagccgggtcaataatctgttttccggtcgccttgaactcgtttaccccgacttgtgccataactgtcgtattcgcaatctcgcaatccggatagaacaccgcaataaaccgtcgagccaccagatcgtacacccgcttttcatccggggtcatatcatagctgaaaactcctgtcggaataatagcatggtgatccgtgattttcttgtcgttgaacaccttcgaagacttgcgtatcttactcccgttaataatcgggtcgatcaacgtgacatatggttttagtcccttcaaaatcccgggaaccttggggtatatatcgttcggtaaaaaattcgtatctacacggggataagtcgtcaactttttctcgtacagcgactggataaccttcaaggtcgtatccgccgagaaagcaaacttccggttacattccacctgcaacaaagtcaggtcgaacaacttcggcggatgctccatggcctttttacgctccacactcttgatttccaactccaaaggtagaatttcctgcatgaaagcctcggcctcctcctttacagtgaaacgtcctttcgtgtaggagaaccaacctccccggtaatccgtccgcacctcccagtaagtttccggcttgaattgctctatcgctttctgccgatcgacaatcagtgccaacgtcggggtctgtactcgcccgatcgacaacacgttcttcccgttcccgtaacgtaacgtgtaagctctcgtggcattcatccccagcaaccagtctccgatcgcccgggctgacccggcagcgtatagcgtatcaaaatccttcgacgacatcaacttggcaaacccgtcccggatcgcctcttccgtcaacgaagaaatccataaccgcatcaccggagctttacacttcgccttcgtaagcacccagcgctggatcaactccccttcctgccccgcatcaccacagttaatcaccatctccgcccggttgaacaactcctctataatggcaaactgccgtttgattccatcatcatcaatcaacttgatccggaacgatgacggaatcatcggcaacatacttaaattccactgcctccacttttccgtgtactcgtgcggttcctgtaacgaacaaagatgcccgaatgtccacgtcacacaatagtcattcccctcgaaataaccattccgacgtactttggctcccagaacctccgctatctctttcgccacactcggcttttccgctatacaaacacgcattaattgattttagatttaatgattttagattttagattccaaccgcataaagccaacgctttaacgccccctctaactccctctgtgcaaaggggtgccggtgggatagtcctttcattttcaattctccattttcaattatttaaaagctcaactgaatcctcccctgtatcatgctaaacgtctgcttcccgtccactggtgcatgtttatccaaactcaccagactgtaactcatcttcgccgccacgtatttattaaaataatagataccacctatcgaaaaatcattctgttttccccccataatcccggagtccttatcgttcatgttggtgatattatagcgacacaagatttccaagctctttgcccccggagccgtggccataccactcgttttattataaccgtaacgaccattcagcaaggcataccccacttgtgcataccaaccgtcaccgttataattttcgaccgatgccctacgattcacgtgagccattaaatactcggactggaaataccatttatcaagtaccataaccacctcagccccgaacttccactcgttaatcgcctcggtcacctcagccttcaaaaacttctcagggattaaattcgaaggagctcctgccgaatacgtcaatttattctcttccgcctttccttgcaccccaaaacgagaggatacaccaacatgaataatatctttccccttggaataaggacgatacagcactcttcccgaaaaagcgtacccctcgtcatccttctccgtgttatcaatatctttatcactgaacacgcctcccgacacgttcaacacctcacaattatacgtgtaactgattcccaaccgccgacgatcaccgaaagccgttccggtcacggccgccccgttaaacttcatatccgacgtcccgatccggtactccaaactaaacggttcaaaacaatgccctaccttgaacaaattctttccgtcactatactcgatataaacatctttcattgacaccttactcttggcaaaccccagctcaatctttcccgtccaacgttccaaaaaacgtaccaccgttcccaaacgaacatcatacacttccaaagaatttcccaacgcggtcttgtcactgaaaaacactcctccgtcaaacaacgcccgcccaatcaaacgagcctcgaaatctcccttctccgacttcaacgtcaactgtgccgaagcactcattccacaagccaatagcatcaaaatcaaaagcgtatgcctcatcatcaatagtttaaaaggttaatttaattagtttcgattcagaatatctttgcaaaagtacaaaaaaatcgggaatcccgatttttctctataccttgtcctcatactttattaattcaatgagattctttatccgttggaacacattggaacgcattggatcatcttgtccttcacttgctctccgatcgacatcctttctagattctgtttcttctttcatttctatgttgtatctttatccctcgaaccgaaacaatgaaatatggaacaagcaattattgatcaaaccataaaagccctcgaaagaaatcatttcgaagtttaccttgccaacgatcggcaaaaagctagagatattttctttcaagaaatttttgacaaaataaaaccgaccactatttcatggggagattccgaaacgatgaaagccacgggcatcctttccgagatcaaacaacgaccggactgtatccttatccgaactttccaagacggttacagccgggtccaaaaaacatactggcgccgccaagccctccttgccgatttattcgtcacggggaccaatgccctcacccgacaaggccaactcgtcaacgtggacatggtaggtaaccgggtagcaggcatcaccttcggcccggaacacgtcgtcctattcattggcacgaataaaatcacggataacatcgagcaagccatggaacgtattcgcacgatagccgcccctctcaacgctatccgccacccccatttacacactcattgccagacgacacgaacctgcatgaactgccaaagtactgaccgattgtgtaacacgtggaccatcacggaaaaatcactccctcaaaaacggattaaaattatccttatcaatgaatcattaggcttataatcatgaaagattacgcatttgaaatagaaatgaaagtacgagactacgaatgcgacctgcaaggcgtggtcaacaattccaactaccaacactacatggaacacgcccgtcacgaatttttggaaaccaccggaaccagtttttccgccttacacaatcaaggtatcgacgtgatggtctcccgcattgacatttcttacaaacactcactccggggcagcgatcgctttgtcgttcaagttgcctaccaaagagaaggtatcaagctggtattcttcgaggacatctacaaactccccgaaaacattctatgcgccaaaggaagaatcgaggctatttgtctgcaaaacggtaaacttacccgaggagaacttttcgaaacgatatttatcgacaaagtaaagaaaaaataaaggggaggtgtttcagtccctccccttttataacgtctataaaccaaatctttgattctttattttctgcatctgtgccgcataaagaatgaacggaaattcaaattcttggagtcatttcctaattgacaagaacgtcccaatgcctcttcctcgtcaaccgtgacataagaataaggatacggataattatctattttttcagtgctaatcgtgccatcctgatggagagaatacgtcatacttgaagtactctcatcttcgtccacatttccttccgaatctttctcgtagtcaacctccgtgtatgaaacagggaaataagccgatgcttttcctagcatacccactaaccccaacatctggaagtcctccatatcaagaactcttgtttgagttatagaaaattgccctaactcatttttctgatccccgtactcaatcgcacaagtgtaaccatcttcccatttctctccatcctctatctcacttccttcggattcgaccttaatcaagtttccatttttccaagtataagtagttttataggttcctttataagaataactaccgtcctcatccttaccactctcactggaagatatcgtgcaagatgtcaattgccctcccttataagagaaataaacctcgccgcttcctttagaactgccatactcatctttctcgttccacgatgatttaatgcttttgatatacccctcaccggtaaacttcacttcagcctcttcatcatccgagatcagaagccccttgtcataatcaatttcaccaagtacataagaaccgcttttaacttggatgcatcgaccgttttcatcgtacgtgaaaatataaccattgacgttagaaggtaattttccggcatacgttatcaccggaccctgtggcattttgtcatcatcatcactacaagctgtaaataagcatattaccatgactagtgttgtccataacaaatttttcatctttctttctatttaagaattataaaataatctgttcgcaaaattaatcaagcccattaaaaaaaacaaactcataaattctttttttaatactttaattcatattttttgaattatcacgaatcttccctcccctgcctttttacgctacattcaggataatatactatcttacaagttgtgtccgaatcctacataactaatactcgaaatacaaaagataatataaatagaggggaaatacatcataccccaaaatcacataatccattcatatacaccagtcctcgtaataatacccttttactaaagcaataatctcctacatcccatttcacccccttccatcgccctttcatctccctttcgcaatagacaaacaaggaccagaaaagaggtttgcaagcagcatgggagattattacccataaaatacggttacattacccgggcagaacggtaaccgattcaagtatagtcacaaataaaaaagtcccctcccgaaaaggaaggggacacaacacctgtttcagcagaatccgcctactaaacacccactcgctccattatctggtcttaaacgccatactcttcaccttacacaaattcttccattcacttcctttctcttcctcaacgataatatgatccacatcatccacaaccttatacttcttaaccattcctcccgtcgaggccggtttcgacgggtcataaagagcaatgtaaaaataatcacttgacgtctctaccaaaatatccgataaaaacaaggtaatctcgtacccatcaaacgttttcaacagttcacacttcttcctcgcaaaatcgtaaccatacaatttattgcccacggtataataaatcacggacaacatgttacttgccccgaaaaactctgccttatccaagtcaatcacgttatccatttttaccatcaactgttttataatgccgaaattataggaaatccggtaactatacagataaaaatcacttccatcccttaatatcgtgtaagtcgaacccgcccccttatgacaattaagtgtagtcacatattcgtatcccggtttccacgagaaaggatctcccacccggtcagacatatccgcgcagtagccaataggagttccataaccactttgttgatacacgaaatgcccatcccgcttattatacaacacagttgcatatcccctctctttcacactatacccgattttatctcccacggggaaaagatcataatcccccttgtaatgattactcggggatccaaagaaacaagcctgctgtccggacaactccgtataatacaaattaccatccacaagggcagcccggtaatatcccataatctgtacagcctctgtcatcacgcactctccggcagccgatacatcataaaaagaccatttcaaatgtgccccctcgatgggcaacaaggttgaagtactcagcctgtaagtacctttatccgtcccgacatgaatataattcaatgcagcagcaggacgatacggcgggacaaaaacacaagtcggcttaccccattccgacaaatcaacctcttgcaaaatattctttaataaagtcgtgtcctctcctcccgttgacaccatatcaagctgggctcttccgtcatccccttctcccagcacaagccatccctgcgaaaacaaggttgacaactgtaaacttaaacttgaaatcgtggtcaatcccgtggatttatcctgaattttaaaatagacactatacctctgggaaggcaaagtaatcggataaaccaaatccttctctttccccagggtatattgtcccccgatagtcggatcgccacccacggccacccattcatactcgtaattatcgggatcattattaactgttgttgaaatttcaggaaacacccgcaacgtatccacgaaagaatacatccgtaacaccgtgtctccaaaaaagtcatgtttcacggttatctcgttaatcgcacggtaggaataatttcccttgtcatcatagcaactttcaaacaggaaaatccccaataatcctatcagaaaaatcttatacatcattctcataacatttcatttaaaaataaatcatatcagaggccccatcgtcatctcaaactcattacctgctgcatccttatccatcaccgtacgtcctgccgccttttcctctttcaaataccgatcaaaattctgggccaacgctttcgccctgttctggttcatggtttggtaatcttcaaaatcctgcatcgttaaaccaagcacctcgcataccagcttaaatttcgtgggagaaaaagcaccccaataattcacgttccattgcttgggaacgatgacttgatcatttatcccgatcacgtgaacaatcgggttaactactttatccgttgaaccatatatgcttccgaaaggaatccaccttttcaacggtaatttaaaatccgcactctcctccagccgcaccgtcaggtaaatcaccgtgtcaggattttgcattaatttttccgtccatacaatgcggcaagggacttccgcctgtctctcgccggcttttaccacctggctattctcaaacggttcgtaatcttccccctccttggccgtcgtgagagtatccaccacccgaatcgtgaaataacggtcgtgatctaccacgtccccggtaatcctcacccggatcggtaacacggtatctttagccgtgaacatcgcgaaagggattaaagtggtatccacgtattcatactgctccggatcaccatacccggaggccggaggtttctgcatcataaaataaacaccgctctccccctcgtatcccatcatctctgtctcacaagcgtacaagcaggttgtcaggctaatgatcaatatcgctatatatcttcgtttcataatctcatccgtttaattcattattccataccccgtttatctttctcgtcttgaggcaaatcaaacaagtaaaaacttttttccatcgtgatcatgttattgaaatctttgcttgaaggtatttgcgtcctattctgccgtttgtaaaaccagaacaactgtccttctccaataaactccctccggaattccgcctctaccagattcatcaacccgagagcctggttcgccttggcaactccccgtgccgcccgcaatcgattcaagtggtcaaacgcttccgcctcatcgttggaacattccgccacgatcagatacatctcggaaatccgcatgacaggcatgagatacgtgtaccccagactaactttattatcatcaggtccctctgtatcatccacggccatatacttcacgaaatgcttcttttcatttccgtccggatctttcaaggtcatccattgttccgtgtaacgccaatcattcacccgcgtgtcctcctcgtacaaactctcaatattagcatccgtcgggcgtaaaattaccttctctcccaatttgttggaaaacgtggattcgtacacgtccgaccgtttcagattatacaacccgaacaagatttccgttttatacacccggtcccattttgaaagagttgtagccgccgcacgggtgacaaaaggaaaccagttattatcttcctgcgtttccttgatcacttgccgagcatacatcagcgcggtcgccttatcccccgtgtacaacgccagccgggcgatatacgcctttaccgcataataattcaagcgtagggaacgatataccatatcattaggtaatcccggaccttcatccccccaaagcgcaccttttttaatcaccggatcataatccttcaacaactcctctgccgccttgaaatcatcaatcatcaatctcgccacgtccgatgccttcagtaaaggtcttactttcaaatcagaagattccgaataaggcatacactccgtttccggatcaacggaatagatcggtccaaacaccctgaaaacttcaaaatgcaacaatccccgcaacgccagagcttcccctttgatgacatgataatattcactattcagcacctcctttctctcgtcacacgcctcgataatcgtattcacgttgacaagcaacgtgtaaaccttcgaccacaacccggatacttgtccttttttagccgtttggtcaaaagtagataacttttgccacgtctgctcatctttatcacaatcatagtattgcgcaagaatatcaaacgtcttgtaagacaacgtacctccatacaaactggaattcagtaattcaatatacaccccgttcagagcagtcataaacccggcttgagaagagaaaagcgtattttccataatccggtcttccgatcccaaatccaaccaact

SEQ ID NO: 10946 - DNA, 19542 bp, Unknown
  gut microbiota DNA sequence
cagtgcgggcaaaaggataatccgttccccgttcttccttgaaagaagacacccggaaaatatcattcatatatgccctgaaagtaactccttccgccccgattttctttatccacacggcagaagattcgtatcccatggaaatggattcaccggagaacgtgttttccgtcctcacgaaacgggaagacatcggagttgcagaattatcttttattgacttgaattttgccttatctcccggttgtttccaacgatcatgtaacgcccgcttatcctggttataataaatttgctcttccgaaatattctctactttcgaatacaaagccgaagccatcacctctccccctaaacgataccggaagtttaccgaagcagaaaaacctttgtaatagaaggaagaaccaataacaccctccacgtccggacgggaacaccccacaaccacctcatcggctgtcgaatagataaaagtctgggaaccatccttttttctaaacatttccgccccggttgccggatcaattcccaacgagggcacggcccacatatcatcgggactggctccttcatagtaacgaaccaagctctgcgcacttcccaattcattaaactcgttcaatttatcaccaatatcccgatactcggacttggacgttctgaaattcgcattcaacgtccaactcaaatcctgtttctgaatcaccgttccgaaaatactcccgttccatccccaagaaagctgccgcccggcattcgcattaatggaacccacgcccacggacggaggcatcggaacactgatcaaaagaggatcggtatccttgtaataataatccaacgtcacccggatccgattccgcaacatggatatatccaccccgatatttttatccaacgtgcgttgccaatccagatccttgttaccaaactggtcaataatcgcgcttgaaccgaacatattttgcagttccacattatacttataaatcttcatcgcctgataagcgtcaaaattctgattcccggggttacccacggatgccctgatcttgaaattcgtgaaaagtcctaaagacttcataaactcctcgttatgaagattccaagccaatcccacggaccaggttgtcgagaagcgtttatttgccccgaatttagaagtaccgtccgaacgcacgttgaaatccatcaggtagcgattcataaaagaatagttgacattcataaagaaactcgtcgaacgactgcgctccaaagagtaattaggtttctgtccatccgtaaaacccgtggaaaaagccggattcatatgcaggtcatcgttgaaaccgacaacactgtaaccatcccgcttatttttgttctcgctaaaagaccatcctcccactacattcacctgatgtttttccacgaataacttaccgaaagcaatattcaaatccccgttatacgagaatgcctccgaggttgaagccgagaaagaaccctgtttcaatttatccgtttccagataatcaggatgtttgggagatttgaactgctcatcccggctcacgttcttggtaagtccgaccctcgccgtcgccctcaaaaaagaatacatcctccactcgatcgagaaattatcacgcaaagcaatagaattcccgatattcgtattttttattccccacgcgtataacggattctttaacgatcctttgttttgttccgtcccggtatcctccaaccacatgggaatatacccattctccaatctcttccgataatacgggttagctttcgagaattcggaaaaagccactggttctcgttccgtatgagtaacatccatgctaaacttattggcaaataacaatttttcccgacgataagtcaaatcaacattggcactgatgatattccggtcagacccttgcatcacgccattggagttattgtaaccgaatcccaacccgtaacgcatagcatcatcacccccgtcaatataaacgttgtgactgtgattgaataccgtacggagcggttcattcatccaataagtatcaacaccccgctttacctctgccagccgccgattatatttttcagtattggctatattcgagtaactctccaaatccccgtaaagcccggtcaagcgttcaaactccaacttctcggaagcattcatcaaattataggcagaaagatccgcaaattgaatcccgtaattaccattataagaaagacgtaattttcccgcttccggttggaccgtctcgacgacaatcaccccgttggccgctttagacccgtaaatagcagtggaagcagcatctttcaaaatcgtcacgctagccacccggtccatgttcaaattgacaatcgtttccagtgtcgtttcgataccgtccaaaataaacaaaggctgattcgggtcattatcaaattccgtcttcaaaccgaccacactcgtctttccccggatttcaatgtccggcatccggttcgggtccgatccccattgtttactctccagcaccaacatggaaggatccaaacttttcagactctggataacgttctggctcccgatcattttcaaatcttctttcgagtaggtagcaaacgatcccgtgaaactttctttattacgggaatagattccggtcaccaccacttcttgaatcgtctcggaatcttcctccaaggttacattcaatgccctcgtatcctttatcgcaatttcccgtgtcttcatcccgatacacgtgaatgtcagcaccacgccatccaacgaaggcaaggcaagcgtgaacttcccgtcagcatccgaggccgtgcccaacgtggaacctttcaacacgaccgatacccccggaatggtgctgccgtcttggtccgacacgacaccccgaataaccacaccatctgttttttggggaagggcaccccgctttcttaccaccaccgaggagctttcgtaaacgtactcgaacgggcttccttcgaacacacgctttaaaacggcatccaccgtcgccccttccatcgtcaacgtcacgggtgggaacgcggtcatctgcgccttgtcgtaaacaaaattcaaaccagcctgttccctaatctgccgaaaaacctcctgcactcccgccttggtcacccgaacggttactttttgttgttgggctttaccaacaaagggcaacatcagcaaaatcaagcacataagacaaacgtgtctccactgcatttttgctttttcccggatacaatgctcccaaaaaacaaaatacttcttgctttttttcataaatttgtattttaaaattaaaccttactagatgcttccaacatctaggacgagccgggagttgttaccgcaacacccggtttttcattatgtcacaactacatatactcttttgaatctcgttcgcggtcagccactcgaacgacttttaagcgtaaaacttttcagtcataagtttttttcataactttgatcgttgattaatttgtaaaattgattaacaggaggagtgagtattctgtgttttctaggctcgggatacactcctttttctcatcgaactaatgtggcggctcattcatagattatcgctatttcaattttgcccaatcccccaagcaaaaattatacaataaaaaagcgaggattgttatggtctatcgtatctagggcatcgccaaacgcctcgcaacaaatagacaacaatccacgctagtcagcgtgaattaactgcctaatcttgttgcttcaaattggcgatttttagatacagattagaacaaactcacaatattttcatgcggactcttccgcattttatttttcaactcctgcaaatatatgatattatttcataaaatcaaacactttattccttcgtagctatatttacacccattttattttgtacagttccacaccccaagtagaatgtactctcaaatacactcatattttatattttccttgaaaaattcgtcatatattttttgcagaattcaaaaaatgcactacatttgcatccgcaatcaagcaacacgggcgcttagctcagctggttcagagcatctggtttacacccagagggtcgggggttcgaatccctcagcgcccacccattgaacgccacgaggcgacaagaaaatgataaacatcctgtaaaactctaatttacaggatgttttcttttatccatttgactacttccgactctaaaatgccaatcacgttactaacggagtaacctaaaaagtaacctctaactaattttgaaaaaataggttactctttggcaaaaaggtgtcaaaaattggcaaatctaattttctcataaacaaaatattacaagtattttcaaactaaaaatttttgttatgagggacacattttcaattttattttacctcaaaaatgaggactcagcagagaaatccatttattgtagaatttctatttgcggtgtaaaagcccccttttacacgaagttaaaaatcaaaccccaatattgggatcaggcaaccaaacgaggtaagggaagatcgaaagaaatcccacggataaaccttgctttatctaaactcgaaacagaaatcaccgaagcatacgaaaaaatccgagaacgcagaaaaaaggttgacccattctacttacgcgattatttacaaggcaacgttcaagacaaagaaaacgtttctattttaacctactttgaccaattcaacagcgagctagacgaaagagtaaaagccgaagacctaacggatgaaacacgcatcagatatgtcaacacccgtgaaagattaagcaagtttataaaagaaaaataccaaagggacgatctgtatttggacgaaatagatgttcgattcgcacgaagattcagattattcatttgtaccaattacaagtgtaaaaataacacagcacaaaagtacgtgcaaaaattaaaaacagtcatcactgatgcgtggggaaattctttccttgtgtcggacaaacttatacgccacaagttgaaatacgatcataccaaccgaacctatctaacatgggctgaacttaaaagaattatgcaaaaaaagttctactcggaacgtcttgaaaaagtcagggatatgttcgttttcgcttgcttcacgggtatggcttatggagatattagatcccttaccgaggaaaacttcaacctcatgaacgataacaacgagtggatcgacaaagatcggaataaaacgaaagtaaaagctgaaatcttattcagcgatattccgaaactaatcattgaaaaatacaaagatcgaagaattaataaccgactaattcctatcataagcaatcaaaaatgtaatgattacctcaaagaaatcgccgctctttgtaaagtaaacaaaaatttgacgtgccacgtcgcaagacacacatttgcaaccaccgtcactctaacggaaggagtaccgctagaatccatatccaaaatgctgggacacacgaacacggtcacgacacagatatacgcaaaaatcgtaaacgaaaaattacgcaaggatgcaagcgaatggaataaaaagatggtcggaattgaagatgaatttaacctgaaaaatcagtaatcatggacttacaaatatttgttttatcggacagcaaaaataaaataattctgccccaaacgtaccctcccctgaaaaataaaaaaagaaggtgtatcacaccacacaccttctccactctaaaacttttcctatgctaaaaatccaactttgacaattgttcctctaaatctaagctactatgaccagagaaaacaatctttccggctggatcaataaaaaagaacgttggaatcccacgcaaatcatacaacccaggaagttttttactgaattcaggcgaaccccaaaattgcgaccaatgcaatttttcttcttccatggctttcaaccaatcttcttttttctggtcgatagaaatactcacgaatttaaccttattaccgtaactcctatacatttctcgcaaatgcgggaaactggccctgcaaggaccacaccacgatgcccaaaaatcgataagcgtgtacccgtttgagttcaattgagcaagcaacgacactccgttgccttccacgtcactaatttcaccatcttgcaagggagtttctttcacgaagcgagtcgcatcatgcaaatactggcggaaattttttaagccagcacaagtatcttgagtggctgcaaaaagttgtcccaactcgtcaagataagcctgatcatacgtgaatgcggattttttcaatccctccacaatataaagattaacggcaatattagaattatcgcgaataaactttttgccgatttcccggtattctgtcagcaaatcattcaactgacggttatcatccaaggtgagcttttccttttccctaattttgaatatattataacgcaccggtatcgtctgttgctggtaacggcaataaacatcttgggctttcgacccttctactttgtaatttttctctttacgtatatcgtatttccagaaagattccggcaaactgtcaagatgaggcgtggtaaaagtgagtttcccgttttcaacaaagaaatcaatattaacccgacgtcccgactcccattctcctccagaacgttccaaataatcatagttatccaaaactaactcgcaacgcgtgggtacgtccaacttcccgctcaattcaaatttctcgccaataatataacccgtgatcagtttgctacgaccatccagctttttcaacgataccatggtactgtccattgcccctggcaccgtgcctcgcaagacaaaatagtcggcaggttgttgcgtacaggcaacaacacccaataatattaaaaagtaaatttttctcatgttcaattatttatttccttgttcaattactcgacgcatatcatcaaacatccgtttcatacccggcaatcgctcatcatccggtaataccggcaatactttatcgcccaacacgactaaacgacgacacaactcaatgggcatttctcgctggaaacaacttaatgccccgaaatactctgacagatccgacgaactaagattcgtaccttgttcctccattttattcacggtaagttccgctaaccgacttccacacgagctgtaattttccggcacattaaaatcatgtccccaggaaataccctgaaaagcatcagcgtaaaaacgtacagcttgtgaatttccctccggcatcttcttagcaatccaatccgtcaacgcctgcacttcctggttcaccacccaaccggccaatactcgcatttcatctaatcgaggtaaattcaaacgttccacctgactgcacaaatcttcaaaagaaatgctatcgcggatctcaagcccttttatccatttttccagcataccaccgtaacgcgtcaacaaaaagcggtccacctcttcctgtcccgcgttagctcggatttcatcaagatgggcaagcataaattcacacatcggggaatcaaacgtgcaatagttatccgtgtacaaacgccaaaactctttttgaagccgctctttatccgaaaggcgtccccacaattcccggtaaatcccggtagccttatcgcaatcgaaagcatccgccaacaccgcttgataagccatcaacctgacattgctcattcccccccgggcatattcctgttccaacccccaaagattagtcgagtcattcaaccccgcttccacgcaaggaataaaataattcaaatcaccggctcccgtctgcttatgcaggaccgttccatcaggacggataataataaacgtcgggtaagcagcaacccggaatttcttattaagttccacattttcatctttcgtcatatcatacttcacgcaaacgaaacgggaattaaaataatctcccgcctctttccggggaaacacctctgtcagcatccgatggcacgggccacaccagggagtataacaatctacaaacaccaatttatcttcagctttcgcctgttccaacgcctcctcgagagaaatattccgaaaatccactccctcttgagcgacagacacactttgtacaaataagcaaattacaaacaataacaatatccttttcatttaacagcaattaaaaatatcggtacatattctcgttccattattataataacttctcaacggtcaatcgcaaagcatttacatcatgcccgctgaacacgacccgcccgtctggagcgataagcaacaaacgagggatcctggtaatatgataagccctacttacagtaaccagcatgtcattaccatccacgcccaattgagtccaaggcatattttcctgtttaagggctttttcccaatcctccctctttttgtcaagcgacacactgacaaccgccaatcgatcatccccgtagcgtttgtaaagctgttccaccttaggaattgcccaacggcaaggaccacaccacgatgcccagaaatcaaccagtgtataacgatcaggatgcacgaattgcgacaacttcaccttttcccccgtcgtgtttatcaattcgacatctttataaacagcccccttgcacaaagtccgggttatatccgctattttcaagatataaggacgacgcaccgtatcctcgatctgcccgacaacacgagtcaactcttccacctcttccggggcacgcgtgaaaggggtcttcaacaaagtttccgcaatataaagcgtgagcaatgaacgcggatgagcacgcacaaattccattttagctgcatctattgcagcttcggcagcttgcttttgaggatactgctcgtcaaacaaacgattgtactcttccggggtgtaacaattctcccgcaaactcatcatggtcaatgaatcagatgccttttgcgcaactaaattcaagggcagcaacgctttacgatactcgtaaaactcctgttgtaacggactccctttcaagtaatctttcacctctgcggtttccgccataaacagagacgtaaacgacatactatcgagatgaggtactttcaaggtcaactcggaattatcaaggaacaaaaaaatattgcccaccttcacgtcttcaggacgagaaacaatatcctgattactaaataacaattcacaatacatcggggttcgcaccacacccctcaactcaaacgcaccatcccgcacaactccttgcgtaacaacactacaactctcattctccatacaacgaagcatcaccaccatactatcctgcaaacccggaaaacttcctcgcacgacaaatccttggttacgggaagcgcaagcgctgcataaaaacagcgccgcgacaaaaaagaaaaatctattcttcataaaaaacatcttcaaattcatactacttttgagcatcccggcaacaacgcacccgcatcagtatgtccaaaggcgaagtcccgcgatagacagtagattgcgtcgcaaatattttacgaaaccaaaccgtagatacggccagttcattatccttatcttccgttgatgtccaaaaataaccatattcattaacactattcagatgaatatccttatcataagcaccattctgccaagcacaaccggacaattgaagtgcgaatcccgttccttcctctttttgcatcatgagcgtggcgacattgcctcctctccaaccctctttatccgcttctttcaatgacatgcccaatgccttttccaagtttttccaatcttcatccgaggcgacacgccaaccttccgggacgatttcttcgatttcctcccaactgtacaaattgccgtatttctcgaaatccccggctagatctaacggcagatagtcaagtcccaaagttgctacactttgcggatttccctctgaatccaaaaagattcccccgaaagttctctcgtaataaggtgtaccatatctcaagttggaagtcatccattccaaatcaccaattcgaatccactcgtaagcattcccgtcacgctcatccgtaaatgtcccttgggcatccggttgaacgttcggcaacttatcgtcatcactgcacgcgacaagagcagcgcaacagcacataatacatacagctatcaaatattttctcataatcatttgaatttaattcctaatttctcagcctttttctctgccaacggtttcatgatttcgtatttctgcataacctggtaatacattccatacttttccctaaactcttgatctgtcataaataaaattgccttgatataggcacaagcgtcctgaacggcagtcggaagattatccccattggtatcggcaataaaaccatatggatacaaatcttctaaagtggtaactccataccaaaatttcggataatcataatcccacatattaacattcaagaactcgatagcctcacttccttcccagtaatttgtttcacttcccccgaaactaccgaaaataatggcacaacataaatcctgcgcgaactccattggctctacatcaccgaaaagtccctcgatggctatcgccagacatcttgaattcatatcaaacgtttgtgagacccacgttctttcccccgtgtaaaaatcttccacactcaattccatcttattcacgactaaaatcgaataaggcatagttttaatgacatcatacaaatcattaaccaaaaaatcgtacgccttttgttgctgctcctgattcaaatattcgaatctcaacgtatgcccacttttcacggctcccagatcccaatccatggccaacaactccgtgtcgtaataaggttcccccgaagcattcaatcccttgtactcgtgtcgcaaggtatcattgaacaaaagaaagcatccggttttctcgtaaaaatcccgtcttaacttagaggttgcatccgttgcttccggatcaggagcaaaaggattacgggctttactaggtgtcagtttctctttttcacaagagaaaaggcatccagccaatatcatccaaataaaaatattcaatctcatagattccgtttttaaattacatataaccacctaaatatttcaaagcatcttcccaaccgtctttcactcctttgcaccacaagttataattattcgaatacggttcgtaaggacattgatcataaaatgcttcaggactaccctgaccattcaaactgaaacattttcccccaccgaaaaggaatccttctttataaatcgggttgctctccagggaactgtttggaggagtaacttcaggtgtagcaggagccgtataaacacttccctgccgtacaggacgactattacttcccaagctgggttggaaatccaatacctccttcggtaaagccaatgtataagccggatcattttctttcaactcgtaactccacgtttccagtggcacataagcaaaaactctactatcatatttatatttcgtgtaagtatgcatgatagtcttggtataaggatatttttcccgcacggtataacgccgcaaatcaaaccaacggtgtccgtccaggcaaagttcccgttgacgctccagacgaatcaaatcgaccaacgcttgtccactttccgtgataggtcgactaacaagaagacgatggtctctcaacgttttcagtaatgaacgtgcctctgtttcttccccggcaagagcagctgcttccgccccgttcaaataagcttctgccgtacggaacaaaaagttatcggaaagattccggggggaagtaacccagcccagcaccttacggaaagtccacgcctcggtataaggaatagaaagcctatcccctttgtaacctacagtatccttactgatgtaaaaacgggttctcagatcattctttccttcgtcatcaaaagctttcaccaaatcatccgaaatcacataaccgggacaatttttccaaatattattcgacataccccgaaacgtttggatagaatacgccaatacatatcctcccatggaaaaaataatttccggagaggactcctcaagcacctcttctccagagaacgattttaaatctaacaggttaccatttacattcaatgtcttctgcgcgtacgccaaagcgtctttccaattctgcatgtaaaggaacaccctgctcttcaagagataaaccgccgcaatgtccgccctatacgggaaatttttctttgcggtttgactcaaacactcttcggcaagtttcaaatctttcagaatctgggaatacacctcctccacggtagcgcaagtataatctttatcttctactatttgggacaatttaagaggcactcccggggaagagagattgtccgcacaataaggtttcccgtaaagattaaccaattggaaataatacaaagcacgcaaaaaagcggactcacctttaatacgcacgatttccaatttttctctatcggattccgctacctgtttgcctatttctgtcaaaatcgaattgcaggcattgatggatatataggcttgtttccaatcacgattttcctccacgtgttgacctccttcaaacttcaatcccaccacctgttgccacgtgtgccaaccaaacattttttcctgcaaacccgcgggatcatactcgtgaataggaatatacttggatagttcatccgacatataatggacacattgaaagtattcgttttcaattacaccctggcttgttatacgggcataaggcaaatatccctcgcccaacaagatttcatccaaatcttcataactttgtatttttgccaaatcctgggaatactcttccaagaaaccggaacacccccccaaaagcaaagcgaaactaagtatattaattatttttttcataaaccgctcgtcttaaaatgaaacattcaaacctacagaataagtcggccgttcgctcaactgaatggtagagaaaccactctgcgtgggagtctgaccttttagttctttagctgaaatcgtgaatagattcatggctgaaaccgttaaagccaaacgagatacgcgcaaacgactcaggattttttcgtcaaactcatacgtcaaactcaaattggaacacttcaagtaatttccgctcactacccgatgatttccataatcatacatatcccaagacgtcgaggcaataggcggcatctccttgtatttaggattactgctccaatggcgttcatatttcccgtaagctggattggaaagagaaataattgcaggaatatcagtacgaagttcatccccgggatattgccaacgcttcaacaaatctttgctgacattattctcggggtatattccccgtacatccataaccgcatcggccccgttatacatgctgaacaaacggactttgttacctaaactataagcaaatacgccactaaaatggatattcttccaacggacactagtattcaagttcccggacatggtaggatcgcgtctccctgaagcctgtaggatacgggtgtaaaaatcatatttattcaatttctgtaaaacagttttattatcccctccgtcatcaaatataggaccgccgtccaccgggctcaaacccaagaacttgaaagaatagaacgtaccgacggctttccctttcacaagagcccttccatccaagaaatcttccttttcatactggtcggcggcaggattactttccaacttattgaacgtcctagagaacgaagttgacaacgaccagcggaaatcttcattgttaatcggcgaaactgtcaatgacacgctatatccatgattatccaaatcccctccatttacaatataagtgctattacgaactccattcatggaagcaatcgtcttattcatgaaggcattttccgtgtgtttccagtaataggatgcctccacctgcaatttcgacttgaacagtgaaaaatccaaccccaagttatacgacgtagtcttctcccacttcaaatctggatttggataacgttctatcgtggaaatgtattcggaaaaatggtcattcaatgcgcctttcttgataatcattatcggggactggtctgtcggcatattaccctggtagccgaaagaagctttcaaagaaaggaaatcaagccagtcgtattgcatccacgaatgttcggcaagattccaattggcagaagccgaccagataggcaaaagtttgtcgttactctggtctccgaacttattcgaaccatcgactcgggcattcgcgttaaccgtaaaataattaaagtagctatatgacacggatagatatgccgaaagcgtgtttcccttcgtatctctcaacgtgggcgtattttccgacagccattccacgtaagcaggataaactgataaatcgacatctttcacgaaactcataccacgatctttgaaataaccgcgcatcacgctagtgaacgattttacacgagaagcgttcgcttcaaaaccggcactcccggaaatattgtgctgctgttcctcaccgaaatacttgctggcgttcaattgcaaacgaaccgtataatttcggttattcgattccgagcgactcaattcacctccatacggaagggtacacccggttccatctcctttctctgcctgaacaccgttttccgtttttcgtaaacaagcggcatgatagcttttttcaccccaccacccttctatagtcgtgtgggaagccgtgtaagccacgatggcattggcattcaaccaatccgtaaaccggaattgcaaattaacattggcagatacgctcgacccctcttggtcgtaagaactattgtccaattcatttaagatattataattgaaaaaggtattgagcaacacatcgtcagccttctttttataataaaaatattctccattatcatcaaaagcgggaatcgcccggctagtcctgtaagcgtactgcatcggagccaactcctcttgataataagcccggccgctcacgtttccggtcaacccgaaggatgccgtcaaccaagaagccaaattggtattaagattcagattcgccgtgtaacgctcgttgtggtcacccttgatcacgtcattatcccgggtataccccaaagacgcgtaataacgggctgtttccgaccctccggaaaggctcaaggtatggttgtgcgaaaaactgtcttctgtcaacaagtcgaaccaatccgtattggtcgtttccaatttcgcaatttgcatgtcgaactccgcttgagaaatctctttggaatacagcttctgcaaccaatactcgtaaccgatgatcgtcatatttttgggatactcgtaatgcaaagccgtcaaatcccgggagaactgaatacgttctttggaattcatcacattgacggaacggtcggaataacgcggacgctgacgcatagtgaccgtggtattataactgataaccggcttgccgacatgtccctttttagtcgtcaccacgataaccccgttagcggcacgggttccgtaaagagcggtcgccgctgcatctttcaagacgtctatacgttcgatatcttgcggattgataccggcaatagcgtttccgatacggttgatataatccggatcattcaattcctcgggagaaatatccaccgggtcctgcatgacaataccgtcaagcacccacaacggttcgcggttaccgataagcgtggaagtccccctgattcgcaatttaggcaccacgccgacttcccctgaatttaacgagaacatcatatccgggatacgaccttgcaacatctggtcgatggaagaagccccctggatatacaaatctttcatcttcacggtggtgacggcactcgtgttcttgcgtctatcgatattttgataaccggtaatcaccacctcttctatctgagccgcttcctcgtgcatgatcacccgaatactgtcattcgactggttgaaagccacacgctcgtcacggaatccgataaaagaaaaatcaagcaccccctttttctcgactaactcgagagagaacttacctgcaccatccgtggcagtgccaatagtcgtgccggctacccttaccgtaactcccggtaatggatttttatgctcatcatacacgactcccttcaagcggatccctttcacctggggaagttccttactctcgtaaatcacgattatctgaccgacatttcgccaacaatacttgtctcccaaaatgcgtttcaacacatcctccacacccattgtcaatgccgggaattgcaccatccgcttcacgtcaagatgatcgtcactgtaaaaaatatcatacttcaactgagtcgttatcacatcaaacacttgctccacactcaactccttttgctggaatgtcaccttccctacttgtgcaaaagaactcgcctgcacgtgcaacacacacacacacacgaaaaagccaattagtttcataggcaaaagaattttttttatcccacttcgacaatggaatagtcctacatcatcattttttttcatagctttgtaaattattattattgatctcctctatcaatgaggaaccacaaggaataggagccgcaatctcctattcttttttccacctcaccgataatatacttacttttttttgctcactattatcgttttaccattcaactcaaaacacacgtcggaagtcatctccaaaaactccagcatctcccccaaaggtctgtatttgttaatcacaccggaaaaacgccgttgccgaatcccttcatcacgatacaacacatcaaaatcataccaacgttgcaatcttctcaccagctcctcaaaggtataggctttgaaataaaactttccccccacccaagacgtgtacaattccgggttcacctccctcaactcgcattgtccgctatccgtgtcgatacaaagttgttcacatggcgacatccggatctcattcccgattccccccactgctatcgcaccctccacgagagtcgtgtaccatgtcttatcaccggaataggcactgacattgaaactcgtgcccaatacccggatacaatatttatccacatgcacgaggaaaggcttcagcgaatcctttgccacctggaaataggcttctccatccaagtatacctcccgtttatcccgggtaaactcttcggggaaacgcaacgaggactctgcattcatccataccaaagttccatccgacaactccagcgtatactcgccccctttaggaacgacaaaagtattcatcccgggcctcttcaccacggctcgctctgtcacctgataacgtacgcgggtttttgccgtgtcattcgtgataacgacaccttccgtcttcgaggcatacacctcttcacgagcgttaacttgtaaccgctccccgttagccaatatcaactcggcatgtgccaccccgggaacaaacgacgttaacacaagatcttttttatccagtgcacgctcctgccacatccacaccccagcagcaactcccaccccgatcacgataaccgcaacaaacctcttgatagattcaattcttcgaaatactccgcgaggcttaactttcctccaccctctctctatgtcatactgccggcactgtacaccctgcatcgcttgtcgaattttaaacaacagctcgaattgccgtttatcttccgtgttcagcggatgagcgtctttatccgaatccgtatccttgttgcgccacaattcggtcaatcgttcccacctatctgttgaaaaatcgttcataacatctttgtttttatacacgacaaccaatagtcaaaaaaaggtgagtcaaaaataaacttttttacaaaaatatcatttatccattgatttacaggcgataaaaaataaaataggagaagtattttccccaactcgagcacgaatatctttataagctttcattacatgcgatttcactgtgttgaccgatatacctaactcgttcgcgatatccttgtatttctttccctccagacaactcatcgtgaatacgacacggcactggatcggcaattcctgcaaaaccttcttgatttgctcaatctgttgcatctcctcctccgagtaatccgaacgttgcaagccctcgataaactccgtcaacaaagccccgtgtttacgttccaccattttatgcttcaacacattcaaagccctgaaacgcactgaagtaaacagataagatttcacggaatcctgtacctctatttccacacgacttctccatatatgcatgaaaagatcttgcacaacatcctctgcttccgcctgctccccgagaatcattgcggcataatcacacaacggtacataaaacatccgaaacactcgctcaaacgcccgttgatctccgctcttaatcgcagaaaaaactttctctatgctctcatgtctatcctccatgcagacaaatatataaagtttcttccaaatgctatccatatcaaattaaaaattgtacacgtacaattatcgctaaaacaaagagggtgtgccaaaacactctctttatgataggagatcgctatatagctaaactttccgatgaagtggctatgtagcgattttcatttgtttatagcttaaaaagactatagtattgagtttgagtcgtaaaatccactctaacaagtgctttattagtgtatgtaagtcgttacatcctcccttcagaagcattttgcacaattttttgatgttaaatgcgactacaaagaaggaaaagtccatggcaatcttgtcctttccaaaatgacggaaacgacgatatgccatattatatttgatttgtccgaagacagactcgggttcaatacatcgtctgcccctatgcctgagtccttcttcagaagtcaataagtctgctactttcttcttataggcattcagtttgtggtttacttctataacacgattccccgtagctttaaagcattgtccgcgtaaaggacatccggaacagttctttgcccgataacgtgcggattccgtaatatatccgctgtctgtttttctatgttttgttcctatccgttccatatgttgccccatgggacagacgtaaaagtcctgttctttattataatacattccttcggtgctaaaaggatttggagcataatgctttctgtgctctatatggaaacggttgtatttgacgtaagcttccatattatcttcttccatgtaccgatagttctcttcagctccataacctgaatcagctaggctcacgtgaaaaataaggtggagttcgttttcttcttgttttgaatttcattcttttcatgcaaaaatcttagcgactctaaagagaaaaaatttaatgtcaagcacgcccctgaattgagccctgaagtctttgagcttggcgttgaatgcctcggcggaagcgtttgtactcctgttgttgaaaaagttcaatatcctggtcgagtgcgcgaacacggaagc

SEQ ID NO: 10947 - DNA, 490 bp, Unknown
  gut microbiota DNA sequence
cagatacggggaatgctctccgccaccccgaatgtgaaccactacctgtgtttcgacaacgacagtgccgggcgcgagtttgtaaataaattccggctcatcgcaaaatccatgcacatcaatccggaacagataagagaaatccccttgatgccctgttacaaggactggaacgatgccctgcttggcaagacgagcgaggaataccttgacagcatcaaagatgcggttattcctttgagtgcgccactcggtacaaaaggaagcacagccggcgaagaagaagtaaacgaacaatccaccatccacagataagagccatgcagaacagacagctatacagagacatttcgcttcgtccgaaaaccacgcagttcttcattgatgagctgcctttgttgtttgtggctataacaggcttggtctatggcggtatggatgacgcgccccttggctctatcgccaccctctttgccgtgcttctttccct

SEQ ID NO: 10948 - DNA, 224 bp, Unknown
  gut microbiota DNA sequence
acaaggcccgggaacgtattcaccgcggcatgctgatccgcgattactagcaattccgacttcatgcaggcgggttgcagcctgcaatctgaactgggacagcttttagggatttgctccacctcgcggttttgcttccctctgtatgactgccattgtagtacgtgtgtagcccaggtcataaggggcatgatgatttgacgtcgtccccaccttcctccgtt

SEQ ID NO: 10949 - DNA, 148 bp, Unknown
  gut microbiota DNA sequence
ggaacataacgacgtgagcaacggttatcgtgatcgtcgagtgtgctatgaccgtaaagtgtttgagcttcgggttccgcgtagtcgtaacagcaatttttacccgatgttactaggtgtgttgaaagaccaagaagaagaagcccaa

SEQ ID NO: 10950 - DNA, 613 bp, Unknown
  gut microbiota DNA sequence
cggggatcgcttgacggttgtcggtccggaggctgccgttacgaacgtggcaaaggtgttgggtaattctttgcgtcgtttgcgtgaaccgaatctggtaccgatatttttaggtatatttttggggattttgttggggagcattccgtttacattccctggtatacctcaaccggtaaagttagggctggcggggggaccgttgattatttctattttgatcagccgtttcggtccccaatacggtttggtgacgtacacgacgatgagtgccaatctgatgttgcgggaagtgggaatcgccctgttccttgcgagtgttgggttgggtgcgggagatgggtttgtggagaccatcattgatggaggtggttatgcctggattggttacggttttattattaccgtggttcctttgattattatcgggattattgcccgtacaatatataaagtgaattatttcacgttgatggggttgatggccgggagtatgaccgacccgccagcattggcttattccaatggtatcgtggggaatgatgctcctgcagtaagttacgccacggtttaccctcttaccatgtttttgagggtgttgacggcacagatg

SEQ ID NO: 10951 - DNA, 2806 bp, Unknown
  gut microbiota DNA sequence
cccgaattctacttaatgattgaggtgtgatgttcaggtaggaagcgatttcttgatgctttaaacggttataaaatgatgcccccaccgattacccgatctttgcgataaaagacagccggttgtccgggagcaacggcccacgcgggagaggagagttgtacgtgtaatgtttgatcggggtggaaggatagctgtgcgaatccttccgggttcagcccgataccccggactttaacttcgatgtcttgtgaatgaatctcttcgggattaattaaatgaatctgaccgagacgaaaagtcgttcggtataagcttgctttgtcccccacgacaatttggttcgtggacggggataggtgtgaaacatatcgtggcgtttgtcctttgaaagggattcctctcttttgccccacggtgtaattcactatcccggaatgttctcctacgagatttccggattcgtccacgatttgcccgggtgtgaagcaggaggccgtgtcgggttgtctggcgatgaaatccctgtagtctcctttttcaaggaaacagatactcatgctttctcgtttctcagccaggcgggtgaacccgtgttcttttgccatttcctttacctgtgttttcgtgtaatctcctaacggggtgatggctcgggatagtatctcttccggtacgccccataagaagtacgattggtccttattcgggtcaactcctttatggacgtaatagtggttcgcaaaaggtagaacccgaatgtagtgtcccgtggcgacatggtgtacttttagttcgtttgccaggtctcgaagtaaattccatttgataaagctgttgcacgtggcgcacgggttaggggtaattcctgagaggtagccttggatgaagggttggactacttgttcttggaagagttgcctgccatttaaccggtagagtttgatgcccgtttgtttacacaattccttgacttccggttcttgcgaggagccggtctgtgattcccataattgtaggtggacaccaataacttcaaaaccctgttgctgtaacaagagtgccgtaacgaaactatccacgcctccactgagaccaactacaactttttccatgttcctttttattgaggtcggaggacaaaaatacggtttaattttaaaattgtcatggggttttgtattttgttggatgaatttgttgcttgaacccctgatacttgtgggagaacaaacatttttgaggtaatattttttacgtgtagacccgggtggaacttgtttttctcgtttaaattaccttaatttgcagcacgaaaaacgggagtggctcagttggtagagcatcggtctccaaaaccgagggtcgggagttcgaacctctcctcccgtgctgaaagaggttggataaaaacaacctcttttttatttatgtgtagataaatgtttatatgacgaagttggtaatttttgatttggatggaacattgttgaattctttacaggatttggcgatgagtacgaattatgctttacggcaacatgggtatccgacacatgaattgcctgcttttcgttatttcgtggggaatggaatagataagttgctcgagcgggctctgccggaggctgaacggtcacacgagaatatgctgaagattcggggagatttcatggcttattatgccgagcataaggctgattttacggctccttatgatggaatttgtgaattactgaagacgctgaagcgtcattatctattgttagccgtggcgtccaataaatatcatgcggccacgcgggagctgattccggaatactttggcgagggactttttgatttcgtttatggtcaacgggaggggattcccgtgaaacctgatcccacgatagtcttcgatattatgaaagaggcgggagtcacgaaagaggaggtcctttacgtgggagattccggcgtggatatgcaaacggcagtaaatagtggtgtaacttcgatcggggtgacatggggattccgggatcgggaagagttgttggcaaacggggcacaatatatagctgatgagccttatgagattatgaagtgggttcgtttgtaatttaaatttccttcttctgtaagtgaattccctcaatctattttagatgtggtaattttaaattggaatttatatactaatttgcagtgaaatttactcctgtgatattactcaaatttaacccagataaaggagtaatttaacccaaataatctcactctcacagagattattcgaggcttactcgaagcttaatcatcccgtaatgtgtgagcttcgaataagcatcgaatgatcttcgaataagtgagattatttctctaggatttccgtgggatttcccttagtttttattagaagttgtttccgctgtttgtatcgaactctgttaaataattacccaagtttacaagatttttcgggtgtattaaaattgtagaaatatgaattgaggataaaaaatgaagtgaaagttgtgggaatgaaaaaaagtattcatatatttgtcgtaatgaaaataatgggtaggagagcctaccttgaatatatttcgtgaatttgttgaaatcttagttcaaaaatcgctaaattattgcatacaagatcaacaaatagttcacgcagagtagcgtggactgttgtttgtttgtatgcgggtgtttagcgataccttgaactagataaattaacggtccccgcttttttattgtataatttttgcttttgggggattggggtaaaactaaaatttacactatgaat

SEQ ID NO: 10952 - DNA, 1154 bp, Unknown
  gut microbiota DNA sequence
aacgaaaccaatcgttgatttgcgggttaaaccctcgggatgtaccaggtaaagcaagttgttacccgagtacaccaggggaccgcgataataagtcaaagaactccccacccgtgtcgccagcttctcgccagccgaagtgtaaatataagaaactttttcgttacctagacacacttcttccggtaaattcaagatattataactgatactcgctcctcgaagaccgtcaacggtcatgtttccaccggcatcataagcgtacgatgatccgttatttatcttgcttacctggttaccgtcataagtgtaagacaatgacgaggcgactccacttgaactcgtgcgggttagcgaggtcaggttcccgttcagatcgtacgtgatgtctttctcggcgaaactcgaatgggcattccaggtcgtacccgacttcttgtaaagatacgccccggttaactggcttgaagaatcgtaattataactatacaagtcggtgacattactaccgtttccccacttgacataactcacgttaccgttgtaacggggagtgaccttacccgacaacccggtctcgacatgctcgaatcccacctcgtacgagaaatttcttgaacgggctgcaacttgccgcccggcgatgtcatacgtgtaggttgtcgtgtccaagtcgttatgaagcattttacgggaaacccgacccaggtcgtcgtactcgtaactcgatagcgtcactagtccattagcgttatcgcccgtcacttgttgttttacacgagttaaacgtccaagattgtcatactccaaataccggttatactcgttgacaacgctcccgatcgtctgcttcaccttgatccgggtcacgtcgccgccaaaatcatgaaggttagacgtgatctccactcccgaggggtagagctgtttaacggtctggatagcgttgtatttcttgtcaaaataagtaaccgttttcaaccacgtgttaccggtgattcccaacaccttgtttttaactcccgtgaccaaacctttcacccgctcggatttctccgctcccagagattccgacatggaaaatgacatatcactggctccggcccacgcgtaatcatcataataggtgattgtcaggcaagcgttctcgtccg

SEQ ID NO: 10953 - DNA, 719 bp, Unknown
  gut microbiota DNA sequence
gtttgccactccgccatatggcatgatatctccattggcatccagcataacagcaaaatattttgtttccggatcctgcattttcatagtgatctcaaatggtgttttcgtaatggagagaacaccgtctccattttcatctaccacatttacatcctttttaaccgtatcggaagtatttttctctacatctacgctgaacttccagtcacccttcagtgtccatgagttatatctgttattaccttcatttgcctcaggataccgttcaaaatactcattccacatctcagtgaaaaactgatgttccagattcttctgctcttctgtcagactctcataatctgcatcgtctgtgctgattccatgctctgccattttctgattatattcatcccgcagatcctgagggatatccggagtggtatcctgatcatccggaagagtacccacaatatctttcagatccagctccatggtaaaccggtcaggtactttgatgtctttgacataatcactgattgccggacctcccacctgaggaagcttctcatcactgtattcatccattcccagtgcctgggctagcttatcaaaactaaagtcctcagaatctacatcaatccctttttctttgaaaaatgcgttacgcacctcataaaattttgtccatcctgcatcatccactgtcatatcttccacaggaatacgcaaaactc

SEQ ID NO: 10954 - DNA, 598 bp, Unknown
  gut microbiota DNA sequence
ctcataactttgatcgttaattaattgataaaattgatttacacaagggaggatatccaacgtttctcaggcatagaataccccctcttttatttttccgttccctctttcaacgtgtttaatgttagttgcttcaaccttcccactcccccacccaacaaatcttccgggtaataaaaattcattacctcctccaaaaccttcaaatactgccgattataaatataaaaaagagtaatcaaatctttcacacccattaactgacaaatgaactgactgtaagaatccaaacgtacactcatccgatgtttctttctcttctcaccttctttttccacaaaataggacccgaatacctcgtataattccacataatgcattcccaaatcacaatgatacaataaacgcagtaacttattcatccttttctgagttctatacaacatctgtaacttctccccttccgaagtttcttcttttatcgaaggacaaagaattattgcttcacgcaataagaatcttttcaattcctcattgtcgataagttcttgattttctttcattttttaatcattaattaggttattatcattaagca

SEQ ID NO: 10955 - DNA, 601 bp, Unknown
  gut microbiota DNA sequence
aggtgatgtgtatctgcttgcaaaagagattttaaaggataggatggaacatcatgaggaagtttacttgatcttgttaaatcaagcctcaaaagtcttgggtgtggctctagtaagcaggggaagtgtcaacaaaacagttgtggatataaaaattatattccagcatgtaatcctctccaactcttccagaatcatattatttcacaatcatccttctggaaattgcaagcctagcaaagctgatgatgaattgaccaaaaacataactcaattatcatctttagcaggagttgattttatagatcacctcattgtgagtgatgatgattattacagctattcaaatgaaggcaggtatgatgtgctaaaatcacaatcaaagatgaatgatctatccccttttttggaaaaagaagagattgttttacctaatcatttataatacaacaaaatacatgaaataaggcctcaaatctttgatttaagccactttctctgttttaccaatagagaatatcaataagaaatgatattgtcttaaaatcaatttatagggtattatttagaatctatcaaaataatctcaaaatattctttt

SEQ ID NO: 10956 - DNA, 447 bp, Unknown
  gut microbiota DNA sequence
cctccgatgccgaaatatgggaattataaaaaataatcgtaaatttgcgggactacaagtgacagtacacctctttaacgttggtttcataaatacgtacagcacttgtaacccgcaaatttcatgttatacgaatatggacttcagtatcaatataaaagaaatattcaccgcctttatggtacttttcgccgtgatcgacatcacgggatcaactcctattattatcgggttgaatgatgcaggaaaaaaagtcagtgctgaaaaagccgcaggaatatctctcgttatatttatagcatttcttttcgcgggagacggattattgaaattattcaacatcgatatttcctcttttgcccttgccggggcattagtgcttttcgtactcgccatagaaatgacctttagtatcgagattttcagaaatgatggcccggaaggttc

SEQ ID NO: 10957 - DNA, 270 bp, Unknown
  gut microbiota DNA sequence
cgggacgagtccgtgagcaatgaagcctattacacggttttgggagtgaaagaagaccgcacaagggaagttttaaccgtggtaaactttcccacggaaagcgcgaccaattggaaggatgtttttgaaggtctcaaagaaagaggggttgctgtcgtggatctgctggtatgtgacgggttatccggtattgaaaacacgctggccgatactttcccccaagcggatttgcagctgtgtaccgttcatctgaaaaggaatatcgtgaat

SEQ ID NO: 10958 - DNA, 157 bp, Unknown
  gut microbiota DNA sequence
acgctggccgatactttcccccaagcggatttgcagctgtgtaccgttcatctgaaaaggaatatcgtgaataaggtcaagcccggggataagaagcaggttatggaggaactcaaacaaatctgctctcctgaccaatgggacattaccccggaaa

SEQ ID NO: 10959 - DNA, 166 bp, Unknown
  gut microbiota DNA sequence
tcgatttacaactgaaatccggtgtggcctggatagcgaacaacaactttgacggtgtggccacttgctgcacgagccagtataactggcaggcgaatctctctgttggggtggtgtggaagatcggtaacaacaagaagaaagagaacctgatgtacgcggctgc

SEQ ID NO: 10960 - DNA, 181 bp, Unknown
  gut microbiota DNA sequence
acgacgacgaacgtgaaggtaaactgcccgaccacgtaacgggaaatcctggatagaagtcgggaccgtgaaacccttggataaaacaccttgaccgctatactcggcagggggtatatttttctcgtcaaggtatatatcaattcgagcactggtagtgcacaccttcactacctcgaaa

SEQ ID NO: 10961 - DNA, 193 bp, Unknown
  gut microbiota DNA sequence
tttccggcgtgatgtcccattggtcaggagagcagatttgtttgagttcctccataacctgcttcttatccctgggcttgaccttattcacgatattccttttcagatgaacggtacacaactgcaaatccgcttgggggaaagtatcggccagcgtattttcaataccggataacccgtcacataccagcag

SEQ ID NO: 10962 - DNA, 348 bp, Unknown
  gut microbiota DNA sequence
aatctctttagcggcgggtaactcttttgccacctttgtatgaactccttaaatacaccgaatgccttttccggggtaatgtcccattggtcaggagagcagatttgtttgagttcctccataacctgtttcttatcccttggcttgactttattcacgatattccttttcagatgaacggtacacaactgcagatccgcttttggaaaagtatcggccagcgtgttttcaataccggataacccgtcacataccaacaggtccaccacggctacacctctttctttgagaccttcaaaaacatccttccaattggtcgcgctttccgtgggaaagtttaccacggtt

SEQ ID NO: 10963 - DNA, 235 bp, Unknown
  gut microbiota DNA sequence
atccacgacagcaacccctctttctttgagatcttcaaaaacatccttccaattggtcgcgctttccgtgggaaagtttaccacggttaaaacttcccttgcgcggtcttctttcactcccaaaaccgtgtaataggcttcattgctcacggactcgtcccgacgggtgaggacatacgtggcatcgatataaagaatggggtaacgcttctcaagtttacgccccagccacgcg

SEQ ID NO: 10964 - DNA, 204 bp, Unknown
  gut microbiota DNA sequence
tcctaacggggaggatatcgtgttaaccatcagcaaagaggtgaccgtcaccgtcgcgacccggttgatcgatttgaagatcacggttcccgattggacgggagcccgcaagatcttcacgaaaagtatcaggttacagggtgacgagatcttgcttgccgcccttgatatcgtgggaatcgttgatcccacgggtatagcgga

SEQ ID NO: 10965 - DNA, 165 bp, Unknown
  gut microbiota DNA sequence
gtatgaagagtttgatcctggctcaggatgaacgctagcgacaggcttaacacatgcaagtcgaggggcagcggggagtagcaatacttcgccggcgaccggcgcacgggtgagtaacacgtgtgcaaccaaccccgtaccgggagataacccgcggaaacgtgg

SEQ ID NO: 10966 - DNA, 384 bp, Unknown
  gut microbiota DNA sequence
ccttgacatacattgattacgtacttccagttcatttcaaccaagaagattttcgcttttaaacttttcaccatatatttgtgtggataaaattcctgacatgagcgactctattaacggtatagatacatttaaagaactgtacacggattattttcaagccgtgtggggattctgcaatacctatctaaaagacagggaacaagccatggacgccacgcaggagacatttttcaaattgtacgaacgcttggatgattcctacaccaaacgaaatgcagttgctttcatttatatcacggcaaaaaatatctgcatggacatcttgagacggaataaatttaagaccgaagattcagaactattaaaggatgaattgccctc

SEQ ID NO: 10967 - DNA, 292 bp, Unknown
  gut microbiota DNA sequence
tcatctccgtacctgccaagtggatcatgacagcaaggcaatacgtgctgaatatctatactgaaaaccgggcttatgcaagacctttcaaaactggattcggataaagtccgttccttatggttttaatctgcgtattgcctcaagtcgcattgtggggtaaggggaaggtatgcacaaatcggacaaaattcacgctcatactatcatgatgcatagtgttcaagctctttactgcaattgagattgccattgagattgcttgcggattttaggtttatcaacaatcaag

SEQ ID NO: 10968 - DNA, 145 bp, Unknown
  gut microbiota DNA sequence
tccacgttggataacgacgtgaacctgggactggggggagatttggccttgcgttaccgggccggcaagcatatcgatttacaactgaaatccggtgtggcctggatagcgaacaacaactttgacggtgtggccacttgctgca

SEQ ID NO: 10969 - DNA, 165 bp, Unknown
  gut microbiota DNA sequence
gtatgaagagtttgatcctggctcaggatgaacgctagcgacaggcttaacacatgcaagtcgaggggcagcacggtgtagcaatacactggtggcgaccggcgcacgggtgagtaacacgtgtgcaaccaaccccgtaccgggagataacccgcggaaacgtgg

SEQ ID NO: 10970 - DNA, 313 bp, Unknown
  gut microbiota DNA sequence
ctggatacctccacggcctttacaccctcgatgatggcaacgagggttcccttgccgccgtgaccgtccttgttggtaacgatcgtgtataactcgccacgagaaagggagctctcgtcgatactcaagcgagggcccaggttccccgggaagagcaaccacttgtccgcgtgggagcgtggttcccacgacgagtaatcgcttaaatgtttcttgtattgctgtaccagtaagtccccgttgacgtgatagaacttctccaggctcttgccgctgatcgggtaattatccaagtataccttttaaaaaagac

SEQ ID NO: 10971 - DNA, 145 bp, Unknown
  gut microbiota DNA sequence
caaggacggtcacggcggcaagggaaccctcgttgccatcatcgagggtgtaaaggccgtggaggtatccagaatcttgaggaagctcccccgtcaagcccgccaccgggtgctggagattactcttgacatgtccagcaccatg

SEQ ID NO: 10972 - DNA, 19057 bp, Unknown
  gut microbiota DNA sequence
tgatgtataacggtctatccggtttgttgaaaggttttttcttgaaagtggacgagcatatcaaattagccgatctgaccacggtgcctattgccatcccgatgatcgcgggaccggcaaccattacggcagccgtcacgtttcccgttcaatacgggcgtgagatcacgattatagccatcttgatcgctttggtggtaaatctgttttgtatgttacaagcccggcgaatcgggaatttcttgattaaatacaattttatgaacccgttgatccggattatcgggttgattgttgccacgatcgggttacagatgatatttgacggaatcacgctgtttataaagactttgaccgtgtaatttaaggtctccaattaataattccgtttgtaggatgtgccttccgccagttttgaaaagcggcataatcgtgaatcccgtcttggatgacggcttgatagtactcgattcccatgatttcttcagtatcgggagtctcgtactttagttttaatatggtttctcggatttccggtgtcaataccgccgagattcgttctgccacttgttcgaaatacccgtcatagtaggaacctttcaaaatgtgaatcatgtcgatttgccacaattcatgatcggtatcctcgtaccacgcgtgccattctatacaatgttcgtccgtgtcgatcaggtttttgtattcgattcgtttgatagccgggttggcggccagttgcatgatggcctggaaactgatggccggggttaatcgtggggtatagacgtggaaatctatatcccggtgtttcatcatcaatcccatttttaatgacccgacaagattgatttccgccccgatagattcccagatattgataatgttagttgcttggactatctgtttggctcgttctgtattgcgagcagcaagttgtaatatcgtttccatgtgttcgtgattgagaacgcgaaaataacaataaactctttgaaagcgggtaagaagaaagaatttattttttaacgtaaaattggtttaaattaacaatgcatttccgtgttttcccctttttcctgccgggaaagggacgggaggcatgtaagatgctggggatcttcgtggttcattaacgacattttttgtaagttaccgtaaagttaccgtaaagttaccgataagttaccgtagtaacacggtgacttgatattcacgattcggtaattttccccaaaaaatgtaaatttacagttaaggtgcctttaagcattattgaaggtttatcgaatcattcaagcggggataatatgcacgagaaaaaaggaaaccgtgtcaccgggcaatcaaacggtgacacggttttacctgaatctttctttttatttatttttcatcccgatataaaagacatagccgtagtaacttttgtatttccggtaatagtctatttcatccaattcccgttgtactaattgttgggcaggtgtactgtttttatatttttccaagaagagaggaatgttttcttgcatgggtttgtaaaaacaatccaaccaacaatattcaggtaaaatgaaatgggctaccggggtgtatccggtttcttccattttcttgattttattggaaatggtgtcaatttcggcataattaaaattccagaattgctcaatctcatccggtcgggtatccgtgagccaggaaacttccgagacggcgatcattcctcccggtttcaggaattgtttccattcccttagacctctttcgaatccgatattatagatggagccttccgcccagattaaatctagttctccgggttcaaaaggtaggttttccatggaaactgcaatgccggaaatccggtcgctgagtccatgacaaatggcacgttcctttaaaagtgtgatcatcttcgggaataaatcgattgccgtgatctgtcctttcgtgttttcggcaagcgtgatggtttgtccaccgctgccgcaaccgatatcggcaattttggcgttatctgataattccccgataaagctcaaggcttgtcgggtgacttgttgacttccgggaccttgacggtttagacgtgaaaaaaagtctacgatcatgtcaaagtcgaagtctgctactaattgtaattcctgttccataattgtgataaatatatgtgattatatggtgaatcccataaaaatgatttccgggtaagaaaaccggataggaaaatccagcctgaaaggattcgggctgttaattatgcatttatcttcttagaatttgttgttttcaaaaagcgatattttatttgttgtcgcaaagatagatattttcttgaaaataaatagattattaattgggtttattttctagaagacaggtgttgcaaacacagcatgatccagacggcaaccacgaatggggcggtcaatgtcgtgattcctgcatacattcctgtaatttgtattcctgttgacaggagtatggccaaggtggcccaagctatgcttttgaaggttcggtttccaagggctatactacaaagtactccgttatatccgagtaatccggcattgaatgcggagaaatcggttgtcaagggcaggacgacgagcaaaggcagaaaggctccccaaaccgtgtaaactgtttgtatccgggaattgacaaggataccgatcaagaaaagtaacccggcaagaatatttcctccttgaaacatgacctgcccgatgttcaggcagaatgctttcggtagatgagctactgcctcggaaacatggggtattgcgggcaataggagagtggggaaaaggtaaaggttccccaataatagaatccataccgtaatgataaatggtgccgtgaaacccggaactgttttctggcgattgaataaccgggtgatccaggtggaaagggcagagccgaatagtaataagaacatggaactaatgtttatttccatgaacactccaatggcgataccaaccaatgtaccattaaaaccgtagaggccgttccgaatgtcttcccgtgagtatttgcacaggcaggcggttaacgtgctaacgatgtttcctgctaaagcgagtaatgccagtatccaagagttgcaggctatcccggctaacataagaagtcccgacaaggcgttattctggaacatcacttgcccaataccccgggctatgataaatagtccttctttcattgtacaactaactggggtggtaaaaattactcttgatgatttctaaaatactctatcatttcactggtaagactaatgtctgattcagaaaccggaatgttttcccgttcaaaccattcggctaaggccagttcctcccggtcaagcgtgatgctgtcgtctccttccacttctgcaaaaaagcccattaaaagcgtgtcggagaatgaccacggttgacttttgtagtatctgaggtttttaacgtgtaatccgacttcctccatgacttcccgtttcaccgtttcttcaatgctttcgccgatctcggtaaacccggcgagcagggcgtagcgggtgtattcccggttggcgtatttggataacaggattttattcccgtttgtgacagcgataatcacggcgggcatgattttcgggtattccgtgttattacatttctcgcagtatagcattcgttctttatcgtgacgtacgagccggttcccgcaatgactgcaatagcggtggttgtcgtaccatttgtagaggctgtaagccgtgatcccggcaaaagccaggtgacggggattactcgttcggaaaattccggtgtctttcatttcgaattccggttgttcttccgggaggtgattgaccagatagaaacactcgtcatcaatggcaaacaagtaaatagcttcctgatagatttcctcccgcacgtcggttaattcttcgaaacggggaaaacgtagggtcgggctgtctttgccaaccagtatggaatgtccgttgaagtacagggcgtaatttgttgtttcaggacgtttggttttgtaagcgttcgaaaacgtgcggggagctatatcttgaatcataccttgatttatattatcattgaacgatttgaattcgggggtcaaaggtatgaaattgttgttactttattctacttgtttttgtctgttttaaatgaaatctttatatttgcttttgggtagcatataaggtatggagtttggtgatgcaaaattagtttataggctgaatcataaagatgataaagtatgggaagagttattcaattcttactatgagagtttatgtaatcatgcctatcgtattttattggatgagagcgtgacggaggatatcgtgcaggaggtgttcgtgaagttgtgggatggacgggctgtatttgaaaatgaaaaagctttaactgtttatttgtatcgttcggttacgaataatgccttgaagtatttacgggatcgggatgtggaagaagcccgattgaaattgtggagcgaggtggaacaggaaatgaccgaagaggacttttccagtgtggtgcgggaagaggtgctacggaaattgcgggaattaatcgagctgttgccggaagaacgtaaaaagattatcttgatgagtatggagggaatgagcggggaggagattgcgacccaattaggcgtaacaattcatactgtgaagcaacagaaatatagggcttataagtttataaaagagcaacttggtagttactggtctgttgcgatgatattttttctttaaaaaaatctctttttcttgttatacttttttcttttttcggatttaatagatgaatccaagatgaaagaatgatgaaacgtaatggtcatagtgtttttgaaataactcgacaggttatccgaaatttttttaatgaagatgacgagagaacaacacgagaatttcagcaattaattcgggaagcgggattgttgaataacgcttcggaattggagagcaaggaacaattaattacatggttggcggagccctcccgtttttcctcgaaagatgcttatcgtaaattttatcaacatgtgagacagaaacaaaaagtgcgaatgttgcgaaactttagagtagctgcttcctttttgctgattttggctttgggtggggttgcttattggctaaatgatttctgggatacggggaatggtcctaagctgatggaggagatacacccgatcatgtctaaagcgtatattatgatggatgacggtacgtgtatggttttaggaaaagatgagggtgaggtgttggaagctgacgggacaaagattgtacgagattcaacgaaagtgaaatatacatcagagaatgacaaagaaacaagtaaaatagcttataatgagttgaatgttccccggggaggggagtatgcgttggagttgtcggacgggacgaaggtatgggtaaatgcggattcacgacttaagtatcccattcgtttccgtgaagagtgtagggaggtatatttgttgacgggggaggcctattttgaggttgccagaaatgaagcgaaacctttttgggtacatacttcaaggggaagtgtgaaggtgttgggtacggaatttaatgttcgcgattatccggatgaacatcaggttgttgccacgttagtaaatgggtccgtgcagtttagtgataagaataaatcgggacgacaggttattttgcagcccggatttcaagttgtggtcgattctttaagaagggattgggaggtacgaaaggtgaatctggaggaatatgtcgggtggcgtaacggtctgtatgtgtttagtcatttgactttagaagagttaatgaagatcgtggagcgaaattatgatgtgacggttttcttcgcgaatgaagagtgtaaaaaactcgttttctcgggggatttgcagaaatatgaaaaggtagaatatttcttacggtttatggagacggggggagatgtccggtttgtggtgaaagatcgtacgattacagtgtataaaaaataagacaggagtgccttggcccggaactcccgtctgattgctataattgtctataattaaacattcaaatttatgaaaaaaaattggattattaggtgtggtgtacctatccatgtcttaaaaaaagtttttttggttatgaaattgacttttttattaatgatcatgcttcaggttagtacttgggcaacaggattttctcaggaaagtagagtgtctttgcagatgaaagatgtttctttagaaaaggttatattagaattgcgtgaccagacgggaatacgttttttctatagcattgataagattaaatctattgagcatctttctattattgctacaaatgagatgttgaaagatgtgttgaatcgtttattggaaggaacgggacttacttatactcttttggataatgtgattgtaattaaggatatcacggaggttgatcaagtgaggagagctgtccgattgaagggatgggtcgtggacgagaaaaaacaagctttacccggagttacaattaaattgatgggtacttctgtcgggacagccacggatagccggggatggttctctattgttttgccggtcacggagggacgattggaattttcctttgtaggtttttccactcagattgttgattttaacaggacttcggagagggacacgatgcgggtgattctgaaagaaaatgtagttaacatggatgaagtggtggtaaccgggtaccagtccgtgaagaagaaggctatggccggttctttctcgaaagtggaagcgaaagatttggtgatgacgggttcccagacgttagagcaaatgttgcaaggtaaattaccgggtgttatggttgtcaatcagagtggacttaccggaacccggcagaaagtgcgggtgcgaggaacttcgacgttggtagggaatgccgaaccggtttgggtggtagacgggattattcagcaggatccgctacctttcagcacgagtgagttgaccaatattggtgatgataacatggatatgatcaagaattttatcgggggtgccatatcttggttgaatccaaatgatatacaggatattaccgtgttgaaagatgcgtccgcgacggctatttacggaacgaaagcggctaacggggttatcgtgatcacgacgaaaaaaggggaacgaggacgattggctttgagttataccgggaatttttcagtaggagaaaaattggattatgacaagttggaaatcatgaattccaaacaacgggtagatctttctcgcgaggcttaccagcgtggagctcaagttcccaatgataaaatcggttatatcggtttggcattggcttatcagcgtggtgagatttcttttgaagattttaataatggtgctaagaaattggaatccgtgaatacgaattggtttgatgttctttaccagacaccgttttctcattctcactcgttgagcttttccggtggtaatgataattcaacttattatgcttctttggggtattctaataatgaaaatacggctaaagggaattcgcaaacttcttataccggtcgtttaaatttgagctctacgttttggaacaaattgagactgaatgtagctttgtctggttctcatgcagagacaagtgcttttgctagtggcgtggacccgtttagttatgcaattaataccaatcgggcgattgcttgttatcaggaaaatggtgatttgttttactacgataacgatgggcgaggctatgattataatattctgaatgaattaaagtattcgggtaacgagaatagaagccggaatttgaatattagtgtggatgttcgttggacgatgatggaggggttggtgtttgctaccacgttgggggggaatacaacctcaacttttggagagacgtggtttacggaacgaacgaattatgtggccagattacgcgggtataattatggcgaacatgatgtatatgatgaggaatttaaattgtcgagattgccttatggaggtgtgttaaccgtggatgaaaatgaaagtttcaattatagttggcgggggcagtttgagtatgtgaaaaatcttgggcgtcattcgatcaacgtgatggttgggggagaacttacgagtaacaagtataaatcttattctcagacgaattatggatatatgcccgaacgcgggttgtcgtttgtcgatgtgcccttggggactcggcccagttcggacgtgaattatacgttgaacgatgcctatgcacgtacaaaaccttcggtttccaagtcgttgagtaatacaatatcttattatatatccggttcgtatatgtttgataatcggtatgcttttaatttctcggtaagaggtgacggttccaatcgattcggtcaggatgaaaaagaagaatatttaccggtgtggtctgttggggcgcgatggaacgtgacggatgagcattggttgcaaggtcaggatttgttgaatagtctgtctttatccgctactttcgggtatcagggaaatgtggtagataacgtgagttccaatttgattgcaaggatattgcctttagatacggaaacgggtgaattcaagatgacttatacgaagttaccgaatcccgatttgaaatgggaaaagacaagatctgttaatctagggattaattttagtattttgcgtagtaaagtgaacgggtcgttcgagtactattataagaaaacaagcgatttgatcacgcaacgggagatcccttacgagaatggtgagcattccatgtacgtgaatggcggtaacatgaaaaattcgggttgggatttatcattcagcctggttccggtgcggacgaaggattttgtgtggagtttgggatttaatacttctaaagtgaacaatgaggtgaattcggagtttgagccgaggggggattggaaagaggtgataggtggaaattataataaaaaaggttatcctatatccagtttttgggcatttcgttttgccggcttaaatcctgagaatggcggacctttgtttgatttgtcaggatccgattcgaacgagggggctttggatgtgacacgatatatggtccacgtcggaaagtcggaaccggatttgacagccggaataaatatgaatttccgttacaggaattgggcgttgtcaacctctttctattggtcgacagggaatcagtgttttctggactctccttatgcggaaatgaataagacttatggaatgcctagcgagtataaaaatgcttcaactcaattgttgaagcgttggagaaaatcgggggatgaggactacacgaatattccttctattcctgttggagaaaattgtttggcaatttatccgtttaaagataatagtacggccctttatccttatgaggcttgggcttattcggatattcgagtggtggatgcctggtatattcgttgtaatagtattaatctgtcgtatactttcccggaaaagatgattcgtcgtttcgcccagaatgtcagtttttcaatgacattgacgaacccgttccagattgtaagtagcgattttgatagtcgtgatccggaagttgccaaaggtagtcagcctttgacccggaatttctcttttagtttgaatgtaagtttttaattataatagatgaagcgtatgaaatcaattctattaataatcgttagttcgtttatgttttggatgttggtggggtgtgacggttttttagacgaatatagtattagcgaggtacggccgacagaagtaactgatttggagcagttgcttttaggagatgcttacttggatgccgatcaaaaagaggtgcagtataatattatggatattttcacggatgacattaaatgtaatggattaggaaatgaagggtatcgagactatttcgaacacatgagatggcgttttttgtgggaaccgaatatgtttaatgcggcaggaggaggttacgatgctgctttctgggaattgccgtataataaaattctcggatgtaatatcgtgttggattgtttggatgatatgaccggggaggaatccttgagggaaaatttgcggggagaggctttcgtattgagatcgttgtattatctgatgatggtgaatatgtatggaatgccttacaatgagggggatccggctcggaacccgggagttcccctgaagttaacgatggatgtacgtgacgagcgatttcctcgtaatactgttgccgaggtgtatggacgtatagaaaaagatttattgacaggcaatcgtttgttgacggagaatgattataaacgtaatttcttgcgaattggtcatttggcagcaaaagctcttttatccagagtgtatttatacatggaagattgggatcgggcgattgcctatgcggatagtgtgttgcaggtaaaaccgaatttgttggatttgaatacggtgagttggagtacacctaggtctccgagttctttgtctgtttattctattgatactccggatgaagtgatctggatgcgggaaggataccggaaactggatgatatgcaagcttctgatccctgttatcttgcttcggatgatttactggatttgtacggtccctgcaatcataatatggtgcaaaataagacgatcaaggatattcgcgggtgcctctattttgcttggaatttcaaaatggcttttccgtcgctgacgtattaccgaagttatttatctattggaggaagtgataatggggtttatcaaggaatacgtaccgcagagatgtatttaaaccgggccgaaggatatattcgtaaatatatggtggagggaaatatgtcttattgccggaaagctctggatgatttgaacgagttgagaagacatcgtttcaataaaacgtacgagtatgaagaggttaatatcacggatccggaattgttgttcaagttttatcaagaggaacgacgtcgtgaattggcgggggattggattcatcgttggtgtgatttgagaagatacgggatgccggagatcagtcacgtgtattttgaaacttcttcaggtaataaaacagaaatgacgctttctaaaaacagatacgtgctacctatcccggaagagattatccgtttgaatcctttgttggaacagaataaatagttgaaacttaaagcgagagaattatgagatatcttttgacgattatattaggattatttttatggacgggatgtaatgatgatgatgaaacattagttccttccacggaacccgaattccgctatgtgcttccacaaggtaatcatgactatgatacgaaaattgtgaactggtatgaggattgtggtttttacattttatataagtatgaggataaagatgtattctataatgaaaatatgccttgggccggttttgttcaggatacattacgaataaatgaaagtgaccttgtattttataatcatggtttggttgttgagttgccggatgaagaatacgtgggaaaacagttggaatggatagaagaactttttcttaatcattacccgaaagaactattgaaaaagtggttaccgaaaaaaattatattagcaaagaatgttgctaattgtatgctattaggtaataatgaaacaagtaaaagtgtgcgagattattacaaggaaattgctaacacgttaatattcagtcatggcgatgtttccgtgaatgagttgacgagtagtacgttgcaaaagatgaaaaatgaactgcatctttggatgttgaccgagaagttggttgacgattatccgttggagaaattagaaaattttttctccgtgacggattatgctaaaacgttatcggctgattattatgaagaatggaaggcggaaggttggttgggaaggttggctaactctgaagatggagcgaagattgaggatgtaaaattgtatgtggagatgattattaccgttccgagggaaatcttggaagtaaatatggagactcttatgatggaggatttcggtttatttcgaaaaataatgatgaattctacgtatagtaagtatgcgggttttttacatccttccacggatgttaatgggaatattaaaaagaaatatgactttatcacgggggtatttaaagcatggggcgtggatttggaggctataggtgagctttataatgaatagtttatgaatgaagtgtgttgaagtgcacaagactttaacacacttttcctgttttgatgattgaaatatcatgacggtttaccaccgtcaaagggggaatatcgtctaaattttgtacctaaaataaatcgtttgtatggaaaatccaattgtaaaagttgaacgtttgtatcatcgttatacaaccagtcgctgggctatagaagatatcaattttcagattagcgaagcgggagttgttgggttgttgggatcgaatggggcgggtaaatcgaccacgatgaatattatttgcggtgtgcttaagcaaacctccggggaggtatatattaacgggatcaacacgttgaaagagcccgtgaaagcccgtaaaatgatcggttttttgcctcagaaaccacctttgtatcccgatctgacaataaatgaatatttgcgtttttgtgcagagattcaatggatggataaaaaaaagataaaatcggcaattgctagggcggaagaacgttgtggtattacgcacatgaaggatcgtttgttacggaatctttcggggggataccagcaacgtgtcgggttagctcaggctattttacacgatccgaaattcgtggtgttggatgagcctacaaacgggttggacccgaaccagattcttgaagtgcgtcaattgatcaaagatattgcgatagatcggaccgtgatgctttcaactcatatcttatcggaagtacaggctacctgttcttcgattaaaatgatcgagcacgggcgggttgtcttctccggaagtactgaagattttgataattatatagaacctaatacgctttatcttgaatttgaattacctcctactatggatgaattgttgaaactttccggggtgaaacgcggagaggtgatagacaatcatgccattcgtttgtggtatgacggggaacgcgacacgatcaaacaaatcatgcgggaagctacttcccgggggtgggatatgattgaacttcgcagagagaagagttctatggaagccgtgtttgcgaagttatccggaaaatagtcaaattattcaaagaaatagaaattatgagagcaatatacaagatagctcgtttggagttgtcaaatcttttttattcaccgattgcatggttggtattgattctttttgtctttatgaccgccatgaattttacagatgtactttggggatatgcgagaagtcaggaatttcggggaggtggtttatccgatttatcccggactttgttttttgatatgacaggacggggattgtggcctaaagtgactaatttgttgtatatgatcatgcctttattgaccatggggttgatcagtcaggaatttagtagaggatctattaaattgttgtttgtggccccgattaccagtaggcatatcgtgttgggtaaattcttgggaatgttgatgtacggggtggttatgtttgtcgtgttgctggtatacgtggttcttgccggatgttggatcgagtcttttgattgggccgcggttctgacgggattattgggtttgtatcttctttttgccacttatgcggctatcggtcttttcatgtctacgttgacgagctacccgattgtggcagctatttatatgttggctttgttaacctttttgcgttttgtttccggtttatggcaggagtatactttcgtgcgcgaaattacttattggttggctttagatcgtcgggcaggaacgtttattaatgggatgatttgtagtgaagatttcctttattttgccattatgactactatgtttcttggttttgcggtattgaaattgcaatttatccgggaacgtcgatctcttttgagtaaagtcgggcgttttctcggtgtatttgttatcgcgatgttactgggatacgtgacttcgcgcccgatgctgcgattgtattatgattccacgcatacgaaatccaatacgctgacgcaagccagtcaagatattgtctctaaattggatggaggtttgaagatcaccacttacgtgaatttattcggaagtgtctataatatcactccggcaaaagtgatgacagatattgcccggtataattcttatattcgttttaaaccggaaatagagatggattatgtgttttactattatacagatactacggatggctattttcagcagcgtttcccgcataaaactttaaaagaagcggcaaaagaaatggccaaattccaaggtgtgaatgtaaataagtatgtaccgctatcgaagatagatactgaagtggatctaagagacgaggcatatcgtttcgtggctttgttggaacgggaaagtggggagaaaactttccttcgggtatttcaggatgcacaacgtgttccttttgagacagagatttctgcagcgttgaaacgtattaccatgaaattacctactgtcggattcttgtccgatcatagagcccgcacgattacaggcgatcggaatcgggattattcgtacatggtatctgagaaattgtttcggacagcattaattaatcaagggttcgatgtggcggatgttaaattaagtcgggatcctcgattacttgatcatttggatattcttgttattgccgaaccgatggaaccctttacggatacggaactcgatatgctgttccgttacgtggaaagtgggaagaatctgattcttgcagggaaaccgaaaacaaatggatatttgaagccgttgatggatagattgggattggcttttgaagccgggatattggtacagggtcaagatcaggttgaaaaaggtcgtgcagacggaccttctgtcagaggatctttgccgagtccgggaagtacgaagcaagaggtagagagggaatatcctgttagtttatatctttgtaaggtaaccaatgaagcaaaagatttgtctcgcctttggagtgtcttgtatcgacaaacgagggcaccggaatggccgtatgctatcgtgatgccgggagcatcggcaattaatcaggtggaagataagggattccaagtaactccattattgattggtggagaccccactggttggaacgaattggaaacgatagatttcataaatgaaataccccagttgaatacacaagccggggaacggtctggtgtaaaaaccacgatgatggctttggaacgtgaacaggccggaaaacagcaacgagttgtggtgatcggtgatgcggatgctttcagtatgggtgaagtgatggccaatcgtaggggaattctttctgctaacgggggattgatcatgtctatgtttgaatggttgtcttacggagaactcccgatagatacttctcgtccgaatccgattgataataccatgacgattggggctgaaggagcagagtccgtgaagactatcttgcaatggattttgcccgctttgattcttttaggaggcgtgttgttgctgattcgaagaaaagggaaatagtttttgtttaagatttgattttggtgtcgttcgatagaatgaagtagtgagctgcattgtatcacggagtcgtgaccggggtgtctttggggcacgactccttagctttaaaagaagaagttaaatgaaataataaacggaaaatgaagaatttatttattttgattttattgttcgtgtttacggtactttccgtaaaatctcaaaattacgaggcgtttaacaagtttatgagggattattctcatggatggactttggaatttagaaaaccgtcaggtcgtacgatggagatggttaaacaggtaggggagcctgccccggagttctattttgataagaaattgaacagtaaagctctgaaaggaaaatttgttgtgataaatttttggtctacttggtgtggcagttgtgtaaatctggctatggatattgataccgtgttgttccgaaatatggaaccttataaagatgtatattttatcggggttgattcacacgagaggatgtcggaacgtgatgcgaagaaatggtgggaagatcatggattcaactatccttccggttatgggaaaggtgcagatgcttgtgctgaagcttttcatggaaatcatccggcggtcatacttattgatgataaaggtatcatccgcggacgttggaacggtcgaagtcctaggttggctgaaatgattcgtgatgcggtttgggtacttaagattgttccggaacaggggataaaagcggatgtggcaactgtcaaagaactcgttgctaaggacgaatttattaaggctctttatttgcttgagattatgccggaaagtatagaaagtgccgctttaaaatatcaatgtaaactggaggtgtcggaaatgagtgcggctcgctatttcgagtttatacaggaagagtatcaggatgatccgcaatatcacgacctcatggaagagattatgtatctggtagtggctttccaaacgaagtcggatgtcataatcaagaatggtttggatgctgcagatgttttattaaaaagtcgaaaaaatatggattatcgggtccatgaaacgacggggattctgagtttccggtacggagagagtttcaaaagtaaagggataagatttatggaaaatagtatcccgactgctaaaatgaatcacgtgagcggggatacgataaaacgtttggaagaacagttgaaaaagtatagggagatgcgatagaagattggaatacttctttttgtgatgatggtaatgtatttgttaaattatctgggcgacagttgattgattacttctgaaagtaaacgatattttttttcttctacaactagaagatccattaaatataatcatggaatagaaaagggtttctcgttataatttttccccgggattccggggaaaatatttgatgatgtcggactatttacgagaaaatagtttaaatatttatttttgtaatttatccgctctttcttttaatctggctgcacgagcctcgctatccgggtgggtagagaacatctgttggatgcgagatgctttttctcctcctgagttggagagttccaccagtttggttaaggcttttgacatggcatagggatcaactttttgttgaaggcaaaaatcaaaagcgtaatcatcagcggcgtattcttgtttttgagagaattgagcccccatgaaagcctctgctagcgctcctagctgggaatcggtcaattttgaagcggtctcgcttaccgcacctgccatgttcttggcagctgagcggagataggcgtttttcatagcgtgtttggtgtcttggtgtaccacatgtccgatttcatgaccgataacggccagaacctcgtcgtcagtcatcaattccattaatccggcaaagatgcggatgcttccgtccccgcaagcaaatgcattaacatcaacaacttcatatatagcaaaattcagattcaaaccttcaatttcggggaagttcgccgtgattttggccaagcgtttacctagttcgctgtccggtgcggccactttattatgagtgtccatccattgaatgtattcttggctcatgttggcaatgtctttgtcggaaagggtgattgctcctgctgcgtctttgccagcttggatagcttttttggtgtcaatcttcattttgccgattttaatttgtgcttgtagagttaaggtcccggcaagtaataatacgcacatgaatagttttctcatcgttgtagtgaattttaatgtttgattattaaatatttccttattctcgttagattttatattatcggctgcaaaaataaatatttctcttatatcttcaacgggaaagaattatttaaaaatattcttgcgagaagtgagcatgtgaagaaaattatattacctttgcatcgcttaaatgaaaaggactcgtagcttaatggatagagcacttggttacggcccaagaggttgtgggttcgactcccgccgagttcacgaaaatgtctggaaatggcatgataacttactagaccttgtatatcaaaagatttacaaggttttttgttttaaaagacaatcgatcacgctttgtatttccataacttgattgcgagacaaatagcttaatccttgattgttaatttgcacgtcatattcgattttgagaatcggctcacgtgaaaaaggctcacgtgaaaaataaggtggagcagtttcgaaagtattatcttcgcgtgtttactaaatatgacacgatgaaagaacttctagatttaattttacccggggatgtcctcgcttttttcgaggtagtgaaggagagcaccactagtgatcaaattgatatctaccttgacgagaaaaatatcccgccgcacgagtatggcggtcaaggcgttttatccaagggtttcacgggcacgaccaggatccaggatttcccgttacgtggccggtccgtttaccttcacgttcgtcgacgtgaatggcaactaccgtcgggagaagttgttagcaacaagttttccctgtcttcagatggcacgcgttactctaaggagttcgcgtcttttttaaaaggtatacttggataattacccgatcagcggcaagagcctggagaagttctatcacgttaacggggatttgctggtacagcaatacaagaaacatctaagcgattacccgtcctgggccccacgttcccacgctgacaagtggctggtctttcccgagaacttgggtccccgcttgagtatcgacgagagttcgctctcccgtggcgagttgtacacgatcgtcacgaacaaggacggtcac

SEQ ID NO: 10973 - DNA, 318 bp, Unknown
  gut microbiota DNA sequence
ctcccagcggtgctcgatccttaactcttgcaaggcgtcacaagcgagcttctgcacgtgaaagcgatcgataacctgctcggcattcgggaaacattcccgggctatggcgtgcatgccgctggacatgtcaagcgtgatctccatcacccggtgacgggcttgacggggaagtttcctctatatcctggatacttccacggcctttaccccctcgatgatggcgaccagggtacccttgccaccgtgaccgtccttgttcgtgacgatcgtgtacaactcgccacgggagagcgaactctcgtcgatactcaagcg

SEQ ID NO: 10974 - DNA, 204 bp, Unknown
  gut microbiota DNA sequence
tccgctatacccgtgggatcaacgattcccacgatatcaagggcggcaagcaagatctcgtcaccctgtaacgtgatacttttcgtgaagagcttgcgggctcccgtccaatcgggaaccgtgatcttcaagtcgatcaaccgggtcgcgacggtgacggtcacctctttgctgatggttaacacgatatcctccccgttagga

SEQ ID NO: 10975 - DNA, 150 bp, Unknown
  gut microbiota DNA sequence
cggtcccgacttctatccaggatttcccgttacgtggtcgggcagtttaccttcacgttcgtcgtcgtaaatggcaacttccatcgggagatgtggttagcaacaagttttccctggcagcagatggcacgcgttactcccgggagttcg

SEQ ID NO: 10976 - DNA, 1523 bp, Unknown
  gut microbiota DNA sequence
cgtaaagacccagcaacttacccccgagagattgatcctgcaactctttaccgctaaaaaggtaacgattcaagttcaagttcccgtgaccgtgcgccaggccgaaaggataatatccagtcgtttgatccgcaaccaacgtcgtaccgctagcgtgacacaaaacccgcgtgcttccaaggtggtcccgtttcatgtaatagtaaacgtaaccacccgtcgatttacgggttaaaccctcgggatggaccaggtagagcaagttgttacccgagtacaccaggggaccgcgataataagtcaaagaactccccacccgtgtcgccagcttctcgccagccgaagtgtaaatataagaaactttttcgttacctagacacacttcttccggtaagttcaagatattatagctgatactcgctcctcgaagaccgtcaacggtcatgtttcctacggcatcataagcgtacgatggcccgttatttatcttgcttacctggttaccgtcataagtgtaagacaatgacgaggcgactccacttgaactcgtgcgggttagcgaggtcaggttcccgttcaaatcatacgtgatgtctttctctgcgaagcccgaatgggcattccaggtagtacccgacttcttgtaaaggtgggccccggttaactggcttgaagaagtgtgacaatatgtgtctatctctcgttaactcgtataaaaatcatcgagaagttttttcatttttacacttctcgatgatttaacatgtatctatacgcctaaaaatacttttactaaaatattttttaacaaatattttaaacctgacttattacaaaaattaaatattcaaaaattcccgtatttcgtctatcgtctcacgctctgacacatttcggctctcttttattactttaatattatcaatttggtcctcattaataatctcaaaatcgaaatcataagttattaatctactatttatagacttattagcagctaaatataccaatttacatcctcttttaattcctattgctaaaagatctccatcccaataatccacaatctccactagattaaaatcaataatagattttaatctagtcataaaactcattattatattatcttttaccatcattttgcaaaacgattatctattaataattttttcacggtacgatttccactatttaacgcttcctcaactgtcatatttaactattcccctggaaagactcgtctaattgatgatttcctatttttcgatataaaagaactaaccgtttcatctaaattatttagaacttgcctaacagtaggactatttaaattcatgttgaactttcttgcaaacatatcagccctagaagcagctcccaaagaattaaaaataggagaaacaccattattagcgaaacggtgaaagtttttttctgctgccgcaccgctctccaccgccatgctaagaatcttgaagtgattcttcatcctgaacatcttggcaaaatcgcccaggtaa

SEQ ID NO: 10977 - DNA, 2842 bp, Unknown
  gut microbiota DNA sequence
caacttttatcgctatgttactaatattcaaataaataattttaatccttatatcgaactcacgttatttacctgctaaaaaattaagcccactaattatagcaaatcagtgggcttaattttttatttaacttatcaaagcccctccaatcctttccgtaaagagtctctaaaaacttgatcctctcctatcataccttcccaagaatatttgacctctccatttttatccaacaagaaataagcagggtaattcgttatttcaaatctctctttcaaaaaagcgacttcgggatcgtccatatctattctcacgcaaacacataaagaattcaaataaaccacccgttcggataaatcccaggcccaattcctagttacaaaataagcatcattacctcttacacattctaccaacaacggcttatttttctcctttacttgctctaaagcattacgccaaaattttccgttacaacttatcggaaaacccagatacctgaatttttgataaaaatcccattgctcgacaggagtattggcaaactcaaatagcatcttggaagtaaattgccccacacgctccttatcctcatctttaccgttcaatcccacgtatttcatcgcatgccacaaacaatcctgccactcgttaagttccaccagttctcgcattccctctatcatccccgggatatcactttccaagaaagcttttacttcttttgcccaagtcaatacaacttttattttatctgccttcgagataattgtacagtctggatctgacaatactgctacaatttgttttatcaaatcgaacgcctcggtagaagcctgacaatcatacatcaaacgctgaatttcttgcttatagcctctaaccaagtaatcatcaatacggtctctttcttgcttttccctgaacttatccccatgcttcaccacgtattcaaaatatttacttccatatggatcttcattaaaaagaggccaacactccctatccgtcaatttctcgaacggagtctgttcaaacaaaatattccgtatactatcggcttcatgcaatttccggatgtctttcaatatcaaataatagtcaatggtgttttgtaaactcatcttttgtttttgatcaagcaaaagattcagaaaaaacaatgacgaagtctcattctcgccacgttcaagccaagccaagaactctttcggatttcttgttccttgcaagcgatgtcttaccactccatccttttgtagaataaaaaatgtcggtatagatttcacttcatatctctttctaaagtccttaccctccaagttatctacatttatttgtatacaaatgaattgctcgttacaatattctccaacatcttttctactcaacacctcttcaaacatcaatttacatggcccacaccaagaggcggtaacatcaacaaaaacaagtttctcctccgcttgcgcccgtgccaaggcttgatctaaagacaacgcatcaaattttacaccttgggcaaatacactacaacaagccaaaagacttattatcaataaaatatttcgtttcatacataattcattaacaacggacattctaattctgttctaataaaaagattgataggtaacaccgtttgcttgacaaaaaagattaaccaactctttcatatacaaacgtctccggatacatttttcgctatactcgacacccgtaaaaagattcttaaactcttcatccgaaaaagcgtaaacagcagcaatataattcatcgcatcacaagatttctctaaagttttacgatacacgatctccctattgctatttttaggatcaatttcgctccattctgtatctccccattccaaaaatcccatacgccaataatcccataattccgcaccaaaataccagtccgcattcaaatcaatttcctctcctgtatcaagcatcctataatatttataagcatgcatattatacaaggttcgagctttcgtaggaagatctgaatttgtcattttataaaagaattttaaagaatcagaacagtgaatatttagccaagtgtatactttagcgctcaacaccattccagcccaaaatttcaacgtggattcatccatacttttaatatcagccagtttacccacgggcgtcgtttcaatcgattcttcaaagacccaagccgctttgcccccttctcttatcgtatcaccaccgtaatcctctgttaacagactatctactaacaataaagattttacccgatatttccccaatggaggcaaattaggcaacacccacttctctatcgcataagcagctttcaacatggcagccgtgtctcgtgataaagtaaaacgaacctcctttgatactaaactataaataagatatttttcacttaccgtttcataaaatctcaccggatctccattcgaatccacaccatcctccacgtatcccaacgtatcgttgatgaaaattgaaactcccgtctctttatatattttatgaagtaaatgccccagttctcccggtctatccggcacggcaaaccaatcaacaactgaacttgcattcagttttatatcttcttcgttacaagatgtcaataacgtaaagacacatacactatataataaataacttttccacatataactatttttattatccgttattccaatttcctttccacacgctggggattatcaaccaaattaccttgattatacacgatctcgtaaccgggaatcggtaatacccacgccgggtcttcaccatacggtttcaacacgtaatccccttccagtaccccatttttatcat

SEQ ID NO: 10978 - DNA, 150 bp, Unknown
  gut microbiota DNA sequence
acacatcccggtaaattgaatcctgctatctttgcccgtatggtagctaatgcccagaaacatggtaaaaaatatcaagaaagacaatttactgctatgttgaagttatttgatcccgatgcctccaaaccggcgactgaaaagaaaaat

SEQ ID NO: 10979 - DNA, 11999 bp, Unknown
  gut microbiota DNA sequence
aactacctaatgtcgcgcgtgcccgtcccgtaccaccggaattttaaatcgagagccatgcggctctcgagtgtcatgggatgttagtccacgtttccgcgggttatctcccggtacggggttggttgcacacgtgttactcacccgtgcgccggtcgccggcgaagtattgctactccccgctgcccctcgacttgcatgtgttaagcctgtcgctagcgttcatcctgagccaggatcaaactcttcatactaaaataatctttcagaaatcttctctggcagggtcatgtgttcatcgaatctcgactcgcgtcgattccgattcacgctcgctacgttgtgttcatctcaatatcttaaagaactctttatctcttgttttctctcgctctcgatcttccctcccgtctcccctctcgaaagcggctgcaaaggtaagacttgtttttcattctccaaacttttcaagcttttttttcaaactttttttccgccccctcgtttaacctctttacctcgtgccctctctctcgaaagcgggtgcaaagataaggcaatgatcccgccttttccaaattttttcaccgttttttttcatctttttttcaagcccccggccaataccgtgactggcaaaacgttagggagaaaaatttttaccgggaaagaccaccgggaaaagggagggaaaggcggcacgaccgggaaaagggaccgcactctcgcccggcaagcacctttcatggacacccgtgaacgtctttgaaacgtctttgattcgaatttgatacgcctttaactcctgtcttctacccgctcacaccctgtcttcaccccttgcacggggttaaaaggggaatgggctaccacgagaactcgacaactacactccaagaactcaacaaccacacacgccagtgttcatgctatgtacatgccatgaagatgccatgttcatggtatagcccaacggcaaacaagcgacgaggaaaacatcgacaggagatagtaaaattacaaatgttttaaagccaacttgataagattctcaactgtttcgaccttttccgaagccaaaatcttgtccaaagttttcgctacctgggctcgagcaaagcccaacattaccaaagcagcttgcgcctcttcccgaaccgcactcgtagaaagactcagcccctctacaggaacaccctctttacctaccttatccttcaattctataataacacgctgagcagtcttcacgccaattcccttcacgctctttatagcatttacattctctgtaagtatcgccccagttatctcctccaccgacattgaactcaacatgacattcgcagtattagcgccaatcccggaaacagaaatcaatgcccgaaacaaacttctctcctccttagaaaaaaaaccatacaataaatgagcatcttcccgcacgatctggtgaatataaagcataacctgattctgggaagcgatctttgaataagtattaaccgaaatatgaatataatacccgaccccgccacaatcaacaaccgcatttgccggagttgcctccactaattcacctcttatatattcgtacataacaattgaaaattgaaaattgaaaattgaaaatgacaaggcatctcaattttcaattctatgtttatactactagcggaaaccgataagtttacgcacttctttcatcgtggctaccgcactagcccttgctttctcggccccggccgcagcaaccttatccagattatccggattagcagcgtattctatgatttgttcccgaatcggagagcagaaattaataatatcttccgccaactgttttttcaaatccccgtaacgaatttcacaattattatacttctcattgaaataatcatacgtgtctttcgaagaaacgacatccatcaaggtaaataaattctggatcacctccggtttcacgctgttcggctcggttggcccactatcggttacggctttcatcacctttttacgtattgttgcagcatcatcaaccagataaatagcatttccctcggattttcccatcttcccggaaccatctaatcccggaatcttgattccttctcccgtgtaggagaaagatgccggttccgggaacaattcactcccgtatatggaattaaatctccgagcaaattttcgggccatctccatgttttgctcctgatcttttccgacaggcactttatgagccctgtgtataataatatccgcagccatcaacgtaggataggtcaacaaacctgcattcacgttatccggctgtttacgagccttttccttaaaagtagtcgtgcgctccaactcgccaagataagcattcatgtttaaatacaaatacaactcggcaatctcctttatatcactttgtacgtaaattgtcgccttctctggattcaaaccacaagcgagatactccgccagaatcttccgcacgttctccaccacgttacccgggtgcggatgcgtcgtcaacgagtgccaatcagcaataaaaaagaaacatttatactcgtcctgcatttttagaaaattcttcaccgcaccaaaataatttcccaggtgcaaattacccgtaggcctaattccacttactactgtctccattgtctgaaatttacgaatttaaaacatacaaagatacagttttattcgttttgtacaactatgtatcaaaatgctccgaaaacaatactcatcatcacactatataaccacctactcatgaaccggtaaaattcatttttattgtatttggcagaaacaaccgtctctcgtttatctcattctaattaaaataatgattaccaatacattacactcaccttaaacaaatacacgctttttaaaacgttttcagcaaagtaagatattgatagacaaggagaaaaaaatattacaaaaatggatgttgttatattatttttcctacttttgaaacgcaaagtctaattaataattttaatttaaacatggaaggttacgaaaagaatgacggtatggaaatgaatgatcgggatgagatctattcaaaaccggtgagagcagggaaaaggacttatttttttgatgtaaaagctactcgtaataacgattactatctaacgattactgaaagcaaaaagaaactcgaaaaagacggttctcagaattacgaaaagcacaagatctttttatacaaagaagactttgataaatttgcagaggggcttgacaacgctgtcgcttacatcaaagcagctcttaacggagaaacaatggcagtccaagaagaagttgaaacaaacaaatttgacgacattgattttgacgatctatccaaataaccaaaaaagctcttcgcaatgaagagcttttttattatcgtatatatccgtaaggaatttttgccagaccttctgccagttgattgattcccttttccagtttccccttcagcaacattttcatcatcatgttcaactccgcctctgccgttattcgcaaccgggtatcataagggccattatccaacaactgaatccatacttgaaattcaaaaggcaaacgtccgtccccctccagtttaatcaatttcggttcttccctctccacgattttcattcccatttcaccaacgccttttaccataaaagtacaggcatctaccgtggtgcgaacgtcctcgatcttgtcagctagttccggcatttgattaccggcccccatctggcgagccgtttcgatcaatttcccaatcttcgagaaatcagaaagaaacgcatacacgtctgcaatcgcactatttattttctgaacttcactaacaactcgtgttgccataccttctatttataagattccgggctcagacgccactccttcaacttagcgacatcactctcctgcacgtacccggtcttctgggccaagtcgatcatggcgttatagtcgctcaacgtatccagtacgcaatgagcattcgtgaaattatctatcgctttctggaatccataggtgaaaatagccaccattcccaacacgtcacatcctgcatttctcaacgcttccacggcttgcaagctggaacctccggtagagatcaaatcctcgaccacgaccactttttgaccttctttatattcaccttcaatcagattttccaacccgtgattcttggcagcggaacgcacgtacacgaacggcaaccccagttcctgtgcaaccaaagcaccttgagcaatagcaccggtagccaccccggcgatcaattccacctgtgggtattttgttttaatcaaattcacgaattggtcccggatatacgtacgtacttccgggtaagacaaggtctttcggttatcgcaataaatgggagatttccacccagatgcccatgtaaaagggtgatttggttctaattttatcgctttgatctgtagcaaatgtgacgctacttgttctgcaacagtgttcatatctgtctattattttaatggttattctttactttcagggtgcaaaggtacaaagtatttttcaaaagccactcggatagcatactgaatctcgggatattctccttccagcttgccgggttcgaacaacgtgctaataccctgcaaaccgggaacaatggagtcaataaaatgagattttccctcgtgcagaccgcgtaatccaaacgcacccatagcctgtaacaaacgcaccagcacgaaatgatagtatatttcccgaaacttttccgcatatcccggctcgctctccgtcaattcccgaatatagaaatctaataattcttccttttgactttcaggaattttcactatcgcatcatataataaggaagccacgtcatagtgcaaagccccttgccttcctccctggtaatcgataaaatacacctcgttatcaacgaccatgatatttctggactggaagtcccggaacatgaaaccatctgccccagccatgaccagtttcgccgtcaaccgatcaaaatcattctccagccgatcctcgtcggcctccactcccgccaatttcaaaaaacaatatttaaaatagttcaaatcccaccgaatacaacgttcatcaaagactggacgaggcaaacatcccgaataatccaacccttttcctcccatcaattggaatttcagcaactcagacaaggctttccgatataattccagcgtatgctcgctcagaaattccccctcccgctcccgttccacgacatccagcaacatatccggccccagatcatcctgcaaataacaaaacccgtcctccgaaacacaatacacatgtggaacatgcaagcgggatttttcaaaatgccgtgtaaaatccacgaacaaacgattctcccgcaagttctcatgatacacacccacgtatgttctgtcttccgtgaacacccggtaatatctccgggctgaaccggacaccggtaacggctccactcgccgtgcctcgttaccattatattgcttgaaaagagttcttattttttcttccataatttcaattatttgtcaactccgtttttctttctcccctttcctgtaatccaacacgtatttttgatcattccaagtaacgtcaatcaacatactcaccgtgttcgaaacattcaaataaccttcccgaacacgcacgtcaattttccaaaaatcggaatcatctattatttttatcttgcaggcaaaagtaaagaaatttcaccgcaatgttagcatataaatgaagaacaagtatccagctgacgtgaatactttatggaatcaataaaatgacaccgtttcacgaaaacacgaaaacacgaaaaccgctgcatccgcaacggttttcgtgtttctgtttcattgatggtgcccaagacaagactcgaacttgcacagccgaacggccactaccacctcaaagtagcgtgtataccaatttcaccacttgggcattttttaacggcgcaaatatatagtattttctcattatcgcaaaacaaataagcggtattttaacccgaatttcacgaaataaacaacaaaagatacactcagctcttaccgctttttccagtaactaacagcaaaacaatgcgttttatccaaactttcatttctcacctggtgatacacttttacacgattttcttcctcctcaacatgacatccggcacacacgacactatccggcaacacttcatgttcgtaaataatttccaactccgtaatttcgtggtcctttaaaaactcgtaagacaaagaattggtaacccagcgcacatacgtggcttgagtgacgtgcttgttgaaatcgatattatcgtatgttgccgtgaaacgccgggtattttcaaagtttgtcggcatctttttcgtatccaactcgaaaggaatttcccgaataccatccacacaaaaagcggcggtttctgtcacgcaagccggcaaacgcacgggacgacgacgatttacatctatcaccatccactctgaagtagcccgtaataaaacctcttctcctgccaccattctaaaatcacgaatcgcaaataaacggtcaatacccgacggccatgtttccaacatcacgttctccccctgttccggcatccggttaatcaaaatatgcaacttatgcagcatccatgtcaatccttgctcgttcaacgtgggcacgtctattttcagcgcataagtctgcacgttcgccacgtcattaaacagatcgcacaaggacttcatgatcaaccgtccttccaaatccgtataatgtccccgaatacctatctcttccgaatattttaccatcccgttctaattttagatttaacgatttttagattccaaacgcacaaataaatactcttgatttcactttaaactttaaattttatatcacgtttacttccggttctaaccatactccaaactgaaggaacacggatttctttatctcgttagccaaatgtgcaatttctataccagttgccccacccatgttcactaatactaacgcctgtttttcatgtaccccggcatgaccgacaacttttcccttccatcctgcggcctcgattaaccacccggcagccagtttcacatggtcatcatccacgggataaaccggcagtgcaggatatttttcctgcaaagtatctgcaataacacgttcaaccatcgggtttttaaaaaaactcccggcattaggcaataccttcacgtccggcaatttcgcttcccgtatacgaataatggcttggcgtatcacttttaacgaaggttcacccaaacggattacttcatccttcacgctcccgtaatgcaacttgaactcgggatgtttcgtcaaacgaaaagtaacatacgttaccagaaagcgattcttccactcatgtttgaaaatagaatcccggtaaccgaaacgacacgttgccgcatcaatcgtcaccttttctcctttcacgatatccacggcttccacccggtcaatacattcccccgcttccgtcccgtaagccccgatattctgcaccggagtagccccgacatgcccggggatcagtgaaagattctccacccctccatacccgtgttcgacagcccacgccacgaaatcatcccacacgacaccacttcctacacggacaaacacgtatttatcatcttccctcacgatctcgcacccttgcatcacgggataaaagacaaccccgtcaaaattctccgtgaacaagaagttacttccccctcccaaaagtagaatttcctccgggtctaactcgtatgatcccacgaattccaataattcgctctcttgatcacacttcacaaaatatttacaagtcacgtctataccaaacgtgttatattcttttaaactaaaattttcactaatctcaatcattctatttttgtctattaatcaactccacgatctcttttctctcgcaaaggtaaaatatatcaggaaataaatcactaaatttgccccattaatccaatgtgtctatgatctcattaccgccagcatttacagaaaggatgcagcagctccttgggaacgaatcggaaacctttttccaagcgttagtttcggagtctcccacttccatccggttaaacccgaagaaaacggcaaacaccgatctccccttcccggcattactttcccgacaagtaccctggtgtagtaatggctactacttgaaggagcgtccctcgttcacctccgacccgttgctacacgggggagcttattacgtgcaagaagcctcctccatgtttctgcaagtcgttcttgagcagataaccggggatacccccctccgggttctcgacctatgtgcggctccgggtggtaaatccacgttactggcaagcaatctgcccaaggattcactactggtttccaacgaagtaattaaatcaagagcctccattctcaaagaaaatattattaaatggggatatgatcatattgttgtcaccaatagcgaccccaatcgtttcacgggaatgaagggtgcgttcgacatgattctcgtggatgcaccctgttccggggaaggtatgttccggaaagacgagaaagccatcatggaatggagcgagaataatctgcgtctttgtgaagagcgtcaaaaaagaatactttccgacgtgtgggatgctctcgcccccgggggctatctcgtgtatagcacgtgtacctacaatccgggagaaaatgaagatatattaaactggattttaaccacgttcgatgcatcatccgttgaaatccggcataattttacagccatcaccccgtccccctttcctctccacgggtaccatttctacccgcacaaaactagcggagaaggtttattcatgggagtcattcaaaaaaatgacgggacaccctttaccatgaagaaagaaaagcgagcaaccccatcccccgcagtcaaactcccggcagacatcctccccttcctgccggacatgacaaaatacactccttacattgcgggagaaacattaggcatccttccaaaacaacacgccgaatttatccaatatctatcctccaaagccggggtcatttataaaggatgtgaaatcggagaatgtattaaagggaggacaaaaccagcccattctctggctctataccacaaactgcaacaaaagcacgttatccgtcaagaagtagatctcgccacagccctccaatttttacgcaaagaagacatccgtttcgaggcccctcaaggggaatggattctcatcacctacaaaggcatcgggctaggctgggtaaaagaagtcggcaaccgggtaaataactactaccccaaagaatggagaattaaaaatttgattaagtgatttaatgatttccgattaagagattcgattcatcggagactctatcatctttgatttagtgatcccttttttaatcactaaatcatcaaatcatctgcaatcaccgaatcatccttttatttactcttcctctaccgaacaatagcgcttgataatactgtaagaatccgttaatccaagctccccggccttactcaaatccacgttagcagcactccggtttccttggtatatatagagtaaacctcggttaaaataagcctcggctatatccttatccacttccagcactttcgtgtacatatcaattgctttctgaatctcaccgctcttggcatacacgttagcaatattaaacatggcaaaaacgaactccggatcaatctccaagcatttgttattcccctccagtaccaaagaataatccacgtttcgctccacttttttctcctcacccacgacacgggaagtcttctcttctatcgactcgatgtaatcgtacattcgggaacgggcgcttgccaagttcatcaaagcgaacagatgattcgggtcacgctctaacactgcacggaaatcctcgatcgctttcgtgtaatctccccggttcagatacaatgaaccgcgcagtaacaaagcatccgtgacattcttgtttttccgaatatccgaagacaagctctcgatataattatcctcgaattccctcgggtaattaaacttcttatttgaaactgtcaaggccgggttataattatgctcctgattaaacttcatgatccgcttgtcgaaatattgcactttccctttccgcaacgtatccagcgataggtactgcacgataaacatatcctgtaattcgataatcacgttccggtcttgcaaacgtccgttgatcacgtctttcatccggtcatcccgggagtttatatctatcaatcgcttaaaattctccgtggtatccaccaaagcattctgatccccatccttcattcgccgatatcggtccatgatctcttccgccttgtaacggtccttttcggccgcatcgtaatcccgcatatccatactcgtcgcagcccttgccagatatgccttcacgaaatccgggtatattgatatactttgagagaagtcgttataagccccctcgtaatccttgatctccatcttcaataacccgcgattgaaataaatcagtatgttatccgggttcatttccaacacctgatcaaaatcttgaatggcattattcacatccccgatttccgatctcaacaaagcccgattataataagcatacgcataagtactatccaccttcaagacggccgtgtaatcctccaatgcctcaggatatttcttcatctcgtaccaggtaatcgcccggctcataagaatccgcttattttccgggttaatcttcaaagccttgttgtaatcctcaatcgcatcgtgatactcttttgcttgaaaccttaaatatcccctcaaaccataagcatcatccgagaacatattcaatttgatggccatgttacaatccgcaattgccccttcttgatcgcccagtttctcccgcatgattgcccggttcaaatatgccggtaataaatttttatcgataatcaacgccttcgaataatccttctccgccgccttgtaatctcccatatctgcctcggtaattgccctgttcgcgtacacgtaagcctctcccggatttattgcgatcgccgtattataatcgtgcatggcctcctcgaactgcttcatattatgataggcgatcccccggtacatgtaagcatggaaataattcggatttaactctatcgcctgtgtataatcccggatagccccctcaaaatcatccagattcaacttcgccaatccccgaaaaaaataaggttcggataaaaaaggttttatccgtatgatattattgaaattctcgatcgcgctcacgtagtcgtcgaacatgatcgcactcttccccactcgcaacatatttgccgtattccattgtgccgacactcccaatgtcgccaaacagaagaatataataacgccaaatttcttcattcgataaacatatattttcggggataaagataataaaaaagtttgcatcttcattatatccccctttttaccctcccaaaatctctctcccacatgaattatcaacaccctctctcttttttctccaccccaaagcttacatccttgtttcatgtcttcgttacctcctcgttaaatcttcgttgctatagagcgatactttaacgataggataacgaatacataacggatatatgcaagaggatgtattggtttgaaacgatagaagaatgttacattccctttaaagtcagaaaatacccttccccaaaagaatttccgaccaccaaagcagtatcaacctccaaaatatctctcaaacggctaatgccctttctcaacgcatttcctttctcggcatagctataattgccccataacccacgaatcaaataatcattacttgcaatctcgtgcatcttgacacaaagcaaatgaagtaaacgagagtccattgatttc

SEQ ID NO: 10980 - DNA, 518 bp, Unknown
  gut microbiota DNA sequence
atcttgaggaagctcccccgtcaagcccgccaccgggtgctggagattactcttgacatgtccagcaccatgcacgctatcgcccgggaatgctttcccaacgcggaacaggttatcgatcgctttcacgtgcagaagcttgcctgtgacgccttgcaagagttaaggatcgagcaccgctgggaggcgattaacgaggaaaccaacgagatggaaaacgcccggctggaggggaggaagtacagggcgagaaaattccgtaacggggaaaccaggaaagagatactgttccgttccaggttgttattgtttaaagacccggcggcctggaacgtgaaacaaagaaagagggcttccgtgcttttcgagttgtatcccgacatccaaaaggcgttcgccctggtacagaggttgagaagaatctattcctcgtgcaagtccgtggcgggtgccaggctcaaactcgccttgtggtacaatcaagtcaacgaggctggctttcattctttcaattccgt

SEQ ID NO: 10981 - DNA, 400 bp, Unknown
  gut microbiota DNA sequence
ttttttttatatcgatgccgaaacgctccttggccatgtcgatcatcagcaggttcgcctcgtgtagtaatttcaagtcctcgttctcgcggcgaaggcgagtgagttcattttcttcttccgtggtcatggtttcctggtatttaagaacgtataaaggtaagtcttttaccgggaaacgacgaagaacttcagctttatatttcttgatccaaacgcttaacgtcgcgctacagatcccgtgacgttcctggagttctcggaaactactctcttgaaaaattcgttgacgcactgcctctattttttcttcgatcgtgtggcgagacaaaccactggattttgttgctactgacataagtttacttgttgaacaagtcaacttttttaggataagaca

SEQ ID NO: 10982 - DNA, 664 bp, Unknown
  gut microbiota DNA sequence
gtgaccgtccttgttcgtgacgatcgtgtacaactcgccacgggagagcgaactctcgtcgatactcaagcgagggcccaggttccccgggaagagcaaccacttgtcagcgtgggaacgtggggcccaggacgggtaatcgcttagatgtttcttgtattgctgtaccagcaaatccccgttaacgtgatagaacttctccaggctcttgccgctgatcgggtaattatccaagtataccttttaaaaaagacgcgaactccctcgagtaacgcgtgccatctgaagacagggaaaacttgttgctaacaacttctcccgaaggtagttgccattcacgtcgacgaacgtgaaggtaaacggaccggccacgtaacgggaaatcctggatcctggtcgtgcccgtgaaacccttggataaaacgccttgaccgccatactcgcacggcgggatatttttctcgtcaaggtagatatcaattcgagcactggtggtgctctccttcactacctcgaaaaaagcgagaacatccccgggtaaaattaaatctagaagttctttcatcgtgtcatatttagtaaacacgcgaatataacactttcgaaactgctccaccttatttttcacgtgagcccatcataaaggtacaaaaaactatgcttt

SEQ ID NO: 10983 - DNA, 7697 bp, Unknown
  gut microbiota DNA sequence
ttcgaaaaggcctctttttatagctaacttcttgattttcagcggagccaatttggggactcgaaccccagacctacgcattacgaatgcgttgctctaccagctgagctaaattggcgataacgggtgcaaatgtacgactatttttgtaatttgaaaacgataaatcaatttttttcaactcaaaaccgcacattttttatatatttgcggctacattttaattatcaataagatgaaaagaaggataccgacaattatttttcaatttgctctatcactttccctatttttattattaatcacgaacgtttcggcccaaaagaacgctgtagagacctccggagatgtcatatattacgcaactccagtcttctgtttggcaaccaccctattgaaaaaagattatcaaggaaccaagcaacttgctttttctgcagtcatggctgttggaacaagttacatcttaaaacacacgattcgtaaaaaacgcccggatggaagtgatcatcatgcattcccatcaggacacgcaactgttacttttcaaggagcttcctttttacaaggccgatatggttggaaattcggtgtccccgcttaccttttatccatttacgtcgcttggggacggactttttgcgataaacacgattggtgggacattcttggtggtgctgccataggtatcggaagttcctatattttcaccaaaccctacggtcgtacacggatcaccctcacccctactgtattcccaaagtcccctggaatccacgcctgtatcactttctaacagacttctaaatattttgttaaaatagtatttaaagaaatcataaacctttttttaatcatggaacatccatattatatgtctatttttgtttaaatcagaacaacaacatataatatgcaacttcatatctacaaaataatctttcttttattcacgctaaccacacccgtgatcatgtttgctcaaacgcaaaagaatgatacaattagaaaagatacaacaaccacaatacccgaaaaaattatcaaatacacactaaaaggtatcgtaacaggagagactgatgacgaaactctaccaggtgcacacatctacgttggagaagataaaaaaccaactacggtaactaatgcgatgggagaattcaccctaaaagacctccttccaggagagctggttattaccgcatcttttgttggttaccaagctacaacccaaaaatatctggtaaaagtagatacaaatgtcggaataattaaattacttccggaagtattggaagaagtcgttattacagcaaaaccacctttaatcattcagaaaggtgatacaacagaattcaatgcaaacgccttgaaagtcccggaagatgcagaattggaagacttgttgaaaaaattacccggctttcaaatcgtcgacgggaaattaatggcaaacggggaagaagtcaagaaaatctatattgacggaaccgaatatttccttagtaacccgatggctgccctccagacacttccggccagtcttgtcaacaagataaagatgtttgacggaaaaagtgaagaagctgatttttcaggatatgatgacggaaaaagattccgctcattaaacattgagaccaaaaatcctaatcagttgaaagtattcggtaaagctaacctaggatacggcatttcagaagacctagaagattcatttaaagataataactataatctaggcgtttcagctaatgccttcaacaaaaagcagaaattttccatacaaggaagcctacgtaacaccaatcaaggttccgaacttcctaatgcacaataccacgggaaaggtgggaataatcgagggaaaaattactccgtggacttcgccaacacttttagtaaaggtactgatatcggaggaagttacaatggtagcaacagcgagtcttattctgccaattccagtattcaggaatatttcccttctgaaagtttccagagcaacatttataattcagaatcacattcgtggtctgaaagttcaagtcataacgtgaatacccggtttaattactccatgaacaagaaaaacaggttctacttcaccccttctttttcatttagcaaatcagatagtcgatcattgaacatgaatagcaatattcaagacaacgacacgataaatatcacgaacagcaaaaatcaaagtcacagtgaaaatcactcctttgggggtaatttctcctggatgcacgccttccagaaaacgggccggacattcactctaaacgggaatataaatatcagtaaaaacgaaaacaataatacacaacaagatagtagtattataaacaagagagatacgttacgaaatctcattaacacctccgaaggtatatccaattcatacacggcttctatttcttattcagaaccgttaacagaaaaagcccgattatcattcaactactctttcagttacaacaagaacagttctgacaaagaaagtatgtcatacaaagacgcacttttcacggaagtcattggtattgacaccgccttaacgaataaaaccagtaccataagaacaagtaatagcctaggcatccgttatggatacaatcaagaaaaattttatttcagtgccggtggctcaatcaatctatcaagagaagaaaataaatacgaatacttgaatgcaccggactctaacgtgagaaataattacctgaacctttcccctcaagtaaatttcagctataatatatccaaaagatcaaccatgactttttactataacgggaatacagattcccccagagccgagcaattacaggatattcttgatgtgagagaccaattaaatatttcaacaggaaatcccaatttgaaaaaaacattctcacaatcggcctcgatgacttttagccgaagtattgtaagcgaagaaaatttcagtttcctaaacgtaaatctcagtttccggaactcatttaacaatattgccacggcaacacaattcatttcaaaagacacggttatcaacggttaccaaatattgcaaggagcacgactcacacggcccgtaaatttgaacggacaatgggggctttccatgaattccagttattcttttgaaatcaaatctttaaaactaagattaagcccttctttatcttacagttattctagaactccttcaatctataatagtataaagaatttgacaaattctcataatgcatcattcggtcttaatatcaatagtaacatatccgaaaatttagactataacgtatcttctcgcacctcttacaccaattcgacaagtacaaccacagaaggctccagttctttctctcaatcagtcaacgcaagtgccaaatggatattctggaaagaattcatccttgccggagattattcatatagttacacgctaagtaaaaaaggtggaaacgtgaaccaatccaatagtctcttaaacatggagatcggaaaaaaattcttgaaaagaaaacagcttcaagtcaggttcaaagcaatggacattctacgtcaaagaaacttgttaaattacagcattcaagacctgtacacacaaaccagctacagcacgaatgagcggaattactacatgttaacagtttcctatcgctttaactccataggtaaaaagaaagaaggaagaagtccggaaggaacgcctccccccggattcttttaaaatttaatttctcaacgaacataacgcacccctatccgctcctgtatttgcgtgggggataaatccgtgtcaacctttattttataactccttcccggaattatatctatataattatctgaaaagaaaatcgattctcccggaatatagaacataacattgcaagccagtttatccgaagaaacctgaataaatttctctccattctcctcccctgcctgaatggagaagtgcggttctggcaaattcaaattcttatgatacacaaaataagcattcttttcgtctagaacccgatcaccttgtctcaaacataccacaagcatcatctccttctccgaacctcctccaagcaacgactcccggttcaatttccacaaaaccgttgaagtatttgccgctacatttacctctttctcgaccaaggaaacagaatttccttgaaaatccagtacctcaataatcagttccccttgaatctcctccaatctgtcactcacggcataaatcgccaaagtatccccctcccatttagaggcaacgatcacctctttaaaacaatcctgcatcacgtaatgcgccgctttccatttatggtaataatccgtcgtcgaccaactggcaactggccaacaatcattaatctgccaaatcaaggaacccatacaatatggcatattccgacgatgtgcctcaatacccatctttgtagaaagtccctgcaacacgtgggtcatgtaaataaattgttcaaactcgtccggaacccggtaatacattttcatataatccagaatacgcccgttaccaatataactcctttggtgtgatttcatcacctccgattctatatcataatcctccggcagtgcatatgtttctatcgtactcatttccgggaaggactgaaacccgtattcactacaaaaacgggtagtcacctcatcaaagctttccaatggtcggaaaccatgccacacaccccagtaatgctggtcgcccgaagtcgtcccgtccaatccatgctgatccggttccggtcccgccatcggcgaagaaggccagtaatcatccccatccgtgtaatcattcaccacctcgggaagtatctcgtgaaaaactgtatagtaagccttgaaaaccgtatcctgttcctccttcgtgaaagcattcttccatccccatccccccggcgcaccgtgtcgccaagccaaagcgttttcattattcccacaccacaaagcgatactaggatgattccggattcgagtaacattgtcaatagcctccagacgcacgttatctaaaaactcttgattcccgggatacatcgcacaggcaaacatgaaatcctgccataccatgatcccgtacttatcacagaattcaaaaaaagcatcatcctcgtatattccaccaccccatattctgatcatattcatgttagcattcgccgcatccaacaccattttctcgtacaaatcccgggtcacacgaggcaggaacacgtcgttcgggatagcattagcccccttggcaaacacgggtacaccatttaactcgaaaccgaaagactctccccattgatccttttgtcgaactaacttcaacgaccgtaaccctgtcgtcaccttcttttccgccaccatacctcccccactggtcacctgaatcgtgaaatcgtacaggttctgttcccccagcccgttactccaccacaaacggggattctggatcacataaggtatagatattttattctctccctttttcaattctttttgctcccgcaacaacactttcccctcgttcataatcgccattgtaacattttgttgcttatccgaattcacacacacctccgcaaccaactgagccatttcctttgtcacggaaggctggcgaataaacacatcctctaccttcacgtcattccaagcctccaaaatcaccggacgccatataccggaagtcaccaaacgaggcccccaatcccaaccgtaatggtaaggagctttacgagtgtacacgctaacccgatcatctcccatgccacctcgaacactctgatcattatccgcaggtaacctcaaaccgtaacgttccatctcttcccgtcccttaagagtcggggaagcgaacacgatatgcaactcgttccgacctacttttaatttcccctcaacatcaaacctccacgtccggaacatattatccgtactccccaacttctccccgttcaaataaacatcggcgtaagtatccaaccccgtgaacgtgattcgttgattgaccttttcccctatttcctccgaaaccgtgaactctgtccggtactcccaatccttcttatcaatccattgcaactgcaactcattcatccggtaaaaaggatcttcaatcttcccgttggcccgtaaatccgtgtgtaccgtaccgggtaccgtagcaggtaaccatgttcccgaatccctttggcgaaattgccaaccggaattcaattccatacgaatctctttttcggttgaacacccgattattccccaagtgacacaaccgaaaaacagaatccaaactattttattcattagactttgcctcttgtagaatatgtttcgcgaaattataccccaaagcctcgtaacgttgagtcaacaacttcgcccgattcaagaaattagaatactctctatctgcctgcggggtccatgccacctctgccaatgcagccatacgcggcaataacatatattgggcatgactaaaagtagtgatatactccgtccacaagttagcttgcaccccgataattttctttccttcctcggcagtcaatccttctgtcgggtccaaactatacactttcgctacatcaacaaaccctccgatactaaaaggttccttgtcaacatctttggattgatagtaatcaaaataagcgtagtcattcggcaccatcaccacctcgtttcctctcttcgcccctttaataccacccgtcttacctctccacgacataacaatcgctgttttagaaacatcaccttccaatatttcatcccaaccgataactctcttgcctttccctttcaaatacgcctcgatccggtgaacggtataatcttgcagttcaccttcttctttcatattctcctgtttcattcgggtctgacatttcttacactttttccaagcatccctcggacactcgtctcccccgatatggatgatctctccggggaataattccacaacctcatccaacacgccttcccaaaactcaaacgttttctcgttaccggggcaaaatacttccgggaacactccccacatctgacacacctcgtaaggtccacccgtacatcccaattccggataagtagccaacgcagcaagtgcatgtccgggaagctctatttccggaataatcgtgatataccgctcggcagcatattgaataacatctttaatctcctcctgcgtgaaaaaatacggtccgtatggagtaccgtcatattttccggtatttttaccaatcacggtctgtttccgttgactcccgatttgcgtgagttccgggtatttcttaatctcgatacgccacccctggtcatccgtcaaatgccaatggaacacgctcaacttatgcaaagccaacatatcgataaaagtcttcacctcatccaccgtgaagaaatgacgacacacgtccaacatcgtcccccggtaccctaaacgaggttcatcttgaatctgtacattttgaatccgaatccgatccattttctccccgttctccacgcccacaggcatcatctgccgtaaactctgcatagcatagaaaacagctttcgaacttccgccttttatattaaccgcattcttctccaccgttaaatcataagcatccgttttcattgatggatcgacaacaatattaatcgcatttttcctagtctccccg

SEQ ID NO: 10984 - DNA, 512 bp, Unknown
  gut microbiota DNA sequence
cctgaaggccttgagcttggcgttaaaagactcggcggaagcgttggtactcctgttgttgaaaaagttcaagattctattccagtgcgcgaacacggaagcggccacggaattgaaagagtgaaagccggcctcgttgacttgattgtaccacaaggcgagtttaagcctggcacccgccacggacttgcacggggaatagatccttctcaacctttgcaccagggcgagggccttttgcatatcgggatatagctcgaaaagcacggaagccctctttctctggttcacgctccatgcagccgggtctttaaaaagcagcaacctggaacgggacaaaatctccttcctggtttccccgttacggaatcttctcgccctgtactttttcccttccagacgggcgttttccatctcgttggtttcctcgttgatcgcctctcccagcggtgctcgatccttaactcttgcaaggcgtcacaagcgagcttctgcacgtgaaagcgatcgat

SEQ ID NO: 10985 - DNA, 548 bp, Unknown
  gut microbiota DNA sequence
tgtatgattttttatatgattatttgaaaaccgataaggctgataagatggacatctatgccggagcattcaagaaatgggcggataatatcattgataatggagtgccgcataataactggaatctgatgcaggcacgttatatcatgagcatcggcatgattttggaatctgatgcttcttatccggataaaaagggaggcgagtattatattgattatgtgttgaatcgttcttccatccgtcaatggtcactgaaacagcttgctgattatggttatgatgctgaaaccggtatttgggctgaatgtccgggttatagtcaggtagttgtcggggattatacggatatggtcactatctttgaccgtaatttgggtatggacctgaccgaggagattcctgtcataaaaaaagtggtggccgccgacccgcaatatttgtttccggattgtatgacaatgggttttggcgatacacatcccggtaaattgaatcctgctatctttgcccgtatggtagctaatgcccagaaacatggtaaaaaa

SEQ ID NO: 10986 - DNA, 145 bp, Unknown
  gut microbiota DNA sequence
tgacgtgatagaacttctccaggctcttgccgctgatcgggtaattatccaagtataccttttaaaaaagacacgaactcccgggagtaacgcgtgccatctgctgccagggaaaacttgttgctaaccacatctcccgatggaa

SEQ ID NO: 10987 - DNA, 28941 bp, Unknown
  gut microbiota DNA sequence
ctcgaaaatctcaatcttcgaggcggtttcaaaaagacaattatggattatatcgccggaaaatatcctgatcttgtaccactttacgacgagatctataacaagcataaccgcagctactttgaagcacttgaagtaaaagctgagaaaatggctaagaagtatgattgtgtctttgtggataatgaaatgccttatggcagagtcccgcagggacatccggtgatcgtagattatttctatcatgaggaaatccgtgggacagagaataccggaaaaagaaatcgctaacttccagcttggttataagatcggatttatcaatgatgctgagatatggttactcatgttaaaataacgcaatacctctgttatatatataatgaggatgaaatagacgagttgattctgctgatacgcgatagctttattctggcttttacggttcttaaagatacacttgtgaagaagctggaggaagcagaaagcgattggatgtaaaaaagcagtcgataaccttggggggagtccgcggtgaaggataaaacagtatatacatgtacatataaatcaaagttaggcgatattctgctggcggcagacgcgatcggactcacgggtctgtggtttgaggggcagaagtattttgcaaatacacttccagacggagctatttcacaggaatccccgattttaaccgaggcaaagagatggctggatatttatttttctggcaaagaaccggactttattccgccgctgcatccgactggctccgcatttcgacaggcggtgtggcagattttattgcaaattccgtatggacagacgactacctatggggagattgcaaaaaagctggcgaagatgcagaatgcatcccatatgtccgcgcaggcggtaggcggtgcagtggggcataatgaggtctccatcatcattccatgtcaccgcgtagtaggaacgaatggaagcctgaccgggtatgcgggtggaattgataagaaagtggaactgcttacgctggaacataccgatatgagtcgtttttttgcgccgaagaaaggaacggcgctttagtcatttaggtgtaattttgactgtgatattaattttcatttaattatatccgtgtagtttctcatctttcgtaagtttggaaagtatctcctgctttttcatatacgtaacaaatagatttataagtactgtgttcataatattaccccctgcattatgtttccatggaaacaagtataccatcgccttgtttccttgttaacaaatttgataataacgatataggatattttcatcagaatatttttcttatttcaaagattgcgaagtttcacaggcaggcggggatgttatttacagaaatccagatggaatacaaatgccaggaccgctcctggaagacgatgattgtgcgtgcctattagttaaaaaaccatggaaatcactattcgtacattgtaacatatcggtttgatatcgcggagcgagtaaagattgacaatttcaaaatcccgtcgtatacttcttttagtcccaaatgggattgaatggggaaggttatggaatataaaatacaaaaactttacgatcaggtcaaccaggcgatcatccgctgccgtggtgtatactcgatgtgggcaaagaataacaatgtgagctataaccggatgctggtgctttacaccatccgcgaattcggattctgtacgcaaaagcagatctgtgattcgtatctgcttccgcggcagacggtgaaccatgtgatttcagagatgaaaaaggacgggattcttgtaacggatccggaaaagagcaccgggaaggaaaaggcgcttgttttgacgccggagggcgaacggtattcggaaaaattattatattcgttaagccggatggaagagcgggcggcgaaacgtctgggagaggacaagatccgcagaatgacggaactgtttatggagtatgaccagattctggaagaggtactggaggagacggacgatgaagagtaaggcgggaacggatacagaatttttccggacagagaaaattccgaagatattgctgcaaatcgcgcctccggtcatgctggcgcagctgattcaggcgatgtataacattgtggacagcttttttgtgggaaaatattccgaaccggcgctgacggcactttcggtcatttatccgctgcagctcatcatcattgcgctggcggtgggaaccggcgtgggcgtgaatacctacatggcgcgcctgtatgcacagaaaatgccgggacaggcggaagaaacagcgggaacaggcacgcttctggcgcttggaacctggtttatatttgccattttctcgattttctgtatgcgtccgtatgtcctgacaagtgcgaatactccggaagcgatcgagagtgctgttatctacggacagatcgtctgtatcggcagcatcggggcatttctggaaggaaactggacgaaggtccatcagtcgcggggcaatatgcaccgtccgatggtcgcccagaccgtgggggcgctgacgaatatcgtgcttgacccgatcctgattttcggactcggtccggtgccggagctgggagtcgcgggtgctgcctatgcgactgtctgcggacaggtggcggctgcggttatcacatcgtttggcggggttggcagattgccagagcgcacaaaaatgccgctctatatcaagcagatctactggtttggctacgcgtcgattattatgcaggcattatttacagtttatattgtgatcttaaatgcgatccttgccggattttcagattcggcagtgacggtgctggggctttattataaaatgcagacgtttttctttatcccgctgatgggcttgcagacgtgtatcgttccggtgcttagctttaactatgcaaccaagagctatgcgagatgccgggaaattatgcgggacagctatggattttcctgtgtgtttatgctggtcggtgtgatctgcttcgttttctttccggtgcagctgctccaggttttttcaaagagcagcgaggtcatcgcgatcggaaaaaatgcattccctatcatcggggcaagttttattccggcggtattttcactgatgactccggtcttcttccaggcgatcggaaatggaaagatcagcctctttttgtccgtgatgcgccagatctgctgcctgattccgattttctggctgctgtcgctgattgatctgcgctttacctggtttgcatttccgatctcggaagtgctggtcggtgtcacgggaatcgtgctttattacaaggaaatcaaaagagactttgataaaggagcagcatgagaaagcacgtaaaaacatagaaaatagtttcgtagaaaattttttaacgcttttaatgaattgaaaaggaaccgcctgggtcagtctatcagctggcatcaggacggttcctttttcgaaaggagaatgaatgtgacataaaaaattgaatgtatgcatttcgtgtacgtatgaggcataatgcctgtcagacgaaaggaggatttcacccttatgctacaaatgcgtacatcatcacataatggcacaggcttccgcccatgacaaacagatggaaaatctcatgcgaaccgaaatttttatgcgttgcgttgaaaatcggcagttttaatgcgtagataatgcctccagccgtatagatgagtccgccggtcagcagccagagaaatgcgcttttcggaagtgccagtacgatctgacggaacgccagcacgcagatccaacccatcgcgatgtaaactagcgaggagaaccacttcgggcagttgatccagagcgcgttgacgagaatcccggcaatcgcgataccccagacgagcgccagaagccggtaaccggcgttatttccaaggacgatcaggcaaaccggtgtgtaagtcccggcaatcaggatgaaaatcatcatgtggtcgatcttacgcaggattttattaacgtgctcggaaatattaaaggtgtggtaggtcgtgctggcggcatagagcagaatcatgctgacgataaacacagccaacgccgcaagatggcgcgaatctgcttctccagccgctttgtgaagcagcggaactgccgcgatcaccgcgccgatcatcgcgataaaatgcgtcagcgcgcttccgggatcctttacgtggaatttatgatgctttgtttcaacgagttccgttgtgtcagatgtatgtttttcactaaaaatcataggataacctcctttgccgtaatatcaataaagtaattgtgaatatgatatgtagtatttaaaactacatagaatgtttttatatactatacatcttttctgaaaaatatgcaagagggggatgggatatgttataatataatgtatgaacagtaacgaaaggttttcacgtttcgtgtgagttggcaataaatatatgcaatggtttgcatatgaaaattttaaagttagaagagaaagaaaaaaggctcatagatgatttgagaagttaaaatgctcgggaatccatggatgaagtagagaggaaatcggttatgttagatatattatacgaagataaagatattttagttgtggtcaaaccagctggagttgagtcgcagacatcgagacgcctggagccggatatggtcagcgagataaaaaattatctccaccggaaggtgcaggagacgaaaaagttatccacaggattatccccaaaagcgtccacagccccggtggatccgtatgttggagttatccaccgactggacaagccggtgcgcggtgtgatggtatatgccaagaacctgaaggcggcagcacacttaagccgtcaggtacaggagggaaaactggagaaaatctatcaggcgctcgtatgtggaaaacctgtggataatgtgggtaagtacgtggattatctgttgaaagacgggaaaacgaacaccagccggattgtggataagtcggtcgccggtgcgaaacgggcagagctggaatatcagatattagaaaaaaaagaacaggaagacggtaccgtgtgttcactggtggaaattcatcttcacacaggacgccaccatcagatacgcgtacagtttgccgcgcatgggacaccgctcatgggagataccaagtatggcgtaccagcggctgcttccgtgggacgtgcccgccgggaaccgctggcgctgtgcgcggtccgtttatcgttccttcacccggtgacgggaaaaagaatggagttttccaccaaaccgcaatttgttctgtgagcgaacttttctataagtcaagaaaataaaggatcaagggtgaatagaaggtaagacgtgtatatttttatccagcctgcccatactagagtgtgtacaaaggaagtacgaatcataaatgggcaaagtccatgggtaagccccggagcgactaaagagggcttacaaaagagaccgcaggagccgggagaagcgggagctgacaccggtttcctgtggtttttcgttgccatacatccggaaaaaagggcgtgtaggtttaagaaaaagacgtttgtttgaatggatacctgtagaaatcatagaaccataacggggtatggcataaagaaaaaatcgggaaggtggagcagacagatggcactcagcagaaaacagaaaaaagcatttctcacagtagcagtcacggcgggcgtgtatttgagtttccgttacctgctgccgcttatattcccatttctggcagcgtatctgatggcgctgcttctccagccatcggcagcatttctcgaaaaacggctgcgaatctccttccgcgggcgcatgatcggcgttcccatcggtatgatcgggggcgtggagctgattttgctgagcatttttctggtcggtctgctggcagcagggggacggcgtttcacggaggagctggaacactttttagaagagcttccaggacggatggaagaattgtcactgctcggacagcaatttgaacagtcgatcgagcgagtccttcatctgcctgccggtaaaatcgggcagctctttcgcggaacaggcttgcagggcggtggacaggtcaaggagatcctgctgccgcagctccttcagaaatcagttcctgctgcggcggggattgtgcgcgcggttattgtggttgttttatttttcattgcctcgattttgagtttacaggagatggacgaactgcgccggaggcggtttgattcgatgtttcaccgcgaatttttcctgctcggcaggcgccttgcggtgacaggaagcgcatggctgaaaacccagtcggtcattttcctgatgacttcggcattttcgatggcggggcttttgctgattggaaatccatattacattctgggcggaatcggaatcggggttctggatgccctgccgatcttcggcgcagggacggcgctggtgccatggagtctttttctcctgtttaagcgggagtggggacacgcgctgattctcttcggtctgtatctgctttgttattttctgcgtgagttcacggaggcgcacctgatggggaagaaaatggggctgtcgccgcttgaaacgctggcggcgatctatgtgggcttgcagctgttcggtctgtttggatttctgctgggtccgattgggctgttgattattaaggattttgtggaggagtatggggaagcggacgaaggagcggctgctcattaagtgggcacctttagaggggggaaagaggaaaaaagtggagtattggtggatggacgatctgaaattgcttttgaatgtggaaatttaaggataaggagatgaaaggattttttagaattgccgcgagacaaaaggatcatatataatagataaggaattaaaaacgcataaaagttctggaaaacagcagagaaagagttgctggaagatagctggatgttaagctgaaataaatatgcatatcatttaatatggaggaacaaacgtgaatttatatacaaaagagtcaggctccggacagccgatggtgctgcttcacggaaatggagaggacagctcctattttgtgaaccagatatccttttttgaatcaaaatatctcgtgattgcggtggacacccgtggacatggcagatctccgcgtggtcgtgggacatttaccttggaacggtttgctgatgatttgaaaggatttcttgaccgccggggacttaggcggatcattttgctggggttcagcgacggcggcaatattgcgctgatttttgcactgaaatatccgggatatgtcgatcggctgattttaaatggagcgaacttaaacccgtttggcatgaagccgtccgtgctggcggatgtggcgcgggagtatgtgggagttgtggggaagctctggctgcagaaaagcggcatcgggcagatacggggaaaaatgcagatggcagcgggaaaaatgcggacagaaaagcaattttcaaaagaaaacgaaaaacagaatggacaggaagaactgaataaacaacagagaagaagctgtcagaaagaaaaaaatcctgaaaataaggaaaatgatcggaaggcaaatatacacaaaaaagagcttttatccttaatgttgtatgaaccctggatccgccctgaacttctccaccgcctgaaaatgcccgtccttgtggtagcagggagcgacgacatgatccgcgaatgccacacgcgccaaatcgcacgttctctgccaaacgcaaggattcggcttttagagggcacccattttattgcagcagagaacccggacgcatttaaccaatgtgttgcatcattcctggaacagacacagggcggcgagctggcgcagatgagccgagtctggggcagccggagagccggaaggctggagaaggagaagatccgtcgggcggcggtgctggtacctttgattcagaaaggcggggagtaccacgtggtgtttgaggtgcgcgcgggaagcttaaaaactcagccgggcgaaatctgttttccgggcggtgccgttgagcgggacgagacaccgaagcaggcggcgatccgtgaggcgatggaagaactcttaatcagtcgccgccagattcgcgttatcgcgccgttggatgtgctggaagcacccggagcgatggagatttctccatttttaggtgcgctgcagggctaccgctggtcatattccgaggcggaggtcgatcataccttttctgtcccgctccgctggttcgcggaacatgaaccggagcgatatgaaacagaacttgtgaccgtgccggaagagacattcccgtttgaagatgttccgggcggacgcgattaccgctggcggcgcggacattacgatgtctacttctaccgccgcgaggaaggaatcatctgggggatgacggcgaagattctgcggtcactggcggagatgtaccgggaggacattttattaaaataggattcgtaagatagggataaaaacattattttttgttcggatgcaaccgagtcagtgacgaccgagtaaaaaatgcgaggcatcgtcaagacttgtacaagggcgagttccagccttgacaaacccgaccgattggcgtaaaatcataatactgtcaaaaaacaaaacaggcgaagagaggaatcagtaaactttgacacacgtccagagagaaagccgtatggtgcgaggcttttgtgtccctgaaagttgaaccggccctggagctgtgcatgaaaatgcaacgtatttccggcgttaacggaagttaagtgagccagaatcggaacgaaattctggttaagcagggtggtaccgccgaagttaagccattcggtccctttgatcgcagcgatcagcagggatcggatggcttttttatttctacgaaataaaaaacaacaatgcacactcggcgcagggaaatatggctgtgatggcagccgcgcctcggcgccaaaatccggcaagccggatttcaataaaatgtttttagcaaggagaaatgacatggcaaaggaaaagaaaatggtagaagccatcacatcgatggatgaagatttcgcccagtggtatacggacattgtaaagaaagcagagctttctgattactccagtgtaaagggctgcatgattatcaaaccggccggatatgcgatctgggagaatatccgcaatgaactggacaagcgctttaaggcaaccggcgtagagaacgtatatctgcctatgtttattccggaaagtcttctggaaaaagagaaagatcacgtagaaggtttcgcaccggaagtagcgtgggtgacacagggcggtttagagccgttacaggagagaatgtgtgtacgtccgacttccgagactctgttctgcgatttttatgcacatgacgtacattcttaccgcgatctgccgagaaactacaaccagtgggcttcggttgtacgttgggaaaagaccacccgtccgttcctgcgttccagagagttcttatggcaggaaggtcataccgctcatgcaaccgctgaggaagcacaggagcgtaccgagatgatgttaaatgtatacgcggatctgtgcgaggatttcctggcaattccggttatccgcggacgcaagaccgacaaggagaaatttgccggtgcagaggcaacctacacgatcgagtccctgatgcacgatggcaaggcactgcagtccggcaccagccacaacttcggcgatggatttgcaaaggcatttaacatccagtatctggataaggataataaattaaaatacgttcatcagacttcctggggtatgacaacccgtatggtaggcgcgatcatcatggttcatggtgacaataatggtctggttctgccgccgaaggtagctccgacccaggttatgatcgttccgattcagcaggcaaaagagggtgttctggacaaggcatttgaggtaaaagaggttctgtccaacttccgtgtcaaagtggatgattccgacaaatctccgggatggaagttcagcgagtccgagatgcgcggtattccggtacgtgtcgagatcggaccgagagatattgctgaaaatcaggcagttctggttcgccgtgatacgcatgagaagattacggtatctctggatgagatcgcagcaaaggttggcgagcttctggagacgattcaccacgatatgtttgagcgtgcaaaagcgcacagagattcccatacttatgtagcgacaacactggatgagatgaaggagatcgcagaaaataagccaggcttcatcaaggcaatgtggtgtggcaatcaggagtgcgaggataaactgaaagaagtagtcggcgtaacctcccgctgcatcccgttcaatcaggaacatctggctgacacctgcgtatgctgcggcaagccggcaacgaagatggtttactggggtaaggcatattaatatgattccaaaacggatagaaataccggttcaggtcgaggaaatcctgggaaagctgcgagaacatggttacgaggcatttgcagtcggcggctgtgtccgcgatgcgatcctggggcggattcccggtgactgggatatcacgacctcggcgcacccggaggaggtgaagcaggtgttcggtcacacgatcgacaccgggcttcagcacggtacggtcacggtcatgcgtgatcatatcggatatgaaataaccacctaccggattgacggtgaatatgaggatggacgccacccgaaggaagtcgtatttactgccgaactgcgtgaggacttgagacggcgtgatttcacgatcaatgcgatggcatacagccacgaaacgggaattgtcgatatttatggcggggcggaggatctggcagcgcgccggatccgctgcgtcggggatgcgggagaacggtttacggaagatgcgctccggatcctgcgtgccgtccgcttttcggcccagctgggattttcgatagagaaaaagacctggcaggcgctctgtgagctggcgccctcccttgtccatgtgagcaaggaacgggtgcaggtggagttgacaaaaacactcctgtccgaccgcccggagtttatctggaaaacggaggcggcaggactggcaccgtacatttcaaagacatttccggaggtatttgcggcgtggaaaaagcggaaaagctgtgcaaagcagagtttggaagagaaagtatgttcgaaggatgtgccagctgctgacaaggatgcgatcaaaacggaaacggtagcgcagcaggggcacatgttcgtgaaacatgaatgtgagacagacatggcgggggaaatttctgctgctgtggcacatctgccagcagaaaaagccttgcgctggtcgtattttcttgccccggcgggcgagggaacttgtgtccgggttctgagagaactcaagatggacaacgacacgatcgataaggcgaagattctgagccgttttgcattcatgcagatggaaccggaggaaagcgctgtccgccacgcgatgagtgcgatggaagatacggtctttgactggctgcttctccttcaggaagttctgatgccggagcgcatggatgcagtggaaatggttcgctcacttgcaagtcagatccgggagcgcggtgactgtatccgtcttaaaactctggcggtaaccggaaaagacctgattcaggcaggcatccagccgggaccggcgcttggaaaaacgctgcatcttctctttgaaaaggtgctggagaatccggcttggaatgagaaagagcggcttctggctgaggtggaagtgttgaaacaatcgcagaatgcgggaaccagtaaagcataagaagattaataaataaaaagagaaaagaggcaaaatcgtttggaaccggcaggacaagccggacaaacgattttgtctcttttccttttgcttttttaacaacaatattttcaatcagaggatgattaaaagagttatcccaatttcttatactccctgaaaaacagcgctgccgtcgtcgccaccgcaatcgtatctgccaccggttctgccacgaacacgccgaataccggatttgaaacgaaatgcggcaggataaagatcagcggaatcaaaagcagcactttccggagcaatgccagaaagacggatgttttcgcatttccaagggcaataaaagtctgctggcaggcgagctggacggcaaagagcagggaagctgccatatagatccggagcgcccagatggtatagctggcaagatctgcgtcgctggtaaagatggaaataaaaatctgtggaaccagcatacataagagccagagcaaggtggaatagcaggctgccgagcgcagaagcaggtgaaacgcttttttcacacggtcgatattttttgctccatagttaaagctgatgatcggctgcgcgccctgtgagagcccctgcagtggcagcatggaaaactgcatgacgctggaaagaatcgtcatcgcgccgaccgcggtatcgccgccatagttcaacaggctggtgttaaagctgatggacagtgcactttctgtaaactgcatgataaatggcgccagtccgagcgccaggcatggcaggataaatttcttctgcgggcgcaggttgcggagccgtatccgcagggtactatgcgttccggtcagaaaacgcagaatccagatacaggaaataccctgtgaaaggatggttgcaagtgctgcgccgcgcacatccagatgcagtccgaagataaagatcggatcgaggatgatgttgcagagagcgccgatggcaacggtaatcatgccggttttggcataaccctgtgcgttgataaaggcattgagtccgagcgccatctggacgaagaaagtgccgcagacgtagattttcatgtagttccaggcgtagagaatcgtcttctcactggcgccgaacatcaggaggatcgggcgcccaaagccaagaaacagggcggtcaggacgagcgaaatgacggtcagcatgaaggtacagttgccgagtaccttttcagcggaagccttgtcgccttttcccatcaggatcgacgcctgcggggcaccgcccatggcggcgagcgcggcaaaagcggaaatgcacatgataatcggcattgtgacgccgacgccggtcagggcgctgggaccgatgtccgggatatggccgatgtacatgcggtcaaccatgttatagagaacgttgatgatctgtgcggcaattgccgggagcgccagtttaaaaagaagcgacccgatcggcgcactgccgagatcagcttcacgggatgatgctgcgcctgaatgcgggcgcgtattttcatcgttggaacgatgagcggattgtatggacaaagagagccctccttttcatttacagtcaaatatattatttgattttttgcctgattgttgggacaaatagccagaccgcttttttatcccaatgtgaatcattgtaacatactgtcaaaatgatggcaatgaacagaatttcgtaatcactccacattggcgattgtgtatgatggtttgtgcgctgtgtttcaaatctgcgatatttatgcataagcatatttgtaagccccctctcataggttaggagtagcaggctgggtgtctgatgtgcatatttgcataatcgtgtgaatgttgcaattaacatagctgtcagcagctgtggcccggcgtgaaaatgtgctgtccacattcttttgggaaatggaaaggcgggcagccggatagaggcaggagggggaagctgtgaacgagagaacaaccgaggtgctggaacagtatgaactggaagtgcagtcgaagcgccgtggaagaggcgcgtggatctgcgagacgagtcaggggttaaaactcctccgggaatataaggggaccgtcaaacgtcttgaatttgaagaacaaatcatgaatgttctgcaaaatcagaaaacatgccggaccgatcagtatatgcggaaccgggagggcgagcttttgtcggtggcggaggatggaacgcggtgtgttgtgaaggaatggttttccgggcgcgagtgcagtgtgcagagcgaggcggaggtggtccgggcggtcgggcagatcgcgaagctgcaccggacactgcgcggcattgcgatcgatgagtcgtggaatctggggtcaattctcacgcgtccggcggtggcggagatggagcgccacaaccgggaacttgtccgtacgcggaattatatccggaaaaaacggcgtaaatcggattttgagagggcagtcagcggaagctttgccatcttttatgagcaggcgcaggaagcagcaggcgggctgaaagcgcagatcgagcaggacggcgagccggaaaactatttgtgtcacggggatctgaaccagcatcatattttattggtagaagaaaatgagatggcggtgattgaatttaaccggatgcaccggggtgtccaggtcgaagacctgtatcattttacgcgcaaaatattggaaaagcatggctgggatttgcgtctggggatgcggctgctggagacgtatgatcgtattctgccgttgaatgcacaggagcggacatacctctattacctgtttttatatccggaaaaatactggaaacagttaaatttttattataatgcaggcaaggcgtggattccagtccgcagcattgaaaaactgcagaagctggaagaacagcagacggcgcggaacctctttcttgaggcaatccgataagaaatgttgatttacatatgcatataaattctttggttaagcgtattcgatatatcatggagaaactttgaaaaacgaaaaaataaagacaaagaatagtaaccgaaattctctttatttttcagaataattatactataatggagaaaaagaaagtcatcctagaagaaagcagggggtaagtgaatcatgaaggattacatgacgatttacaaagaatggctggaaaatccatactttgacgaggcaacgaaagaggaattacgcgccattgagggcgatgaaaatgagattaaagagcgtttctatatggatttggagtttggtacggcaggactgcgcggcatcatcggtgcaggtattaaccggatgaatatctacaccgtccgccgtgcgacccagggactggcaaattacatcatcaagcagggcggcgcggcaaaaggcgtggcgatcgcatttgattcccgtcatatgtccccggaatttgccgaggaagcagcgctgacactggcggcaaatggcatcaaggcgtaccggttcgagacgctgcgcccgacgccggagctttcctttgcagtccgcgagcttggctgcatcgccggcatcaacatcaccgccagccacaacccgccggagtacaacggctacaaggtttactgggaggacggcgcacagtttacaccgccgcatgacaagggcgtgactgaggaagttatggcgatcaccgatctttccactgttaagacgatgggagcacaagaggcaaaggcaaaaggactctacgagatcatcggtgcagcgatcgacgacaaatatattgcacaggtcaaggcacaggtagtcaatcaaggcgcgattgaccgcatgcaggatcagatcacgatcgtgtatacaccgcttcacggcacgggcaatatcccggcacgccgtgtgatgaaagagcttggatttacccatgtatatgtggttccgcagcaggagcttccagacggcgatttcccgaccgtcagctatccgaacccggaggcaaaggaggcatttgaattgggactggatctggcaaaagagaaaaatgcagacctcgttctggcaaccgatccggatgccgatcgtctgggcgtgtatgtcaaagataccaagtccggcgaatacattccgctgaccggcaatatgtccggctccctgctctgcgagtatgtgctcagccagaaacaggcaagcggcaagattccggcagatggacaggttgttaaatccatcgttacgacgaatctggtagatgcagttgcgaagaattacggcgcagagctcatcgaggttctgaccggatttaagtggatcggcaaacaggttctcaaaaatgagcaggaaggaaaaggaacctatctgtttggcatggaagagagctatggctgtctgatcggtacatacgcacgcgataaagatgccatttccgcgaccgcagcactctgcgaggcggctgcctattacaaggaaaaaggcatgacgctgtgggatgcgatggtcgagatgtacgagaaatacggctattataaagatgaagtgaagtccatcggcttaaagggcattgagggactggcaaagattcaggagatcatggaatatttccgtgcccacacaccgtccgatttcgccggacataaagtgctggctgtccgcgattacaaggcagataccgtcaaggatctggcaaccggcgaggtaaaaccgaccggacttccatcctccaatgttctctactacgaactggaagacaacgcatggctctgcgtccgcccgtctggaaccgagccgaagatcaagttctactacggcgtgaaaggtacctccctggaagacgcggcagcgaaatcagagaaggtaggcgagtctgtgatgacgattgtcaatggactgctgtagaaaaataaaaagaagatatgaaataagttcctaaaagaaataggaccattcgttcatgcgaaaggtcctatttttgtgctattttgttcttttaattctttcaacgccgctgcaaatttcgacgaaaccgcagtaggatttcctcttagcagcccgcggcggtagaaggcatggagctttttagccgggcgcagggactggcggcggtgtttgagttcttctaaccgggtgctcaggcgggtgaggcggttgtcgaaggcgatgcgggcatcgacttcggtgcggacttcggcaatgcgctcgttgacgcgctgtttggcagcttcgatgcgttctgcgtttcctgctttggcagcttcgatgcgggaggtggtttcttctcgaacatcggacaggcgtttttcggcgagtgccttggtctcagccaggcgctctttgtgttcggtggcagccgcctgcagctgtctggcagtctcggcgcgtgcggttgccaggcgttcttcggcgtcactgcggacggcggcaagtctgcgggcggcttctgcctgggcggctgccagtttttcggctgtttcttcacgggtcagagcgccgcgctcaatggcttcctcacgcagcagctcgatcttggactgtagctcttcgatatcggctttgagcttcgtcatagcttccagcgtatgacccagagccagggctgccttgatggattcgtaagcatcggcggtgaaaagaacgctgatgacgaaatcgcagatgagcaggataaccggaggaaccgcaagcacagtgcgggcgatcggatcatggatgacatcggtcataaggatcgtcagaaatccccatgcgatcgaggaactcaggcagatatagccgtgcagctggaacggctggctgctgtaatcccagtagcggaccttgaataggcgttccatgacggcgccggtgacatattcaagtgccgtggcggcgataaaaccggaaatatagacgagcggcaggctgtcccgcactggcagggacacccagagcatcatcaccgcgccggaaccgtagagcggcagcatcggaagtcgcagaaatccgcggttgacgagccgtttctgtttcagggaaacataagtcgattcgaaaatccaccctaaaaagcagtatacatagaaaaaagctagccattggtaccaggtataggtatacataaaacctcctttagaaaatcaagtcattttctcattggttgaaaaacgtatctaaaatgaagttgtttcttatcttactatataaatctagaaaagttcaaggcatctgggtgaaaaaagataattccaaaatctccgcttgccacaaaagcacgcttcgtgtacaataaatcgaagtcggctttgccacagacagcaggcagacgtacagaaagcaaatcttatatgaagtggagttgttttctaggataaaatttgcagaaaaacaaagaacaattcaacaaatacaaacaatttacaataaaaagaaaaataggagaggtacacacgtgagtatactgaatgtagaacatttaagccacggttttggtgaccgggcgatttttcaggatgtttcgttccgcctgttaaagggggagcacatcggtctgatcggtgcgaacggcgagggtaaatcgacgtttatgaatattattaccgggcatatgcagccggacgagggaaaagtagagtggtcgaagcgggtgcgcgtcggctatctggatcagcacacggtgctggaaaaaggcatgacgatccgcgaggttttgaagagcgcattttccttcttgtttgagctggaagtgcagatgaatgaaatatgcgaccatctgggcgaggcatcggaggatgagatgaacgtgatgatggaagagctgggaacgatccaggatcttctgatgaaccacgatttttattccatcgatgcgaaggtggaggaagtcggacgtgcgctggggctgactgacatcgggctggaccgcgatgtaacggatttgagcggcggacagagaacgaaggtactgctcgggaaattgcttctggaaaagccagatatcctgttgctggacgagccgacgaactatctggatgtgcagcacatcgagtggctgaaacggtatttgcaggaatatgaaaatgcgttcatcctgatttcacacgatgttccgttcttaaatagcgtagtaaatatcatttatcatatggaaaatcagcggcttgaccgctatgtgggcgattacgacaagtttctcgaggtgcacgaggcgaagaaagcgcagctcgaggcagcgtataagcgtcaacagcaggagatcgcgcagctgcaggattttgtggcacgtaataaagcgcgtgtttccacgcgaaatatggcgatgtcccgccagaaaaagctggataaaatggatgtgatcgaactggcgaaggaaaaaccgaagccagagtttaacttcctggaggcgagagcctccggaaaatgtatttttgagacggaagatctggtgatcggttacgacgagccactgtcccgtccgctgaacctctatatggagcgcggcgagaagattgcgatggtcggtgccaacggaattggaaagacgacgcttttaaagagtattttaggtttgattccagcagtgtccggcaaggtgacgctgggcgattatctctccatcggctatttcgaacaggagatggcgccgggcaatacgacgacctgcatcgatgagatctggaaagaatttccgtcctacacccagtaccaggtgcgttccgcactggcaaaatgcggtctgacgacccagcatattgagagccaggtgcgcgtgctcagcggtggcgagcaggcaaaagtgcgcctgtgtaagctgatcaaccgcgagacgaaccttctgcttctcgacgagccgacgaaccacctggacgttgaggcgaaggaggagttaaagcgtgcgctggcggcgtacaaaggaaatatccttctgatctgccatgaaccggatttctatgagggattcgcaacgaaggtctgggactgcagtgagtggagtctgaaaatataagaaaaaaatgtttttcagcgtaccccaacattcagtatagagccctttttctaaggtgtctggcactgacaaaaaacaggaacgccatcggctgagagtccgacggcgttcctgtttttcttaaattgggaatggtaggtatatataaaaaagaaattggcttaggggggccggacgatttgtatcgtccggtatgagtatgaaaaagcttttttatttcaagtaacacttgaaacaaaggcctgttaccctttcggataacatacttgtattataggagaaagttgtgactaaaatatgtccctttcataaaaaaaatataaagtccataaaaaaataaaaacctctttcaaaagaatcgaaagttgtatataatagtaagtggtatagtccgctctaaaacaatgcgcgggctggatggcagcgaaaaagctgaaataaagaagataaaatacaatgaaactcatagatttatgtactcaagagtgcatattcagagcaggaggaaaacaactatgttgatgtccaatgatattggtatcgatctgggtacagccagcatccttgtatatatcaagggaaaaggcgtcgtactgaaagagccgtccgtagtggcgatcgatcgggatacgaataagatcatggcgatcggcgaggaagcccgcctgatgatcggcagaacccctggcaatatcgtagcggtccgtccgttgcgccagggggttatttcagattatacagtgacagagaagatgatgaaatatttcatcaacaaggcagtcggcaagaagacactccgcaagccgcgtatcagcgtctgcatcccgagcggtgcgaccgaggtagagcgcaaggcggttgaggatgcgacgtatcaggctggcgcacgcgaggtttcgatcatcgaggagccggtagcagctgcgatcggcgctggtatcgatatttccaaggcgtgcggcaacatgatcgtagatattggtggtggtacggcagatatcgccgttatttccctgggcggtaccgtagtcagcacttctattaaagtggctggtgatgacttcgacgaggcactggtccgttacatgagaaagaaacacaatcttttgatcggtgagagaaccgctgaggagatcaagataaatatcggtgcggcataccgccgtccggaggtaatcacgatggaagtgcgcggacgaaatctggttaccggacttccgaagacgatcgttgtcacatccgacgagacgctggaagcgctgcgcgagccggcactccagatcgtagatgccgttcacaacgtactcgagcggacgccgccggaattggcagccgacatttttgaccgtggtatcgtactgacaggcggcggcgcactgttaagcggtctggatgccctgatcgaggagaaaactggcatttccacgatgatcgcagaggatccgctgaccgcagttgcgatcggaactggtaagtttatcgagttcgctcacggtgagaagaaaaactacgattaaagagaaccgccggaaggcggatagcataaaaatatggcagcagttaaaggatatattgaaaaaataaaataccgcaatgaggacaatggctatacggttctctctatcagcggcttggacgacggggaggaatatgtgctggttggcactttttcctacatcgcagagggcgagatgatcgaggcgagcgggcgtatgaccgagcatccgatttacggggaacagatggcggtggaaagctatgagctgaaagcgcctgaggatactgtttccatggaacgatatttaggctccggcgccatcaaaggcgtcggggctgctttagcttccaggattgttaaaaaatttaaggcggatacattccgcatcatggaagaagagccggaacgcctcgcggaggtcaagggaatcagtgaaaaaatggcgatgtccatcggtgaacaggtcgaggaaaagcgcgatatgcgccaggcgatgatgtttctgcaaaattatggcatttccatcaatctggcggttaaaatctaccaggaatacggtccggcaatgtacacgattctccagaacaatccgtataagctggcggacgatattccgggcgtcggttttaagatggcagacgagatcgcggcgaagataggaatcgtggcagattcggatttccgcatcaagagcggcatcctgtatacactctatcaggcgacggcgaacgggcacacatacctgccggaggacgagctggcggatcgggcggcaaagcttctacaggttgagatttctgagattgacaagcatctgatggatatgcagatggataaacggctggtgatccgggagaggaaaaagcagaaaacagcagaaatggatgtttttgttcaggcggaatcggcagtgtcggggcagatgcagccgcagccagatgttttgggtgaaccgaatgcatcaaatgtatcaaatatagcaaacgccccggaacgcgccgtttatgcatcacactactattataccgagctaaacaccgcccgcatgctgcacgacttaaacatcactggttccgaatcggaagaacagattcggaaaagtctggcagtcatccagaaagaggaacagatcgagctggatgaactgcagatccgcgcggtgattgaggcggtcaactgcggacttttggtaatcacgggcggtccgggtaccggaaaaacgacgacgatcaacacgatcatccggtattttgaaaagggcgacatggatatcctgctggcagccccgaccggacgcgcagcaaaaaggatgaccgaggcgacaggctatgaggcgaagacgattcaccgcctgttagagctgacgggaatgccagaggaggatgagaagagccggacgacttcgatgcattttgagcggaacgaggacaatccgctggaagctgatgtcatcattatcgatgaaatgtcgatggtggatatcaatctgatgcattcgctgctccgggcggtcaatgtcggcacacgtctgattctggtgggtgatgtggatcagcttccgagcgtcggaccgggcaatgtcctgcgtgatatcatcgagtcagagtgtttccatgtggtaaagctaacccggattttccggcaggcggcgcagagcgatattatcgtcaacgcccaccgcatcaatgccggagagcgcattccgattggaaagtcaagcagggatttcctctttataaagcgtgatgatccgaatgcgatcatcaatgcaatgatcacgctggtacgtgaaaaactgccgaattacgtccatgccgatttgtttgaggtacaggtcatgacgccgatgcggaagggagtgctgggatcgatacggttaaattccattttgcaggaatttttaaatccgccatcggcagaaaaggcggaaaaagagtatggcgagacgacgtttcgtgtgggcgacaaggtcatgcagatcaagaacaattaccagattgagtggacttcctacaaccgcagcggcatcccagtggacaagggagccggcgtgttcaacggggatcttgggcgcattcgcgagatcaatacctttgcggagctggtaatcgtggagtatgatgagggaaaacgtgtcgagtacagcttcaagcagctggaggagctggaattggcatatgcgatcacgatccacaagtcgcagggaagcgagtatccggcggtcgtgattccggtctggagcggaccgcagatgctgatgacgcggaatctgatttacacggcggttacaagggcaagagcctgtgtctgcctggtcggtgtcccgtatgtgtttcagcagatggtggacaatgcgatggaacagaagcgctattcgggactgcgcgaccgcattgaagaaattatggagacattgtgataaaaaatataaaatggaatcaattcccccgcgccgctctggatgcgctatgtccaaggcgctgcccggtctgcggggagatcgtgacgccgaagggcgggcttatctgtccttcgtgtcttttgaggctttcgcctgtcaaatcgccggtttgtcagaaatgtggaaaagaagtttggagtgaagaaatcgaatattgtccagactgtgtgaaacaccgccgatcatttgcgcgtgggatggcactctttaactatacggaggaagctgcgcgctcgatggcagcggttaaatataaaaataagagggaatatctcgatttttatgccgaagctgcagcggaaaagctgaggcagtatgaaaatcgggaggagtggcagtttgacggtctggttcccgttccggtccacccggcgcggaaacggaaacgcggtttcaatcaggcggaggttctggcaaagcggatgggcgagcggctggaaatgccggtgtacccggaatttctatatcggatacgaaatacagaacccctgaaagagctgaatccagatgaacggctccggaatttacagcaggcgtttcaggcagatgcggaggcaatccgggcaagtggtgtgcaaaacgtgcttctcgtggatgatatttatacgaccggaagcacggcggaagcgtgtacccgggcgcttctgtctgcggggatcgaaaaagtctgtttttttgccgtttgtattggacaaggacgctaaagtgggatatgatagagaagataggcagagggaagccttataagtggaaatactccggcatttctggatgaaaagaatagtagaaatcatttgaatctaaaagtttgcgggagaggcaaaaagaggttcaggagacggaaggaatgcgggggagatttcaagtaagaaagaaaaggagtaaaaagaatgcaggaatttgaatatcgcctggaaaaggaagattataaaaactggattcactggaacgtgcttaagcatgagtccaagaaaatgaagatggtgtcggcactcttatatgtcgcatttttagctctctttctgggaaaaaatgtgatgcaggcaaagggcaatctggttcttcttgtaccgtccatcgtgatagcggtgctggtcggcatcggcatgttttacatgatttcaaaccagaaccaggagcggatgatctggaaacggagcggacttaaaaatttggaaaagacgggcaatttcccagtcgtacatctgacgctggatgagaagacattgaccatgacggttgcggcacaggagatgaccaagacttacagctacagcgacattgagcagatggttgagattgagcggatgtatctgcttgagacgaacgagaaaacctggcagtttatcgccaagtcggccttttccagcgaggaagagcaaaagcagtttgagacattcatgaatgaaaaacttgcggatgccaaggaaaacccggaagaatatccatccgtgacaaaaaaaccgaaaaatgcggagaaccaggagggcggcgccctgcatcagaacgccgcgcttgaggatgatgttgtggaagctgatgagccggagatcacccgcgtggatacaagccatatgggtaagattggaaaaatggcgcattttatcggaaaccaggcggcagatgagaaagaaaccgatgagcctgaaaaggcggagccggataccacagacagtcatgaaaatgtggaagaaaagacagatgctgtaaacgaggagaaaatggacgagtaaacctttctgattgttttatagcatctgaaatacgaggcgcgggcagaatctggttccagcctgcactaagtgaaaacgatatctataatataaaagaggcggcgaatgtcggcaagttattgcttgacgtgccgcttcttttatgatatagtagacgggcgaatggaagaacataggtcttttttttatgctcaaaaaccagatttccggttggagagtggaaagatcgcatactaagaaaaatggaggtggaagttgtgcgtacaagaattacactggcatgcacagaatgcaagcagcgcaattacaacatgaccaaggataagaaaactcatccggacagaatggaaaccaaaaagtactgcagattctgtaagacacacacgttacacaaagagacgaagtaagagtaactggttggttctgcgcgatcgggcatctgcctgagcgctttggaggacaaaaatgggtgatacagaaaataccaaaaaagctcctaaaaagagtttctggaaaggtctaaaagctgagtacaaaaggatcatctggcctgacaaagagacagttacgaagcagactggagcggtcatcgccgtttccgttgcgctgggacttatcattgcggctcttgacacggcaatcgtgtttggactgcacttcgttatgtaaaggcaaaggtgagaaatatggcagaagcaaattggtatgtagtgcatacttattccggctatgaaaacaaagtaaaggttgacatcgaaaagacgatcgagaaccggaaccttcaggatcagatcttagaggtttccgtgccgatgcaggaagttatcgaagtcaagaatggagccaataaacaggttgccaagaagatgtttcccggatacgtactgatcaacatggttatgaatgatgatacctggtacgtagtacgcaacacccgcggagtgaccgggtttgttggtccgggctccaaaccggttcctttgacggaagaggagatggccggtctcggatttaaggaaaccggcgttgtcgttgactttgaggtcggcgacacggttgttgtaacgacaggggcatggaaagataccgttggtgttatcgagtccatcaacgaggaaagacagaccctgacgattcgtgtagaactgtttggccgtgagacaccggttgaactgaacttcacagagatcaagaagatgatgtaaagaggttcatttatgagcctgtgggagggaaatccccgcaattaccacaatttataggaggtgccaacaatggcaaagaaagttacaggatatattaaattacagattcctgctggaaaggctacaccagctccgccagtaggtccggctcttggacagcacggtgtaaacatcgtacagttcacgaaagagttcaacgctaagacagcagaccagggcgatatgatcatcccggttgttattactgtatatgctgacagaagcttcagcttcatcacaaagactccgccggctgccgttttgttaaagaaagcttgcaagattaaatccggttccgctacaccgaacaagactaaggtagctagcatctcgaaagaggatctgcagaagatcgcagaattaaagatgcctgacttaaatgcagcaagccttgaagctgctatgagtatgatcgctggtacagcaagaagtatgggtatcacagttgccgagtaattttcgggatgtttatcagtaacgtgggagggaattccccgacaataccactaggaggttttttataatgaaaagaggaaaaagatacgtagaggctgctaaattagtagatcgcgcaagcctttatgaagctgcagatgccatctccatcgtgaagaaggctgcaggtgctaaattcgatgaaaccgtagaacttcatatcagaactggttgtgacggccgtcatgctgatcagcagatccgtggtgcagttgtactgccgcacggaactggtaagaccgttcgtatccttgtatttgctaagggaccgaaggcagaagaggctcaggctgcaggcgcagatttcgtaggcgctgaggagctgatcccgaagatccagaacgagggatggttagacttcgacgtagtagtagctactccggacatgatgggcgttgtaggacgtcttggtcgtgtacttggaccgaagggcttaatgccgaacccgaaggctggtactgttactatggatgtaaccaaagctatcaatgatatcaaagccggtaagatcgagtacagacttgataagactaacattatccacgtgccagtaggtaaagcttccttcacagaggagcagttagcggacaacttccagacgcttattgacgctatcctgaaggcaaaaccagctaccttaaagggcgcttacttaaagagcgtaaccatgacttctaccatgggcccgggcgttaagctgaacgtaggtaagctgattggctaatcagaagacgttatagaatcaagaggatgagggacttttgggtctttcgtcctctttttttcgattgtcgaaaaaatataaataaagtcaaaaaaacagttgactttatactttagtagtgataaaatatgttctgttgccgctgagaaagcggaaacaaaaattaaagagtcaagacgcacaggtgattgtgaaaactttcaaaaagaaagtgaaaaagtccttgacaaaaatgaatatccattatataatggttaagcacatttttggagagatatcgaagcggtcataacgaggcggtcttgaaaaccgtttgtccgaaagggcgcgtgggttcgaatcccactctctccgtttcaagagcggttattaattttataagatatgaaaatcaacctgcagaagtacccaagaggttgaaggggctcccctggaaagggagtaggtcgttagtagcggcgcgagggttcaaatccctccttctgcgttcgatgcgaaagcatcaggaaccttgaaaactgaacagtatgtaaaaccctgaaaattctaagaacaaaggcttttggttaagccttgaagttcaagagaacattcagaacaaaaccaaaacaacagtaataacggttaaaattagccaagcgaaattttgactggaatcaaaactttaacatgagagtttgatcctggctcaggatgaacgctggcggcgtgcttaacacatgcaagtcgaacgaagcaatttagcggaagttttcggatggaagctagattgactgagtggcggacgggtgagtaacgcgtgggtaacctgcctcacactgggggacaacagttagaaatgactgctaataccgcataagcgcacaggaccgcatggtctagtgtgaaaaactccggtggtgtgagatggacccgcgtttgattagctagttggtggggtaacggcctaccaaggcg

SEQ ID NO: 10988 - DNA, 4084 bp, Unknown
  gut microbiota DNA sequence
agtgccgtaagaaaacgtggtggcagcaggaatttgccgtatttaaatgcgaagccacggcaaattccgttactggacacgtatgcgtgaacagtaacgataaatgcaggagaaaagaagggaggtccgccctgtgagctatttggaagattttgaaaagacgctggcggagaaatgccatcagaacgagccgccgttctgccaggcagcctgtccgttccggctggatatcaaggggctggaagaaaagtggaaaaagggacgtttcaacgcggcgtaccggacctatcagaatacggtgggatttccggatattgtgtcgaagctgtgcagccatccgtgcgagaaggcgtgtctgcgcgcgaagctggacgggggaatcgcgatggggcttttagagcgggcgacggtcaagtacgcgaagcggaaggcaccgaatgcgtataacctgccgtcgaaagggaaaaggatcgcgatcgtcggaggcggtctttcggggcttggctgtgcgctgcgtctctgcaataaaaagtacgatgtaacggtttatgagcgggaaatggttctgggcggtcaggcgagaaaccagatggatccggcggaatttgatgcggagatcgaagcgcagttccagtttgaggaattttcacgccatctcggtgaaacggtaacggatctggaggcactccgggcggactatgatgccgtgtatgtggcaactggggcagacggcgcggactttggtctggaaatggacccggacggcgcatttgcgacccggacccagggcgttttcattggcggttctctgacgggcggcgacagcatgaaggcgctggcggatgggctggcggtttcgcttgcgatcgaacggtatctgaaaacgggcggcatgaatgagccatttcgaaaggaagggacacttttaaagcttcaaacggatgggattgagcgtgccgagcgggtggttccggcaaacggggaatcgtatacggaggaagaggcgatgcaggagatcgcgcgctgccagaagtgttcgtgtgatgcctgtatgcgtgcttgtgatctgatgcgcctgcatgagaaaacaccgcgccgtttgtatgaagaggtttacataacaattcatcccggtacgttatcgcgcgatggtacgtgggcgacgagactgatcagcacctgcgatcactgcgggctgtgcaaggaggtctgcccgcagcatattgattttagccagtttttgctcgaaagtatgcgggcaatgcggaaaaagggcgcgatgccgtggccatttcatgatttctggctgcgcgacatggcgtatgcctccggaaaagcggggcttacgcggaaaccggagaatgttaagcagagttcctacgccttctttccgggatgccagctcgccggttcggatccgcgctatgtgacgcggacatatgagtggctgcattccaaaaagccggatgcggcgatctggatgacctgctgcagtgcacctgccgagtgggcaggcgaagtggacatccacgcggcacatctggaaaaaatgcggcagcagtggagagaactgggcgaaccaaccgtgattttagcctgcccgaactgccggaagatgtttgaagaatacctgccggagctgccggtcgttttcctggaggaagtgatggaagagtggggcatggagaaagatgctgctttggaaccggacaatgctgaaaagggtgaaatggaagcaggaagtacccagcaagcgcagtcgtatgccttgtttgatccctgcgccagccgctattacccggaattgcaggagagtgtacgccatctggcggatgcggcggggattacgtgggaaaatctgccgtatgacgggaaaaaggcgcgctgctgcggatacggcggacatatcgggattgcttctccgagccacacaagctatatgacaacttcccgtgcaaaagaggaggaactgccgtatgtgacctactgtgtcaactgccgggagtcctttgccggacagggcaaggaggcggttcatatcctcgatctgttgtttgggttaaatggcgcggggcgcccggcggcgacggtgacggagcgctggcacaaccgcctggcggcgaaacgggaactgcttaagacgtactggaatgagacgatcgaagaggaaacacatatgaaattagaagttgagaaggagctggaacgcaaattgtcagcgggtcagattttgatcgaagatatggagcaggtcattgaacactgtgagcgggaagaccgcggtattatcgacccggagacgggacatcggatcgggcatctgaagatccagcatatgacctactgggcagagtacgaggtgctgccggacggcggttataagctctggaatggctacagccaccgcatgaatctggaaggagagtgatgagtatgccgacgattgatggaggcggaagagatcagcggatcaaagaggcgttggagaaaaaagtcatctgccgccggtgtcaggtggagatggtgccgaaatccacattttttgactatctggggcacaatttccacaccgagatcctgtgctgcccgaagtgcggcgaggtatatctgccggaagcgctggtaaaagggcgtatggcggatgtggagagagagctggaagataagtagatagtagatataagtatgattcatgagagatgcttttggatctgaaaaggataggtgagacaggctggctgcggggatttgccatgtgtgaacatgagaacacagcccatctgcggctggcttcatcatgggagaattgtaatgaattgagataaggggatgaaggacgatggtaatgaacttacaggacagagccctcctgccagaagaaatgcgccatacatacagtgtctgtccggtctgtttaaaacgcattccggcaaagcgggaagagcgggacaggcagatatatctggtaaaaacctgcccggatcacgggacattttccagtgtaatctggagaaataagcgtaagtttgccgactggcgcggggaacgtccggcggtgggagaaaatgaaaatctaaattgcccggcgggctgcggtctgtgtgcggagcacagacgcgccacctgctgtaccttgctggagatcacagcgcggtgcaatatgaactgtaccttctgttttgcggagccggacggggccaaggatccgtccttagacacggtaaaacgctggatcgacgatctgacggagccgggaaagacacttttgcagctttccggcggggaaccgacagtgcgggacgatctgccggagatcgtggcgtatgcgaagcaggttggctgtaaatatgtgcagttaaacagcaacggtcttcgcctggcggaggacgaggcgtttgtaaagcgtctggcggatgcgggactttcgtttgtatttatgcagtttgacggcgtggacgatgccgtatatgaaaaactgcgccgccgcccgatgctggaagtgaaaaaacgggcgatcgagcagtgcggccggtatggaatcggcgtgacgcttgttccggtccttgttccgggcgtcaatacggagcagatcggggacatcatccggtttgccattcagcggtcgccgtatgtgcgcggcgtgcatttccagccggtcagctattttggacgtatcccggagcttccggcggatgatgaccgctatacgctggatgagcttctggaggcggttgtcagccagagcggcgggcttatcaaagaggaacagatcgcgccatcctgctgcgatcacccgatgtgtgggttccacggggatttcatcgtgatgcctggggataaattgatgccgctgacaaattatagtggaaaaaccgagacagaaccggagggcgaaggctgctgctgcggtccggatccggcggagaagaaccgtgaatttgtcggacggcgctgggaacggcgcgatctggaagagacgtgctgttgtggagaaagtcagccggaaaaagaaagctgctgctgtggcggaacccagccagaaccagaaagctgctgctgtggcggaacccagccagaaccagaa

SEQ ID NO: 10989 - DNA, 76773 bp, Unknown
  gut microbiota DNA sequence
tccacaaataccggttttcttaattcgacaaaccggtattgctcaatcgtttttctccgttaggagaatatacaatccataaataaaaagaacaaggaataaaaccgtaggaatcaataatccattttctaaaatacttacaatcattcttccaggtggcgttacccattcagttgctggattttgcattgccactattatcattcccacaataccaacaacaccacttaatgttaaaaaaccaccttttatatttctactcataatcattacctcctcgttaaataccgattagtataacagtagtctaacacatgttgtttaaaaatactacagccaagctaatgtctgtaatttgccctaaaatttcattttatggaatttggactacttgattttctaatcgcatacgcaatttgtgaaatgtatcattatactgttgatacatcagacacacaaatgtaaattgggacttttatttttataacaaatcatattctttcattttccctcaaaccgtctcatacactgtactaaacgaattccggggattttttatgagctcaaaaacaaaaattgtcgtactccgcatgaaagagattatttatactgctatctttatcggactggggcttcttctcatcgcacttctcctcatcatgttccgaccgggcaggaagacgcagagtgcctccgctcccgctgcggccggcatttcctatctgcctggtatgtacagttctaccctgacactcggcagccaggcagtcaacgtcgaagtcacggttgattccacccagatcacctctgttacctgccgtcctttaagtgattccatcgaaactatgtacccgctgctctcctcttccgcttcgcatctctcggagcagatcgtgagcacgcagtcgcttgaaaatctctcctttgaaagtggcagccagtatacctcacaggcattattaaatgtgatacatactgcattagcaaaagcaatcctttaaatttcgtatagcataacatcaaaaatttcaaagaacaccttcatcggatgctttagaaaagcaccttatcttttaaccaaaaaaatccggctgaaccatcttttcaaacggttcaaccggactttttatttccgtattcttttacgttatttactgaataaccttaaccgggcacttcgctgcacaagctccgcagtttacgcacttctcataatcgataacagctacgttgttatccatatggattgcgtcaaacttacactgcttggtacacagcgtacagccgatacagccaacctggcaggctgccttgacagccggtccacgatcgtgggagctgcactgtaccagatgttttgccttgtacggtaccaggtcgatcaggtgtttcgggcaggctgccacgcaggcaccacacgctacacacttctctttgtctacaaccgctacgccgtctaccacgtggattgcatcgaatttacatgccttcacacaggttccgaaaccggtacagccgtaagaacatgcctttgcaccgccacccggtacaacggatgccttcgcacagtcctcgataccatggtactcgtactgtacttttgtcttgtcgcaggtacctttacatttaacgaaagctaccttcttctcagaggaaccagcctctacgcccatgatagcagcgatcttctcgccaaccggagcaccgccgaccgggcaggcattaaccggagctttgccctctgcgatggcctttgcaagaccatcacagcccgggtaaccacagccaccgcagttgttgcctggcagctcttcacgaacagctgcctctttttcatctacttcaactttaaatttcgcgccgaacagacccagaccgacaccaacgatgatgccgactgccgcgatcacgacagcagcgataatgattgaattcatatccattttcgtctcctccttctacagtaatccggaaaatccgagaaatgcaatcgccatcagaccagccgttacaagtacgataggagatccctggaagttatacgggatatcatttccctcgatgtgctcacggatacctgccagaagcacgatggagatggtataaccaacggctgtaccaacaccatttaccacgctctgtaaaaatccatatccgttctggacgtttgtcagggcaacaccaagaacggcacagtttgttgtaatcagcggaaggaatacacccagcgcgttatacagggaaaccatgcacttctttaagaacatctcaacgatctgaaccagtgctgcgataacgagaatgaaaacgatggttttcaggtaatcgataccaagcggtgccagaacgaactgataaatcaggtttgcaacgatggatgcgatggtaataacgaagataaccgcaccacccataccagctgctgtttcaacttttttggatacgccgacgaaggagcagataccgaggaactggctcagtacgacgttgctgaccagcgccgagcttatcgcaataataagtaattctttcatcacttctcctcctgttccttcttaacttctgcatcatgaccagcacagcttaagcagtcgccgctgcagcagccacccttcttcttctcttttacggaaccgtttgttgcacacggcatcttcagacgattctgaagagcagtcaggcaagccagtacgaagaatgcacccggcgccaggatgaagattgagatcggctgataggaagccggcataatctggataccaaagatagtacctgcacccagaagctcacggaaagaaccgatgagtgccagagcaactgtaaatccaagtcccataccgataccgtcaaatgcagacaggatcggaccgttcttcatagcatatgcctcggcacggccaaggatgatacagttaactacgatcagcggaatgtaaagtcccagggaagcatataagcttggaacgaaaccttccatcaacatatctacgatggttacgaaggatgctacgactacgatctctgccggcagacgtacgccgtccggaatgatcttacgaagcaatgcaatcagaaagttcgccgcaatcagtacggcggttgtcgaaagtcccatgccgacaccgttgatggcggaagtggttaccgccagggtcggacacagacccagcatctgaacgaaaatcgggttttctttccagataccgttatataagcgctctacatatttattcataatctttccacctcctactgtgccaggcagttagccacgaaatagatagctgcatctgtcgcgttggtgactgccttggaagtgatcgttgcaccactgatggcttcaatctgattatctgcagacgcgcctgtctttgtaacttccaggttctcagctttcttgccgataaactgatccttgaaatccggttctttggctctcataccaagacctggcgtatcgctgatgcttaagaaaccgataccggtcagctcgccctcgttgctgataccaactgcgatctgcacgttgccgccgtagctctctgcggaggtagaggtaatcaggtaaccgatctggttgccgcttgcatccagcgcttcttttgcatcattgatggtaacttttccaaatccccactcagagatgctgtccgctgcagcagttactgcgtcagccagctcctgcggttcatcaaagcttgccgcatccgggtaaacttcctgataagttttagtagctgctgcctcctgtgcctgtgcaatcggatccagcgtaatatcatgtactgttcccagacagataccagctaccagagtaataacgaaaaggatgattgtatttttgataatctggttcattatttcttctgacctccttttccaaatgctgtcggaagcgtatagcgctcaatcagcggtaccagcaggttgctgaagatgatcgcataggaaacgccctccggagaagcaccccagagacggaagattccggttacgattccgaggatcagtccgtatacgatctgtcccttcggagtcagaggactcgttacataatcggttgccataaagaatgcaccgaagataagaccacctgcacagatctcactgagagaataggtcaggttgaatccaccaaacaggaatgtaaatacaaatacggttccaatgtaaatcagcgggataaccgggctgataactttgcggactaccatgtaaatagcaccaatcagcagggcaattacagatacctcaccgatagttcccgggatacgtccgattaccagggatgccagatccactgtctcaccggctcttaactgtgccagcggagttgcacctgtcagactgtcaaatccaagctttgcggatgagaagttattcataaacagagcgaaggaagtcagaaggaaacatctggctgccagtgccgggttcatgaagttctgtcccagaccaccgtaaagctgttttacaacgatgattgcaaagaatgcaccaagaaccgggatccaaaccgggatttccggcggcatattcagtgcaagaatcatgccggtaacaactgcactgccgtccgaaatcgtaatcggcttgtgcattaatttctcataaagatactcggctgccacactggcgatcacggtagcgatcagaaccagaagtgcattcatgccgaactgccatacaccataaacactggcaggaatcatggcgatcacaacgtcaaacatcaggcgctgtgtcgtaactccgtcacgaacgtgaggtgatgacgatacttttaataatttttccatttcttcccacctcctactttctgcggctggctgctactgccttacgcatctctttgaatgcctgggtcagcggccgtcttgccggacaagcatatgcacagcatccgcactcaacgcattccatgccgtttaagctctggaatttctcaaggtcgtgagccgtagatgccttcatcatcagcggaggtacaagatgctccggacaaacgcctacgcagcgtccgcagcggatacatgctgacggctccatcgctgctacctgatccttggtaaaggtggtcagagcagatgaagtcttcgctaccgggaagtcaaggctgaaaagagcctgtcccatcataggaccaccggaaatcatcttctccggttcctgtttaaagccgcctgctgcctctaccagtctctgatagttggtaccaaggcgtacctcaaagttctgcggctctgcaatggcatcaccggttaccgtaatgatcttgcggatcagcggagttgtcttgcatactgcattataaatagaagcaacggtatcaatattgtctacgatacagcctgcatctgccggcagcatggaagaattgatctcacgtcctgtcactgcatagataagtgtacgctcaccaccctgcgggtacttggtaagcagcggacatacttcgattctcggctcgtcctttaccatctccgtcagcttcttgatagcctccggcttgttgttctcgataccgataacacccttcgcattgtcaaacagctgaagcataaccttcaggccgccgataatctgctccggacgctccatcatggtacgatagtcactggttaagtacggctcgcactctgcaccgttgacgataacgtaatcaattgcgttctcatctttcggagtaagctttacatgtgtcgggaaaccagcgccgcccaggccgacgataccggcatccttaacgatcttacggatctcttctttcgacagctttgttgcatctctgtctgttccgaagccctcaatcgcctcttcttcaccgtcattctccaccaggattgactgaaccattgcaccattggcaaccagcttggactcgattccctttaccgtaccggaaacagaactgagtacgtttgcggaaataaatccgcctgcctctgcaatgatctggcctttcagcacgtgatcgcccttcgctaccagtggtttcgcaggtgcgccaatgtgctgggacagcggataaaccatgatctcgccctgtaacggttcgagaaccttgatcggcttatcctcagacagttctttaccctcatatggatgaatgccgcctataaatgtagccaaacccatcaattaaaccctctttctcttactaaattttccttcatcctccacccattcacctcccgtcagatgccttttctgccgaaattgtgaaaatattatcgggcgtaggagctagaatctaccgcgtatagtataacacaggtaaaaaaaattcacaattgaaaaatgaatcttctgcccccttcactctgtataaaaattaatacaaatggttataatatagcttttgtttatacagaatcaacaaaactgtgtaaaaatcccgtaaaactttcccttaaatactatgtcaatagccttggcgaaaaaaggaaagtccggcggagtttgcctctgccggactttccttttttctcgttacctaaagagctgcacagtctactggaaaaacttactccagtacccctgcacaaaaataaacagcacaatcagcggaatgacatatgtcacatacgctcgcacctggcgcgggaacttcacgccttttccctcatttgcctccttgagaaaattctcaaatccccatccataccggctggtacagaacatcaggtaaacgagacttccgagtggaagcaggttgttgctgacgatgaaatcctcgagatccaacacgttgctgccctctccgaacggcatgaaaccactccagagattgaaacccagcacgcacggaagcgacaggaccgcaatcaccaccagattgacgcagactgcctttttgatcgaacagccagtcagatccgttgcaaaggatacgatattctggaataccgctgtgaccgttgatgccgccgcaaaggtcataaagacaaagaacagcgtgccccagaaacgtccgcctgccatgtggttaaatacattcggcagcgtgatgaagatcaggcttggtccctgtcctgcctcgatgccgtaagccgcacatgccggaaaaatgataagtcctgccataaacgctaccagcgtgtcaaggaccagtacattgattgcctcgccggtcaggctgcgctctttatcgatataacttccaaaaatcgccatcgcaccgataccgatactcaacgtgaagaacgactgtcccagcgccgcaaatacgactttgccgacaccaacctcctgaatcttgccaaaatccggctttaagtaaaattcaagtcccggacgtccgccttccatccgcaccgaattgattgccagcacaaccatcaggaataataggcagaccatcatcatctttgtgatcttctcaacgccgttctggagtcccatcgcacagatggaaaaacagaatacgacacagagcagcataaataccgtcatcagtcccggatttgccagtacagagccaaattcccctgctacaccgtccgcatccagacccacgaaatcgcctttcgccatcttgaacacatacagcagaagccatccggctaccgtcgtataaaacatcatcaggacatagttgcccgccatcgcgaaccatttttcaaaatgccacttagtaccctttggctccagcacatcaaatgaaagcgccgcactcttctggctcgctctgccgaccgagtattccataacgatgatcggaagacctaaaagcaccagaaatgccgcataaatcagtacaaacgccgcgccgccatactgaccgacgatgtacgggaatctccacacatttcccagaccgatcgcacaacccgcggaaatcaggataaatcccagccgagaggaaaaacgttctcttcccatttctacttaccttctccttttttatttctacaggcccacactgacaagagtcagacgggcgcaaaaaagaggcgcctccgcaaatcccggtaccagcccgaatttcggaaacgccaccaaatggtattttactatattctgttttaaaagacaagttttcaggtgctttttatccttcaaacgtctcgacttcctcccggttcggcaccgacggagctgctcctgggcgggaaacggcgatcgctgccgcttttgccgcatgttccagcgccgtcttcgggtcttcaccgagctgtaagccgccgataaaataaccggtaaatgtatcgcctgccgccgtcgtgtccacaaccggcactttatagattccctgacgaaggactgtgtcaccatcgcggtacacggaaccatcgccgccgagtgtcaggacaatcttcgcctccgggaactgttttaccagtccgttcatcagcgcctgcggatctttggttgcctcaatgccgcagatatccgacgcctccacctcatttaataagaagtaatccacatattccagcggataggacaggatcttcgcattcatcggggacggattcagaacgatcttcatgcctttttcatgggctttctccatgatatagccgatctcgctgatctcattctgtaaaatcaggaaatcgtccgcctcaaactgtgtcaggacgcgatccaccatttccctcgtgatccgctggttggcaccgccatacagcagaatgcagttctgccctgccggatctttctggatgatcgcgtgtcctgtctgcccgtcgagatgctcgatcaactccgtgtggacgcccgccttcttcatctgctcgataaggaaatctccatccccggctccgacagctccggcgtgccatacgtctgcgcccgccttgctcagcgcgatcgactgattcagccctttgccgccgctgaatacctgcagcgactcggaggacatcgtctctcccgctcttacaaaatgatccacctgatacgtataatcaatattcagtgaaccaaaattcaataccttcactctgctcccctccttgaccaattccttcaaaatctgccgccggcatctttgatgtatcgcttaagacggctgtattcgcgccgtactctcccgtactaccagttccggcgcaaagatcaccttgctctccggtcttttatgttcccgtatctgtttcagaagcagccttaccgcctctcttcccatctcccgtacctgctgccgtatcgttgtcagcggcacctccagcatccgggcatagaaaacgtcatcgtatccgacgaccgaaacatcttccggcactttctttctatattccttgagttttctgcatacgccatacgctgaagcgtcgttgcaggcgaaaatcgccgtaaaatcctgtgaaatgagcttttcgaccgccgccgcgccgccctcctgcgtatactcgccggcacagacgagacgttcatccactggaattcccgcctcctccatcgcccggcagtagccatggtaacgggcctccgaatccatctgggtcgcatgcggtcccacaacgcaggcaatccgccggtgtccaaggcttaacagatggcgcgccgccagataaccgccgatctcatggtcggtaccgaccgccggacagttccgaagctccgggatccggtcaactaccacatagggtatgtggatcgattccagataatcaatctcctccgccgccatctcccgcgtattatctttagccatgataaacacaatgccgtccgcgcctttatccgccagaagatcgatatactcgcgatcccggtcataattatcattcgtgttgcagagaatcacactccaaccattttcgcggcacgcctcatcgatcgcgcgcgccatattggcaaaatatacattggaaatatccgggacgataaatcctatggtcttgctctgccgctttaccagactgaccgcgagctggttcggacgataattcagttcccgcgccttcgctaggatctgattctttgtctcatccgagatcttatatcctttcccattgagaaccagtgagattgtcgtcacggaaaaaccagtctcagcggcaatatccttgatggttgccctcactcatccacctccgatgcgatcagatccatgagaacctgaatggatttctgatatttttctatctcgacccgctcatttggcttatgcgccatacctgcctcgcccggaccaaataagagaacggctgcatccagcttgtgttccaccaggatcgaagcatctgtaaagaaattaatcccagtcgtctccaccggaagcccttttttctccagttccttcgagagctgtttcacaagcggatgggattctccaatctcgatcgcccgccggtcattgacaatccggcagctgacgcggaatttttcttccgatgtaacggaacgcgccgccgcaaacgcctccgcctgaccgactaccatctggcttgtcagtcctggtgtcatacggatatccatgagaatccggcaggtgtccggcgtcatatttggcgccacgccgccggaaatctgcgttacctgcgcggtcgatgcgccgagaaccgggtgtgtgaagcttttcacatatgtttcaatctcacctgtcagcgccatcgcctgttccacggcattgcagccctcatgcgggtatgccccgtggctcgtctttccgtgtgcttctatctccagccacaggcagcctttctgcgccacgcccagcctgcatcccgtcggttctcctatcagaagcgttccaatcgacgtctccgggacttcctttaagatctccctggcgccgatgccgcccttttcctcatcacaggttccgaggaaatggatcgtacgcggcaccggacgaccggattttttatattcacagagcgcgtacaccatcgcggcaagcccactcttcatatcgctggcaccgcggccatagagaaaaccgtcccgttccaccggaaccgccgggtcagtcttccattctccggtatctccgtaaggaaccgtgtccagatgcccgttccagaagatcggagcgtcatccgactccccctcaagctccgccagcacattggcatgtgtcgcgtcaatccgctgtatatgtgcagaaattcccgattgttcgaaatacttgcacaaatattctgccactgctccctcgtcatcccgtccattgacactccgaatggtcagaagctcttttaaaagtttcaccgctccgtccatacgcgctctcctttttcctgctatcttatttctgaatcagccagtctgcgatattctgccacaatttattgtagtattcccactcgcagaattccggcggtgcccagtgcggtgcacagtcggttgtgacaacaccactgcgcccttttccataagaagcaaatgcgataaacggatcgccctctacagtaaccggaacctctgcctccggttttgcgattaccttattgtaaccgagaacctccggccagtcggtcggaatgccctttaaagcttcatgctcgcccacggttaccggttttacaccctcgcagtgttccatacggtcatcgaccgtcagaacctcgactggaagaacctcctgtacggctgtgtcatgccatttgccctttgcatccacgccggagaaggtcagataaccgccgaccatcagaagagcgccgccatcgttgacatagtcgcggatcagattgcagcggttcggcattttttcactgcggttaaacgtagcgcccggcagaagcagggtgtttgctccgatatcggacagaattaccagatcatactgtttcagttcttccattgtaaatggaaattcctcatttgccagatggttcggaaggaaggttacttcgtagccgcctgcctccaatgcagctttcagccatttctctcctgtctcataggtagaggtataaaacgcgtcaaagccctttacatgggtggtatagctcatccaggactcgcctgccagtaaaactttcttgctcatatttttatctccttatatatttatcaattccttatttcttctctccccaggaaagaatcagtttcgcatacaccagaatcgcttccagataggaatcgagcttcagccactcatccacggtatggcactgtgcgccctcgcccggtccgtactggatcgtcgggcatccggcaatgttgcgccacaggcgggaatcacagccaaaatgggatccttccaccttcacgctgcgcgaaagtgcctcactgtacgcctccttaaaggtgtctaccagcggatgatcctcctccatctcaaacccatgtccggtctggtaaatggaaatcttcggcgggtgtgcctccatccacgcgtcggaacggctgatccgctcaacgacctctgtaaattcctttacaaccatatcctgattcatcagggtaggaacatagtggacgcaggtagaaaaactgcactcgcccggcacggtagaaccggcggttccaccctcgatcacgccgatatttaagctcggcggcggaagcaggcggtggcggatcgtcagaagccagcggtgctccatctcatttaacccctgaattactttgatcgccttctcgatcgcgctgacgccctcggcttttgcaccggaatggcacgcttttccttcaaaatcaaccttaaagaatacccagcccatatgcgccagaatcagggtatcgtcggtcggctcgcagttgacaacgccgtcggctttcagaccgcgcattaccgcctggatcgagccattgcctccgccttcctcgtcacacacggaggtaattgtcacatcgcccggcagctcatacccggcatcctgcaaaagctttaccgccatcaccgatgccatcagaccgcccttcatatccgtgcagccgcgtccgtacatcttgccatcccgaattaccggctcaaacggcgggttcgtccagccgtcttccatatccgccggcataacgtcaatatgaccgttaaataacaggctttttccgccctgttttcctttaaatgtcgcatagacattggcacggtcggtctggttgtgccccaggtttccttcctggtgctttttgtagctttcctgaatcacagcctcatccatcggatccaccgtgatctcgtcggctcccatcgattcaaacaggtttaccatatactcctgtccctgtttctccagaccaccatcgattccgtgccctaagtcatgggtatcaattcccaccagattcttgagttcttcgatatatttctctttgttctgctctaaaacttctttcaggtctctcatctatatctgcctccgaacacaagtattataaactatgcctcgctgtatcttctcagccctgcctcaacgatatcccagaacttcgccgcatcgatatcgatcgctacgtttgcagtcggctcctgtccgccgtaaccgaagaaatcgcagttagtacgtccgtaggactggacgctgcggatgtcaatgtccacatgcatcggtttcagggtcacaacgctcggatcaatcagccatgcgatcgtaaccggatcgtgcagaggtccgccttcccagccaaatacctctttctgggtcttgcagaagaagcgcatcagatccgcaaagagcttggatgccttattgcctatcttctccatccggtcaacgatctccggatagcacagtaccttgcgggtaacatccagacccatcatcgtgattgggcgtccgctggtaaagcatacatacgctgcatccgcatcggcgatgatattgaactctgccgccggagttacgttaccattggtatacgcgcctcccatcaggacgatctgtttgatcttcggaataatcgccggttccatccgcatcgccatcgccagattggtcatcggaccggttgtcaccatcgtgatatcgccatcggactccatcagggttttaacgatgaaatcgactgcatgctctttctctaattcttttgtcagcggcgggaaaaccggaccatccagccctgtttcaccgtggatatcgcccgctatcattttttcacgcaccatcggctgtccgcagcccgcatacactggcacatccacaccgagccactggcacacatttctcgcattaatctgcgttttctccagcgtctggttgcctgctacgactgtaatacctaacagatcgatcttgtcactgttcgccgccagcgtgatcgcgaccgcgtcatcatgtcccggatcgcagtcaagaataatttttgtcttttccatctgattatgtcctccttatagtgttttatctttcttcatcatcagcttcccacatgcagggatgattctctcttcttgttggctgaaatcttcgcaatcatggaaattgccagtaccgcgatggtcacgatatacggcatcatcagaacgaactgggatggaatgccatatgcctggagacgggcaccgacggaatctgaaaatccaaacagcagacagcccagtgtggtcagaaccgggttggcaccgccgaaatacatggctgcaacgcccataaaaccacggttgttggtcatgttctcgataaactgggtactgtaacccagggaaagatgagcacctgccagacctccgatgagaccggaaagcagcattgcctgatatttcacagcatttactttgatacctgccgtcttcgccgcttccggaaactgacctactgcacgcagacgcagtccccatacagttttatagaagaaaaactgaagcaggataatcagaacgatggcaaaccactcggtcacgcaccagttgttaaacagagcccccactaccggaagattgtctaaaaatgcaacgttcacacggggaatcgccttgatatccgggcttgaaaaacttccggtactgtggaaaatcgcatttaccatgaatttagtaatagccagtgccagcatattaatacccataccgatggcgcagatctccgaattgtaccggatatgtcccactgccatgatcatagcaatgacagcaccggcgatcatcgctgccagaatgcctaataaccagcttccggtaaagaagctgactgcaactgcagtaaaagcacctaccagcatgataccctctgtaccgatatttaagatattggcctgctgagtgatagccgcacaaagagcggcaaagatgatcggagtcgctgaacgaaacgttgcataaatcagcgacgcattaaagattttatcaaaattctgcattatcgcattcatgccttatcctccttcttctcctccgttttctttttacgtttctttgcaaactggaacgcagtctccatggtcgctatgataatgaacacagctgtaatggtatcaaccagtgatttcggcacaccggttgactgctgcattcccatagcgcccgattttaaaactgccaggaaaaatgccataaatggagtcgaaaccatgttgttctttacaatcagagctgccagcataccattgcttccaagtccggttgcaaagttgttcaggaaatatccatgaacacccagaacctcgatgcatcctgccatgccgcccaacataccagaaagcatcatggcaccgataaacaccttcttagaatcaattcccacataatccgcatgggtcggattcaggccaacggtacgaatcttatagccccagctgctcttctgaagcataaaaataatcacaatcacggtgatggccgcgatgaaaatacctacattgacactgctgggtttcataaactgatacagccttaccgtaaccggcagggactgagcattggcagtacctgcgctcattggtccgctgaccagataggatgtaatataaagtgctaccgtgttcatcaaaatggtggtacatacttcatttacattataataggcacgcagaaccgccggaataaaggcccaggcagctgctaccaccatagcacctacgaaacaggccacatacagagccggcttcggaaggaaggtccagttaatgccaatataagcagctgtgataccgcccaagaaaacctcgccctcaacacctacgttaaaagcacctgcttttgctgcaactgcaaaggcaatggatgtcagcagcagcggagtaaatcctgccaaggttgtaccaagacgaagctctccgtcaaaagcacctcggaacagcgccgcatatgcatcaatcggattctccccgatcgctacgataaacagcgcaccgacacccatcgcaacgagtatcgtaataagaatccttcgaataccatttaatgtctgattcatactgctgcttcaccgtccttccctgtgtctgtaccgcccatcataagcagacccagattgttctcattcgcctcatccgcacgcatctcgccggtgatcttgccctcatggataacaacgatacgatccgaaagggagataatctcctccagctctgccgataccagcaggacaccggcgcctgcctttttcgccttttccagggtatttcgaatcagctcgatggcaccgatatctacacctctggtaggctgggatgctaccagaagcttattgccaagagatacctcccgggctactacgaccttctgtgcattgccgccggataaggaagatgtaggaagattataatccgccgggcggatatcaaactgttctaccatttcttttgcataggtatcctgtcctgatttattcatcatgatgcccctggtaaatggaggctgatccaggcggactgcgatcagattttcctcgatggtcatggcacggttcagacctcttgtatttcgatcctccggaatatgggaaagaccgctctctctcacttttctcggactctgattcgtaatatccttgccgcaaagaaggatcttgcctttctctaccttgcgaagtccggtgatcgcctcaaccagctcactctgtccatttccatcgatacctgccacgccgacaatctcgccggtcttgacatgcagggacataccccggatcttcgatgtctccttctgactgggaatccacacgtcctgaacctccagaatcgtatctcccgcctcagaataagccttatcaatgtttaagaatacttcacgtccgatcattcgtttggtcagatccagcggagaggtttcctctttattaacagtgcccatatattgtccctgacgcatcacagagatgcggtctgatattgccataacctcattcagcttatgagaaataaagacaagggattttccatcctgtttcagattattcaggatttcaaacagacgttccgcctcctgaggggtcagaaccgctgtaggctcatccagaatgatgatatcagcacctcgcatcaatgtcttgataatctccacacgctgcgcctcgcctactgaaatctggcttaccttcttatccagctgcacgtccatatgatactgttcaatatactttttaacttcttttcttgccttgtcaaagtcaattgtcaatccctttttcggttcaaatcccagaataatattctccagaaccgtcagctcattcaccagcataaattcctgatggaccatgccgacaccgtgctcaattgcaagcttcggtgtgatggttcccatcggttcacctttgacgataatctcgccctcgtcaatgggatacatgccgtacagaagcttcatcatggtggatttaccagctccattttcaccaatcagagaatgaatctcgccctttttcagagtaaattcaccatgctttaccgcctgaacctgcccgaaatttttgacaattcctttcatctccactacgtattcgttcattcgatcaccctctcgtccggaaatgcctgacggctctttccaagaaaaaacattttgttgaaaatgaaggggaacctgaaagaattcagatcccccttcgccgccaggtttcactcgctcccggccttgtctttatcaattatgcctgtgggccaaatccttcatagttttcaactacgatctcgccggatttgatcttctcggcaagctcatcacacttatcaacgatatcctgcgggaatttgtcgcccagagattctttgataacagagaaatcggtcaggctgacaccgccgtccttcaatgccagatatttggttgtgccgccctcaaaagttccctctactgcagactggataaccagatagcaagcattatcaactctcttaaccatggaagtaagaacatgtccaggctgatcggaatcctggtttaagtcaacgccgattgcgtatttgtcagcttcttttgcaccttccagaataccaacaccggtaccggatgctacgttcatgacaatatcagcaccctgctcatactgtgctaacgtcagctctttaccctttaacggatccgtccagcttcctgcaaaagcctgaagaatcttgatatccggatcgatatacttcgcgccctgctcataacctgtatagaagtcatgaagtaccggaatatccataccgcctacccagccgatgatatgatcttcattgacattcgggatatcggtcttggtggtgaacatagctgctgccgcacctgccaggaaggagccctcattctgagcaaagctgatggactcaacgttcggcagatcaacggttgtatcgataactgcaaacttggtatccggataactggatgcattctcagtgatataatctgcgatgttggaagaagcaccgatgattaaatcgtagccgtcatcacaagcctgaagtaggtttgctttccactcttcagcagtggtaccctcaaggctcttaagctcgatgccgaaatcctcaactgctttctgtgcacccatgttgcaggagtcattgtagctcttatcacctaagttgccggtgtagacaacacacacacgaagcggtttgtcagatttctctgaagcgtcggctgcctttgtctcggtattgctgctgtcagctgccgttgtctcagcggtacttccgccaccgccgcaggctgttaagctggcacacattgctgctgcaagtacaatgcttaatgttctctttctcattctttcatcctcctttttatgtgaaatacgttatccgccggaccattcctttagtaaaacgtttttccattcgttcaaaaaaaataaatccttttttcatatttgctttacagttattttacaatcattcccactgttttgtcaataaatttcgtataaaaacgattattttttaaaatattgtcaaacttttagcaatattccttttttcggtcttatgcaaaacaaaaaggaatacgtttctctccgtcctggttgtacggtaaaacgcattccttttcaaagttgtattctattttcctttgtttcgacgccatccggcatttccccagatgatttttgtctgtttctgaggaaatgcattcgttttcggaacaattcacacatttcatgcaatgtaacagattgcttgtctgcacgatatctcgcaaaaaagacaacttaatttttattaaatgccgctttccccggatactgtgcgccggttcccagctcttcctcaatccgcagaagctggttgtattttgccacgcgctcactccggctcggtgcgcccgtcttgatctggcaggtattcaatgcgaccgccagatctgcgatcgtcgtatcctcggtttcgccggaacggtgggatacaatcgccgtgtaacctgccttatgtgccatcttgattgcctccagtgtctcggagacggatccaatctggttcagcttaatcaggatcgaattgccgcagccgagacggatacctttttccaggcgttcggtatttgttacaaacagatcgtcgccgaccagctgcacctgtccgccgagttctgcggtcatcttctgccagccttcccaatcctcctcgtccagaccatcctcgatcgaggcgatcgggtatttcccgcagagctgtttccagtgtgcgatcagctcctcggaggtgaagtgtttgccactcttcggaagcagatattcgcccttcctgccgctcttccactcactggatgccgcatccatcgccaggacaaaactctcgcccggcttatatccggctctctccactgcctctaagatgcactggattgcttcttcgtcacttcccagatccggtgcaaaaccgccctcatcaccgacagaggttgccagtccgcgctctttaagcaatgctgccagtgcatggaacacctcggtacaccagcggagtccctcacaaaagctctctgctccaaccggcataatcatgaactcctgtacatcgatggtgtttgccgcatgcgcgccgccgtttaaaatgttcatcatcggaaccggaagacggtttccagacacaccgccgaggaaacggtacagcgggagaccatacgcattggctgctgcccgtgcgttcgcgatcgaaaccgccaggatcgcattcgcgcccagcttggatttatccttggttccgtccgcctcgatcatcgctttatcaaccgcatagacgtccgccggatccatgccccttaacacctctgcaatcacggtattcacattctggactgctttctgtacgccctttccgccgaaacgcgacttgtcgccgtctcgcagctccagagcctcaaattcacctgtcgatgcaccgctcggtgccgcgccgcgtcctatgcttccgtctgatagataaacctccgcctccacggttggatttcctctcgaatcaacaatctcccgtccaatcaccttttcaatttccagatgtttcatagcttgtccctttccgccgcgtgggcttatgtgatttctatttttgtctaacccgaaatcaggaaactttctgctttttattatcggcgtttttctgttttctattcatagtctccacggggcttctctgccccacgtccggcagggcaaccgtgtccacgcttctttctttcacattcataatcagcatctgcaggcggttttccagattggcaaagctcacatccggatcgtagtcaagcggcaggatctgggcgtccgggtacatttcccgcattttttttacgatgccgcgtcctaccacatggtttggcagacagccaaatggctgtaaaatcacaaatgcccggcagccgtgcgccgcatggtgcaggatctcacccggaatcagcacgccctcgcccgcatcaaaggtgtgcgggatgatcgggtcactttcctttaccagttccggcaggcggcagacaggcgtatagagcggatgctgtttcgctatccgatccgctgccgcgtgcgcagcgtcaaatacccggttcgccacatggtaccagtttttcttgacaaacggctttttcagatgatacgtccgaatctgctcatcctggcagaaatacgttttccggataacatccgtcatccgcgcctcaataatctcaaatccatttttctccaggtagcgctcaatctcatgattcgcgcccggatggaaattgaggagatactcgccgatgatcaggacgcgcgggcgcggctggctccggtcatattcgatcgcattcatccgctggatcgcctttttaaagcctcgcagagcgcctgaaagcccatgctgctccagaccatccacgacgaaatccatcgcctcgccaaatgcctgatcactgcttccggaaactttctcatacgggcggatcttgcgaagcagctcttccagaatatcgatcatcggaagcgctcccgccagacggatcgccgacacaaggttcatccggaagcccggatgcagatcatgataatcgacgtcatcgttcgtcagaatcgccacctccgggtagccggcgtcgtcaagcgccttgcgaagcagcgcactgtaatgggtcaggcggcagtcaccgatgtattttcccataccgatcgccgtctcagatggcacatactgaccactccgaagtgctgccagcgcctcgccgatgacaatctgcgccgggaaacagatatcgttgtggacatactgctttccgaggcggatcgcctcttccctgccgaccgccagcggaactgcccggattccctgtgtcttcaacgccgccgacataatccggcagaacgcgtgggaggtgttcgggaccagaaccgtgcgcttcttgcggtcttccacctcaaatttaaccggatatggatccgaaagttcgtgaacctgccaggatttttgaatgtctggtcccagcgcagccgtcccgcattcatttccgccgcccgcattctcctgtcggcttgttccaggctggttttgcagcctctccgccatctcccgcttcttccgccgcatgttgatcgtctccaggaaggaacgcaccctgatccgcagcggtccctgtacctcgctctcgtcaagtttcaggatcagcggtgattttccggagattccccgcatcatacgctggatctcatccgacaaatatgcatcatgcccgcatccaaagcttacaaactggacatattccagattctggctctgtgccgccagaaccgcggacgccagtatccgcgcgtggtaattgtttacgacatccagacggctgtggcttaaatccacattttcaatgcccggaacagaatctgccgtcagaaccggaacgccaaactcggtcaaaagctccggcaggctgtggttgacaagcgcatcattctgatacggtcttgacgccagcaccaccgcatagcgcccctctttttccacctcttccagaaccttcgctcccgcctctttcaggcggctcccaaactgccgcatcgcatcatttcctgcaagaaccgcctttttcgtttccgacggctggatggaaaatgtctgttccatatatgtaataagctgacgttctttatcttcctccctgtaccagtaaaataacggtgcatcaaacggaatgccccactgtttctccggagaatccgagttgcggatcacaagcggatatcccttcacgactgcacacatggactcgctcgttgattccgtattttccgatccgatcgccgcaatcgacggcataaaaatacgatccactttcttctttaccagatcgcggatatgcccgtgcaccagttttgccggaaagcagacggtatctgaagttaccgcgcttaagccttcctcaaacatcttgtgcgtgctcggggatgaaatctgaatctcaaagcccagcgaacgccagaacgtcgtccagaacggcatcgtatcccagaaagcaaggacgcacggcagaccgatggttatatttcgccgcacagtatcagacacagcattcggcacaaaaccagtcttagcggatgcccgctctgaatgactttttgcagacgatgcatccccctcttccgcttgatccagataatctgcaaacaggagttcttcccgcaatttatagagatttggcactttattccggttttcggacgctattttcagtcgctcgcgcactttcacatccttcggatcgccaagaatctcgccccgctcacaacggttgttcgtgatccatgaggttccattcgaaaaccgcaccaccgcacgctgacaatggttcatacagaacggacacggcacgttcgcctcctgctgccaggtcagggactccatttgatccaaactggtaaaatgcggctgtttccggctccttgcctcttccttcgctaaaagcgccgcaccgatcgcccccataatgcccggatacggcgcccggatcaccgggcggccgacatactgttccagcgcacagagaaccgcatcattttcaaacgttccgccctgtaccacaatcctctttcccagggaatccagattcgacacacggataacctttgtaaatacattttcaatgatcgaacggcacagccccgccatgatgtcctccggcagctttccatttctctgctccgtcacgatactgctcgtcataaagacggtacagcggcttccgagcgcagccggatgctgcgaagaaaatgccttttcagcaatctcccgcgccggaatatgcagggaggatgcaaaattttccaaaaaagacccacagccggatgagcaggcttcattcacgacaatatttgtgataacgccattatccagccagattgccttcatatcttgaccgccgatgtccagaagaaacgtcgcatccggcgtgtattttgccgccgcacgcgcatgtgccaccgtctcaaccgcgtgtgtctcggccgaaaatgcgcgtgaaaacagcatttctccataaccggtcgtcccggctgccaaaatctccagccgcacgccgtgggacgcatacttttcccgcatcgcaatcagtgctttttttgccaccgtcagcggatcgccttgattcggcgcataaaaggaatccagaagttcctcattctcatctaacaggacaaattttgtcgtcgtactgcccgaatcaatacccagatatgcccgcagcgtactgcctggctgcggatatactgtttttcgttccgggcgtctgtgtctctcctgaaattccgtctgcgccgcctggtcggcaaaaaatggacgggaacggaacgtgccctccgccatctcatcgccatttccggcttcactttgtttctttgcttcctcgcgcgccgcacgcaccttctcgatccgatctaacagtccgtctgccgtggcgagcgcctcttccttcgaaaaaagcttcactgccgcacgcgccgcaccgcaggcaatcagaagttccggccggtccggacttaaaatttcctccggccgaaggtccagacgttcagcaaacacgcgcaccagcgtccggttaaaggtcagcggaccgccctcaaagacgaccggcttctcgatcgaaagtccctgtgccagaccgccgatcgtctgtttggcaatcgcatggaaggaggaaagcgccaaatctgattttttaaccccctgatttaaaagaggctggatgtcggtcttggcgtacacgccgcaccgtccggatatatcatatacggttgttccctgtgccgccagcgcgtcaaattcctcaaccggtgtcttaagaagagaagcaatctcatccacaaacgcacctgtaccgccagcacagcttccgttcatccgcatatctgcgacctgcagctcgcccgtccgtttatccctctggaaaaagataatcttcgcatcctgtccacccagctcgatcgccgttccgatttcctcgtacatggctttcaaggcgatcgagttcgccactacctcctgtacataagggatccccagctcttccgagaggtgctttgcgcccgaaccggtcatcgccgtcagaaatgaccgccccgcaagcgtctctttcaccaattttacagctctcgacacactctgaagctgatccgagtgatggcgtgtatagtccgaaaacaggactttccccgttgccacctccatcactgccaccttcgtcgtcgttgagccaacgtcaattccgacgagaatctgttcctgtctgttttgtcccttctgttccattctgtatattctaactcctttatcccagatgtctgcaaacttgtgcggtcattctatccgacacaagcagcctgcgccctgtcatctcttttctcttcatcttaacaacttcttagcatccgccaaaacatgaagaagaggcatacggtttttccccgcacacctctttaccgtatggatctgtacgcatctgccttccagcattctgtacagccataaatatgctacattctaacaaatttaaaataaaaagtcaattcccgggaatttcaaaggtgccgtaagaaaacgtggtggcagcaggaatttgccgtatttaaatgcgaagccacggcaaattccgttactgggcacgtatacgtgaaccgtaacacggtaacctatcatctgcctgttagcgcatcagccctgcgtagagctccgtcggcacatacgcctccacgtaaatgccatcctcccggtactcttcttttaaaagctgaccgtatttgcggatcgtctggatgcgtccggcttcctggtaggaaaataccttttccagataaatcttgcggtttcgcagaatcatttccagaatatccttcagctcatccagccccgcgcccgtcttcgcagaaatctgcacctgataatcagaatgcagatctttcagcgtctccggatgctccacctgatccatcttgttaaagactgttaccaccgtcttatcgccgatctccagctgacgcaacgtatcatatacgacatacatctgcgtgtccatctgcggattcgacgcatcgaccacatggaggacaatatcgctataacgtgcctcctccagcgtactcttgaacgcctcgatcagatggtgcggcagtttgcggatgaatccgaccgtatctgtcagcaggatctcctgtccgctcgccagctttaatccacgcgtcgtcggatccagcgtcgcaaacagtttatcctgtgccaggattcctgcacccgtcagggtgtttaaaagcgttgacttaccggcattcgtgtagccgacgatcgccgccgacagcgtatatttccggtcgcgctgttttctcgtcacctcgcggtggcgtttgacatcttccagttccgactttagctgcccgatccgctcatgaatcagacggcggtccatctccagcttcttttcacccggtcctctcgtaccgataccgccgcccaaacgggacagggaactgcgcagaccgaccaggcgcgctgcgcggtaacgcagctgtgccagctcaacctggatttttccctcgctcgtcgtcgcatgcgccgcgaaaatatcgagaatgaccatcgtccggtccattaccttcgtatccagcgccgattccagattgcgaagctgtgccggggacagttcatcgtcgcagatcacgccggttgcgcccatttcccagaccatctcccgcagttccccgatctttccactgcccagataggtgcctggatgaatcttctcccggttctgcaccagacgcccgatcgccgtcgctccggcggtatccgccagctcctccagctcatccaaggacgcctccgtatcatcttcatcagaggtgctgaccgccaccagaatgacgcgctcctccagttctttcatatcgaacaattctgccatattacctccaatatttaccggctttccagaaaacggatttccctctgcacctccggtgtgtccgcaccggctgcctggcactccttaaactgttccagcgccttcgcaaaatcgccctctttctcatagagaaccgcaatattctgccggattaccagcgccgtctcactgtccgccagcgaaagcgcctcctcataatgggacatcgcgctctcataatcgccagcctccatttcactgatcgcaagctgattataaatctccggccccgacacgccgcgctcgatcgcctgattgcagtactgggctgcgagctcactatccccggcatcccgcgccgccgacgcaagcgccgtaaacgccagactcacacccggagccgcggcgctgctctttttgctgttcttcgccttttcctccgctgccgcaaaatccttttcggcatcctccgcctgtccggctgctgcctccgatgccgctttataatagaggtattccgcttttccgccgtctacctccgccagaattccataggtctgcgttgccgccttataatccgccagtttgtattctgcctcgccgcggtattttaaaacatccagctcaaaagaattgacgatcccatcgctctcatccagcgcttttccaaacgaatcaatcgcatcctgataattacctgcatttaactgctcgattccggtcatacgcgcctctttcgcttccttcgattcagcgccgcagccggaaaggatgcccagtgaaagcaccgctgctgtcagaaaaagacttgttttttttcgttttaacctctttatctgcttcatttttaccaaacctttttattaattctttcccgtacttccgatgccgccgcgatcttcattgtcaagcttctccgtctcctcaaatatgatcttcggctgatgctccatgatgcggaactgacagatgcggtcattgacatggatcactgtatcacgcagcgcatatgccggaaaatgccactgatcgttgtctccacagtaactctcatcgatcacacccatatgattggtctggatgatgccgaaatttttaaaggtactgctacgcggaactacatgcgcctcatagcccttcggcagctccatcgccacgccaagcggaatcagggcaaaatcaccctttttcagcaccacctcacgcgccgcacgcaggtcgatccagtcagatttgccgtcaatgtaggcgaggcggtcaatggcgtctgtgaaatatttgatctttatgttcatgctgttcatatctgtatgaaatcctttcttatgtcacattttatccggtaatggctgccttgcaagtttgtttttcacaaagcacctccccgaaaaatatttttcaactttccagtttctctataataccacacgcgcgcgttttccgaaagtattaattcgtgcaggcacggactttcgctcgttgcacgcgaaaaatcccggcggcctggaaatccagaaccgccgggaaggaaataggttggagctacttcaatatcagaatattttaaatggatactttgctgaaccagccgtcaaattataagaggttcatgaaagtagtcagtaccatggagttaaagaagtctacgaataagcttcctactaacggtacgatgaagaatgcacgcggagccggaccatagcgctctaccagtgctctcatgtttgccattgcgttcggggttgcgcccataccgaaaccacagaatgcggtggtcattgcagctgcctcgtaatcacggcccatgatgttgaatacaaggaagtttgcatacaggaacataacaaccgtctgaactaacaggataacaatcatcggaagcgccagagctgctaactgccacagcttcaggctcatcattgccatcgctaagaacaggttcaaggacagaccgcccagtgcgtcaacttcttccatcggaagatctttgtgctgtacatcccagatgttacggatagcggctgctgccagcatcgcaccgatgtaagtcgggaatgtaagaccaatgctcttaaagaacgcgaaaatgaaggtaccaacaccgattgcaactgcaaggaatacagccgcggtggtgaatttctgaccgtcgatcggcgatgctacttcgtcaactgcattgccttcctcggctgcggttgatttcagatggtgtttctcaacacgggcacgggcgataggaccacccatcatactgccggataccagaccatatgtagcggatgccaaggcaactgtagttgcgcctacaactgcgtattcctgctccagaagcggtccgaaggaaccactcgttccgtgacctccaactaacggcatagaacccatacataagccgagaagcggattcagaccaaacgctgctgccagaccgctgccgactgcatcctgcacgatacagataccaactgccagcgccaggaacataaatacctgaacgccgcccttctttaacagacggaagcaggcggtaaaaccgacgctgcagaagaagatcgtcataaatacgctctgtaaggttgtatcaaaggaaagctccagaactcctgttgcatacaacgccagatgagcgaatgcaaatacgacaccgcccgcaaccggagccggtatacaatacttgctcaggaagggcagcttttgtacaagcaatcttcccagacagtagaccagtgcgccaagagcacacgcctgatacatatcaagctcaagtgtcaacataaacaattcccccttttgttttgctggcttctttcatttatgtagcgatttgaaagagctgcttgtttgtttgtgttgacctcattttccacgttggctacaaaaagttacaagaaaatacagaaatatgatgttaagaatctgttaatgtcagaattgaatgaatattgttaagaaaacgttaatatttcatttccttctctgcctcttccggcagtttcccctcaaacttcagctcttcctccgcctccatgcggaactcgtcgattcgtcccggtgccggttccggcagttctttcgtcgatccgactccaaaccggcgcaaaaattcctccgtcgtcgcaaacaatgccggacgtcccggcacatccaaacgccctacctcgtaaacgagattgtactcaatcagtttattgaccgcgtgatccgatttaaccccgcggatcttttcaatctcaagcttcgtgatcggctgtttataagcaatgatcgagagtgtctcaagcacaacatccgttaaaatctgcttcttcggcgtcgctgccacccggatcagattctcataatattccgcgcgggtcgccatctgccaactgtcctccagctgcgtgatctgcatgccccgcttttctgcctcataacggctctgtaatcgtctgaccgccgcttccgcgcgctctgtatccgtcccgagcgccgccgcaagctggcgcagctcaaccgattttcccattgtaaagagaaccgattccacgatggcttcctcgcgtttttcatctaattctggcatactcttctccttcctccgtcgaaagttccagctctgcctcgccttccgtttcatccacatccaccgtatcgagctgcatctcatcaaacaatttttcctgcaccagatgaatccgtcccatcttcatcagctccagcactgccagaaacgccacgactatctccaggcgatcggattccctctccagcacatcgctgaatttaaaatgacggtgttcccgcgcataagaaagcaccgaccttaccttctgctccaggctgatcggttccctgcggatcgtactgaaccggcttcgcaccgggtcaagcttattggcattccgcttcatgaccgcgtcaaacactttctgcagctttgccagcgtcagaccatccagaagcttgtccagatccagcggttcttcatatttcgccacctcccggggaatcgtcggttccttaaaaaagagaagctctgcctcctgctcccgctcttccagctcctgcgccatatatttatacatcttatattccaacagccggcgcaccagctcggcgcgcggatcttcctcgtcttcttcctcttctttttccaccttcggaaggagcatccgcgatttgatgtccagaagcgtcgccgccatcaccagaaaatcgctgaccacatccagatcctcatgatccatctgattaacatattccagatactgctccgtaatcaggacgatcggaatatcgtagatacttactttattcttttcaatcagatgaagcaacaggtccaacggtccttcaaaattatctaatttataggaaatttccattctttccaaactccttcttttagccagctttttctacaatcatataccaaattccgtatacatccacctgtgccgaagagttattcctgctgccaccacgttttcttacggcactttcggttccaaaagtgcctacccgtgtacaataaccagaatctctctattgttttccccgcaacgtcacacaaaccagctctggccggtcattcagccgcacattgatcgaatgcgtcccaagcccccggctgacgatcatcgtctttccgtccgcatcaaaccgtccggcgcaccatggcaggaaaaactggtactgcggcgtcatcacgcctcccagccccgggatccggatggttccgccgtggaaatgtccgcaaagcgtcagatccgcgccccatttccggcaggtctcaaaaaagaggggagaatgaaataataatatctcatacatttcatgtccggcttcccgctccttttccgccaagtcaggaaaaaacgattctttcatctgttgaaaacacgtcttctctgccgcagttccaacccgctctgaaagctcttccatcggcagttccggcaccgtgaaatgatgcttataatatatctcccgcaaattgcacccagtcacccggatccacggattgatctcctcgctccgatccgacaaataatgaacccccagacgttttaattccatctggaaccgatcatacaaatctccgtacacatcccgctcccgattcatccgctcctcatgatttccgttcgcatagtaaaccggcacaaaggaggtcaatttttccagaagcgataccgtgacggttaaatcaccttttcccttacagaccatcatatcgccgccgatcagcaccgcatccggcttgaatgtgcggatcgccgccaccagcggctcattgtccgttccatacacattatcatgcagatccgacaaaaatacgcagcggaacgcagcgccatccggcagcttcggactctctatctcatactggtcggtcacaaaatgttttttttcatattccgagcggagcaaaagccccactgtcacggctgccagtgccgccgcacatgctgtgattgcgatcattttgtttcctcccatgtcccattttccaattggctgccggctgatttttgctgctgtccgcatcactgccatccttatgccctgcagacccgaatcatttctatcctgttatcatacgggaaaccggtgttttcgtcaagacaggcaaatccgttgctattttttcgacctcatgataatatacttttaacaacactgaaatggcattcacctatcgtcagccatttttcaaagggaaatgagccagttacggatattttcttaataacataaatcaagcgaggtttttcatgctttcttttctcctgaactgtaaacggatttacaacgatttcatcaaagacgaagtcacggtgtacgccgcccaggcttctttttttatcgttctctctgccgcaccttttatcatgattctgctgacgctgatccagctcatccccgccgtcagcccggaggatctgatgcacgtgatgacacagcttcttccctccagcatccacccgctgattgaatcggtaatccaggacatccagactgtatccccggccgccctgctctcggttaccaccgtggcaaccatctggtcggctgcccgcggcatgcttgggatcgagcgcggcttaaaccggatcatcggctgccgcaagcgcagaaattaccttttaggacgtatcatcaactctggctataccatcgtttttctcctgatgtgcattttctccctggttctgatggtgttcggttcctccctgcagcgcctgctattccgttactttccgatgctggacagattcgtttcctgcctgattagtctccggacgtttcttgcgctggcgctgctgacgctctttttcgtcgcgctgtacacctggctgccctatgaacggcaggatatccgtctccagcttcccggtgcgctgatttccaccgtcggatggatcggatgttcctacggattttccatctacttcaaccatttcagtaattattcttatatgtacggcagcttgaccgccgtcgtgatcctgatgctgtggctgtacgcctgcatctgcatcctgtttttcggtgcggaaatcaaccagcactggcgcagataatccccagcctcaggaacaccggatacagatagcttgccccaaacactcccagctgctttggtccggtcacgcagccaagctcctgcgcttttttatacgccaccaggatgcttgcacgcgtgaccgacttttctttccggctgacaaacatctcgttgccccggatcgtgtacgaatattccagccctttcgccgtgtaaaatattgccccttcaaatgcaagaatcgcttcccacagggcatccggcgtctgctcgcgcagtaaagtctccctcttccggcgctgcacagctgtctcctgtacctgacaatctgctgtatctggttttatttcattctcttttgtttcatccatttttcccacatccattttgggatcttatttcttccgcgtcaatgaaaccaccgtctcacaattggcagtatgcgggaacatatccacgcagcacaccttatccacctgatatcctgccgcctggatcggttccagatccctcgcaaggctggttggtttgcaggacacataaaccatgtggctgacgccaaaattcaaaatctttccgatcgccttcggatggattccgtcgcgcggcggatccagaacgatcagatccggcttttcttccaactcgtccaccaccttgaggacatcccccgccagaaattcgcagttgccaagtccgttgcgcgccgcattctcacgggctgcctcgactgcttccccgacaatctccacgccgactactttctccgccaccggtgcgaggatctgcgcgatcgtgccggtgccgctgtaaaggtcaaatacgacttttcccttcgtctcacccacatactcacgcgttttctcgtacagcacctccgcgcccaatgagttcgtctggaaaaaagaaaacggcgagatctggaaccgcagccctaaaagctcttcgtaaaaatgctcgcgtccgaacagaatgtccgtcccctcatcttttacggcatccgccaatgtatcatttttggtatgcagaatgcccgcaaagcttccctccataggaagtgcctgaaggcgctccgtccatccccgtaaaagtgcttcctcggttccctcaaaggtatccgtctgtgtcgtcgtgatcagatcgaccagaatctcccctgtcttgatcgcacggcgcaccagaagatggcgcaaatagccagtatgctgcatttttttataaaatccaactttcttttcctcaaaatattcttttgtacagacaagaatcttgcaaaaatccggatgcacgatatggcattcgtcggttgtaaccacatcataaaaactgccgcgcttgtgcattcccagcgacataggaccatccttgacctcatcaccgaaagaaaactccatcttattccggtagccctgcaccagcgggctgcctaagatgccctcaaactcatattccggacataccgcatccagaagggaacgaacctgtttttccttgatcgcaagctgtttctcatacggaatcggctgataaagacatccgccgcagataccaaaatgcgggcatatatcctctgccgtctctaactttgagtgctcgacaacctccaaaagcataccctcgcatcggccgccgcgctttttattgatacggaaccggatcttctgtcccggaagcgcatttttgacgatcgctttctctccatctatcacaactacgcccttatttggaaactcaatccgttctacagttccttcgtaaatctcaccttttttcattgataactatatagctccttctctcagtggcttttaccgcactataatcaccaactgcaaatgatttttcaactcacagctaattttcatctgcggttctaattcatatctttatagtatacaggaatttttttctttttccaagatataaaaaatacaaacttatctacaaactttcctatggcataaaaaatactgcgtgaaaccgattttccggttccgcgcagtattttttatgattcattgactaaattatcacaatcagtctttcttctctttctcgtcgctctcatcctcgaagaaatcatcgtcgaaatcatcatcgaagtcgtcctcgaaatcttccagataatctggagtaaagaaacgatatacgccgtatgcaatcgctgcaactgctgctacaataccgataatggctaaaatccagagaatacagtttttctgtttctcctcttcttcttttctgtgaaggaattcattcagtttggttgcattcatgatctcttctactctggagagcgcatctttgctcatcatatcaaatttattcatacactccacatcctttcccgcgttttgatccgcaattcttgattttattataccatctctcagccgattttactatattttttattggatctggcgaaaatgttttaatacggcattactgttttcgcatacgtgtaccgtaacaatacggcaaacacggtctaacatttcaccagttttgcaaatgaagcgaacatttttttcacgcccacgcggtcaaaattaaccgtcacctcaaaatccttgccgccgtccgcgatcttctgcaccgttccctcgccaaatttgaggtggcggactcggtcgccctcaccgtaggaaagatggtcggccttctggaccgtaaatgccttgccaaatgacggtgccgggctggctggacggctgctggaactataagcgctcttatatggatccagcgtgcggccagaaccagcacttccggaaccattcacaccgccccagccgctcatccgggctgcgccgcgctcccaggcggcatcgttctctgaaagagggtgttttccagacattccgccaatccgcacccgatcgccgtctcccgcgccagatacaccaaagctgcccgttgtccagccagaagtccccgaatcttcaaatccgcgtctgccccggctcataccagcagcccgttcaaagacggtcggctgctcttcctcgtccagaagctgcggcggaatctcctcgatgaagcggctgaccttcgcaaaccgcgtttctccattgaccatgcgctgtctcgccgccgtcagcgtcagttctttctccgcacgggtgattccgacatagcagagacgccgttcttcttcgatggcgtccttatcatccgaaaagatggacatgctgctcggaaacagcccgtcctccatgccgcttaaatagacatacggaaattccagaccttttgcgccgtgcaaagtcatcaggacaatcctgttttcggattcgtccaggctatctacatccgctaccagcgcaacctcctccaaaaatccgtccagcgtcggttcctccgctgtgctcatatagccggtcgccttattaaccagctcttccacgttctgcagacgtgtttctccctcgatctcgccttccgcctccagatccttcttatatcccgtctcttccagaatcgcctcgataagttccgggatcgaaagggccgaaagccgcgaccggaagttttcgatctgctccgtaaacttctcgatcttatccgccgccttgccgatcgtcggcacgccgcgcacgcgcagcagcgcatcataaaagctcatgccattggcagacgcatagatcgtcacttttccgatcgaggtcgcaccgatgccgcgcttcggcacattgataacacgctgaaccgccagatcatcgcgcccattcgcaatcgtctttaaatagcagagaatatccttgatttccttgcgctgatagaaattgacgccaccgaccagccggtacggaatgctgtaataaatacatttttcctccagaagacgcgactgtgcattggtacggtacagcacggcaaaatccgaatattccgcatttttctcttctttctcacgctcaatatcacagataatggcgtctgcctcctcgtatgccgtgtcatactgacggaagcgcaccttcggtccctcgtcattcgccgtccacagcgtcttgtcctttctgccgcggttgtggcggatcacctcatttgccgcgttcaggatgctctgggtggaacggtagttctgctccagcttgataacgcgtgcgcccggaaatgctttctcaaaacttaaaatattttcgatatttgccccgcggaatttgtagatcgactggtcatcatcaccgaccacacagatatttctgtacttctttgccagcagatcgaccagcttaaactgtacaaggttcgtgtcctggtactcgtccaccatgatataccggaatttatcctgataatattccagcacatccgcgtttgcctcgaaaagctctaccgttttcaccagcagatcgtcgaaatccagggcattattcttcttgagttctttctggtattcccggtaaatctgagcaatctttttctcccggaagtccgctcccgcctgctgctcaaactcatccgccgtgatccggtcatttttcgccgcagaaatccgtgacagcaccgcccgctccttaaactgcttcggatccgcctgcattttcttgagcacctgcttcatcagcgttttctggtcgtcgccgtcatagatagtaaaattcgagtcatatcccagacggtcgataaaccggcgcagaatccgaacacagctcgaatggaacgtgctgacccagatcgcctccgcgccttcccccacaatcttatccacacgctcgcgcatctccgccgccgctttattggtaaatgtgatcgccatgatattccacggcgccacccgtttttcctcgattaaatacgcaatccggtgtgtcaggacgcgcgtctttcctgaaccggcgcctgccagaaccaggagtggtccctccgtgtgaaaaaccgcctcccgctgcatcgggttaagtgtgtcgtatttgctcatatatgtttcgttcccttctatcctcttatataatctatttttaatgacaaaaagtatgttcgaatacgctctagtataatctattttctcttggatgtcacggaattttcattgattttaaatttctccttgctatctggttttcaaaactatataatatcacatagagagttcatgacagcggaagcgccaaaatcgcctccctgtttcgcagctttcgaatttcaacgcagcgaggtacatacatgaaatcgaacgaagaacgcctgcaggatctgctggcttatgttgatagtctgacccgggtgcatccgtcggagattcccggtattgatttatatatggatcaggtcacgaccttcatggacagccacctgaacacttccaaatggctgggcgaggataagatcctgaccaaaaccatgatcaataactatgccaaaaataacctgctgccgccgcccgtcaaaaaacgctactccaagaatcatctgctgatgctgattctgatttattattttaaaaatgtgatatcctttcgagatattgagcagctcttctcgcccatcagcgagcaccacttttcccatggttccagcccggaattagaagagctttacaacgaaatcttttcgctggaaaaagggcagcgcaagcgcttgcaggaagacgtcatggcaaaatttgacgccgccagccagacattcaaggactatgactgtgaagaccgcgagtatttacagctgttcgcctttatcagtgagctggcgtttgatgtctatctgaaaaaacagatgattgaaatcctggcggaacagctccggcaggagacgccggtgaatccgaagaagaagaaataggcagcacttccgctgtaccgccacactcaaaaacaggctaaacaacaaaaatttcaacccattgcatcatacacgataaaaaagacactggaatcacttccccttgtggaaattctttcaatgtcttttttctttcatttctttttatctttcattcaaccagctgccagctcctgggacaattccaccccaagccaaatttgtccatctttggcaggttggtttgctacacctatgaaagtacgcgctttatctatcgtgcgtatattcctacttcgtcttacgcttccgttttctccgcctcttcctgctctttcacacgcgcaaataccatatcatatccgtcgcttccgtaatttaaagaacggttgacacggctgatcgtcgctgtcgatgcgccggtcttgtccgcgatctccagatatgtcttcttctcacgcagcatcttcgctacttcatatctctgggaaaatgataaaagttcattaactgtgcatacatcctcgaaaaagctatagcattcgtcggtatttttcagtgtcagaatcgcctggaacagatgatccacagcttcggttttcagttttttattcataatgcaaggcacccctttttaatatgtactccgaaaatatattcatttttccgtttttcttatattaacatattaaagttttaaagtctagtatcttgcctatttttatgaatattttatttttcatctgttcacgcaatatacatttatgcgaatctgccaaatcttctacagcataaacttctccaccacatgagccacaccgtcgtcgttgttggaataggtaataaagtctgcagctttccgcaccggaagcaccgcattctccatcgctacacctaatccggcatactgaatcatcgtgaggtcgttgtagccgtccccacaggcaatcatctgctcacgcgaaagcccgatgtgagaaagaagacgctctaacgactgtgctttatcgatgcccctcggaagcacctccaggaaaaacggctccgaacggtaaacgctgaaattcttccccatcgccgccttgacgcgcggctcgaccatcgccaggtagtctccatcctccatcatcaggtatttcggtaccggatacgtgatcgcagcttccatgtcgtccacctgtactaactccatgccgttgatccgcgcttccaacttcgcatagggactgtcactctggttcgtcagaagctttgcccccgcctcatcgtaactcaaaagccccacctgttcctcctcggccaagcgtataatcttctgatttgcctcctgcggcagggaacggctgaatatgatctcgccggttttgcagttcgtgatcctgcctccattaaacgacagaatataactgccgtattttgccagctccagctctctcgcaagcggcagcactcccggcgtcggacgcccggacgccagtacaatcttctttccgcgctcctgaagctccatcagacgctgcttcgtctttggcgtaatcaccttatctctgtttgttaaggttccgtccagatccaggacgataatctcataactatgtttttcggtcatatttactccacattcaaatcatacgtactattgtacacgtatatacgatacttagaaaagatgaatttgtcaattagcaacatgccacattacttaatgcaatcccttcttaacttctcaaatggttaactcatatacttccgttacttttgccattgcttcctgtatcccctctatgaaagatttttttgcaatgcatcaattaattcctctacaacaattggcttggatagaaatccattcataccgtattccagcgcttccttcctgtcttcatcaaaagcattggcagtcatggcaagaatagtgattcccgcctgtgccggatcatccagggcacgaatccgctttgtggcctcatacccgttcatgacaggcatctgcacatccatcaacacaagatcataaccgcccggtttcgatttttctaccttctccactgcctctgctccattttcggcagtgtcaaccagaaagccatattcattcaggatctccaccgcaatttcacggttcagttcattgtcttccacaagcaatatacatctgcccttgaaatctgaacctgctgccgggagaatattatcctcttgctcagcctgcctctgaccgatagctgtcatcaaggtctctctgatatctgacataaacataggtttcgaacagaatgctgtaacccctgccgctctggcctccacttcgatatctgaccagtcataagccgtcaggataatgattggcgtatggtcacccagactgcggatctgacgggtaacttcaatgccattcatatccggcagacaccagtcaatgatatacgcatggaatgcatcccccagttccatagactgccgcgcccggagaacagcctccttaccggaaagagtccattctgaacgcattccaaccttgacaagcatctttgtcacactgtcacaggtattaaaatcgtcatctacaaccagtgccttaagaccttccagctctgcgatcttctctacatggtgatgctcaggctgaatccggaatggcaggcggacaataaattcagttcccttgccatattctgtctgaacctcgatagttccgcccatcatattcacaatgttcttggtaatagccatgccaagtccggtaccctgagtcctggtgaccgtggaagtccgctccctctcaaaaggagaaaagagcttctgtacaaattcctggctcataccgattccgttatcctttacccggatctcgtacagcgcactgccgctttgcgtccccggacactgtttgagccggactgaaacggttccaccagcaggtgtaaacttaaccgcattggacaaaagattcaacagtacctggttcagacgcgtcttatcacaatagatatcctcattagtcacatccattgcatccatataaagctccagctgcttcgcatggatctgcccaccaatgatcgtcttcaggtcatgaagcacatccgacaggctgacctctgtttcttccagatggatttttccactctcaatccggctcatatccagtatatcgttgatcagtgagagcaggtggttgctggatgaaagaatcttacccagataatcccggactctttccttatcatcaatattacttacagccagtgtggtaaaaccgatgatcgcattcatgggtgtccggatatcgtgagacatattggaaagaaacgtactcttggcccggtttgctgtctccgcagcacggactgcctcagaaagtgcctgattcattttcctgtcagaggtacgatccgacataaccaagatatattttctttttccgtttacctcgctgcacattgcaacattatgaaaccagcgctgctctcctgatttataatgaacgtattcaaactcccattctttctgttcatgaacccggattctctccagataatttttatccggttctttcggattttcagaatgcaattttcccaaaacatgaatatccttacggatctcttctaccgtaatccccaacaatttttccgcattcgggctgacgtaatctgcctgatatgttctagcatccagcatcagaaaaacatcatctacattcattgacagcttctgaaacaattcgtctctatacaggatctccgtatcctttttcctgaggtttgttctgcctttttgaacaataaaactgataagtaaagcggcaatacagagcacgactcctcccacgagaagcattgtattaaactgcaggctattcatactggcattcacgatatccgccgggacaagtcccagaaacatccaatccttgatatctgatttttcatagaccagataatagctccttccatcaagctttaccagcttcgcatcggtacgtccttctttaaacttctccgaaagctcattgatctctctttcagacatatcagaatgctctctcagaacaccgaagaaattatacactctcccccatgacccagaagaatgctccaccacaacacgaccatccggatgaatcacatagttctgggcatttccgtcgaaagcagagatatccagtacatttacgatatcagaattctcataggcaatggcaatcgcatcatattcaaatccctgataacttccataggccttgggagttgcaaaaacaagcagctgggcttttccaggaactgctgcatttgttatcacatcacttccctgtcggagctcctcttccatatttccctgtaatccaagataccctgtttcacctgttaccttcttatagtttccgtcagctgacagaaaaaagaattctaaaaagccggcatcttcctgtgctttctctatataatcacgaatttcgtcttcattggaggtgttctgcagattctctccccacatatgaagataggtcagattcttgtctgtcagttcccgcagcatattatcagactgatgaaaaatctctgtcagatgagacacactttcctcatataccgttttcgacacaaatttaaaatatcgggaaaccgtcaatacgattccaagaaaaacagctataacgacagctgccttgaattgttttctattgacaagtttctttttgtctgtattatgattcttaatatccatttttctcacctcagagccacatagtcttcaggctctgcaagaacggcatcaccatctgaaatatatcctatccaggtatccttcacagaagtatctcccctatcaaacacaatattatcctctaccggataattctccatgtgtttaggtatcgtcaggcaggttaccgtgaacatatcattgtcttgaactttctttccatccttcataactttgctcaatgtataaccatcatccgtttccctgatctccacagaaataccgctgactacaggtagagaaccgctgttaaagggaataaagcctccctcatagccttccacaaaatttctgacagtctctttcagctctgccccactcatcttactgctgtaagccaaaagaccatttggcatgatcatgctgcccgccatttttttcgtatacccggctttcagcacgtttccggtaaagctgtttccggtggcgatcagcacatccgtcccgtagacaccgcgcagcgtatttgccataaccgaataggctgcattacctccactggcatggaaacgattggaatagaatttctgtgaatccagcaggatatcctcggagatagtctgctgattcagaagctgggtgttaaaggactgataagcctgccctgcatcgtattctcctgcgatcatcttagatactacatccttggaaatagagaagaagtcatttgacgcaatacggatatacatgtgattttcttcgatcacaggtttcacatctttcagatattctgtaagatggatatccacatcctggctgtagcttaagagatcctgaccatcataaaggatctggttctgagcatcctctgaaagcattgtatccaataccttcatggctttcttccgtcgtgtttcatcctgtgccagatcacggtttaaagccacttgaaaatagggtgtcgtcatcagccatttttctccattctcttgaaagaatggcagaaatgttgtgtgaatgccctgatcctgaaacattttaacaccggaagagcttccaaagtacatggcaagcttaccacttttgaacaactcaaccacattatcatagttcaaatccaaatcatcccggttcaatcctgtatcccggataaaccgctccatccgttcaaaagccgccggccagacggtattgtccagaccttctttcactgtatgatccgggtcactgtaggtggtgcgccatctgcgtccgtcggcagaagaaagttctgacgccgacaggccctgcagtgtctccatacaggtatagtcataataatagtctgcggtaaaccctcggattcccaccttatcaaatgcctcgcaggcagagacaaagctttcatagtctgttggcaacgggatatcatatttttcaaaaagatctttgttcactacaaagccatgggcatccgcacacaccggaagccagtttatgctgccatcctcgttcctaaaattgtttagatatgtatcatagacagcacctgccgcattggttgtggaaagatccatcaggctgtctttcagcgaacttgcatcatgcagtgaaaaacgacaacaggttataatatccggcaatcctccattttcatcaagaaacttataaaaatccagatcattatttcctactacaaattcaatgttaatatccggaagctgttcctgaatatagggtgcatatttttcatacaggtttgtgctccataaatacaccgtgatggtttctgcatcttctttttccgctcttttcccgccgcagcctgataaaagtaatatggccattaccatcaccaggaatacagcaagtaacttatttcttttttcctttttcattacgaatccccctaaaactgtgttccgctagttcataaattacctttaccagtaattttgcatcaacaggcttagaaatatgttcatccattcccgcttcttttgctcttattctgtcctccgtgaacgcatttgctgtcattgcaatgatcggtatcgtcttagcatcctctctctccagagaccggatcctcttcgttgcttcataaccattcatgaccggcatcatgatatccatgaggatcgcatcaaattcacctaactcactttttttgaattgatccacagcttcctgcccattccatgccttggtcacgacagcaccttcattctgaagcataaattcagcaatttctatgttcagctcattatcttctgccataagaatatgcagtccctttatagattttccatctgatacatctttctgttcttcccatttatccgaattcagatctattttaaatggaacctggatcacaaaggtagtccctacaccatcttcactttcaaaggtaatggttccacccattttctcaaccagcttctttgcaatcgacattcccagacccgttcccgcaaattttgtgcggcttcctgcgtgttcctgtacaaacggttcaaaaatatgtttctgaaactcttctgccattccgattccggtatcccggcagacaaattctatcgtcgtcatctctggctgttcggatggaatctcacggcagctaatatagatatatccgttttttctgttatatttcaccgcattcgacagaatattcatcatcacacgtttcacatgtcctggacttccaataagctttcgatgtgtgatttctttcttctcccacacaatccggatattctggtctgcagccatctgctcgatcacaacaagtacttcccgggaaatacggcttagatcaaatggaatttcttccagaatcacttcacccgcctccagcttactcatatccaggacatcgtttaccagctccagcaacagattggatgcctctttcacctttgttctgtattctgtctgtttctccatatcatctgcacaatgatctgccatattgagtaaaccgcagattccattaatcggagtccggatatcatggctcatcctttggagaaattccgtcttcgccctattggcgtcttccgcctttttggcagctatcagaagttctgatttatatttttcatccttttcccgctcttgtttctcatgttccagattggttctgaagatacaggaccaaaatataccaactatcaaagaatatagaaaaatgacaccagccacacttaatggaaggttatgaaacacttcctcatccagaagatatgcataaatataataatcccgctgcttcagcatgattccgtagcatccggttccttcattcttcaaatgaaaaatatgctggctgtctgtgtgctttttcattgcctgaataacctcattgtcggtcgtattctgccccaacaggctctcatcgttactggcaacaacgagcccatcgtctgcaacaataattgttccatctttttggacactatatccatttaaaagcccttgtatcgtcaaagtatagtttctggtaaattcaggagatgtgtaatagtaaattgccacaatacccggtgcgtcttttctggcgcaggctgcaatgtcgatccgggacccgtcttccctggcaagccgttccgaatagcttctttcttcatatcctgtaaaatccatgataatttctttttgcagatactccgtaatctcatccgtcagagactcttttgtgctatactcacagaccgtctttccctctgcatccagtacaaggatgccatccacccagagagtctgcagattatctttcagaaactcccggcttaactgaccaccgttttctgtttccatgttaatattggtactcatctgtctggcactttcaatggcacggagaaggcttttggattccgaagattcattataatgagtataggtggaacactgcactttcacatagtttacaatctctaccattctttcttctgcttccgctttttccgcatgaaagaaataagtcagggaaactaccgccacacagattccaagcaaaacaccaactatttctatctgctttttctttgtccttcccttaatatccaagttcatccacctccagataccttcccggatcatccagatatttttcaatgattttcagggatgttccatcccgacgcatttcctccagggtctgatccatctgctcacagattccccggtcatcctcttttgcaaaggcaacccctataccggtgatcatcagcggctcttccagaatacgaaagcttgtgtcataatccttcatatactggacaatcgattcctcatgtgcggcaactgcatctacgtatccttttcccagaaatgtatagatcagctccctgtgtcccaaactgatcagattacccagctttgggattctctcatccgtccggttcagaaaaataccttccggtttggttgtggactgaacagccagattctttccctccaggtcactcagtttatagatatcactgctctcatttacagcaaccacctgacggcttgctatatacggtccggcccagcggtactcgtcaaggcgcccttccatggaaaaacagcccatgatgcaatcgatctccccgctctccaacagttcttttttcttctcccagttaatctggacaggctccacctgatagcccattcttctgaacgcttctgtagccagttctacatcaattcctgtcggcacaccatcctcattcagataagtgtatggtggatagctgtcgcttcccagggtgatgacgggtttttccgtttcttttttattctcacctgtgtttttgcaccctgccagggtaactgctaagattccaacaagcagaatacctgcgatcactctttttcctttcattttcattccatccctgttattcttttctatttcttcacatctgatttccggccatttattacgattcagtggcccgcgcttaggtgtccccgtatataagacttaatttcctatatgatcaaaaaaagctccatgtaaaaaatttacaggaactttatccataatgccctcttaactcttaccttatattcttacactttttattatagcattcaaaatataccatgtccacaaaaagttgccatcatccattttgttactgttcacacatgcgtgaacagtaactccattttttcataaacagccacagattatttatacaaaaggacccccttactttcgtaagggagtccttatctactcatttattttattcaaggttttccttaaatgattatttctcagcgattgcagcctgagcagcagccagacgagcgatcggcacacggaacggtgagcaggatacatagtcaagaccaatcttgtggcagaactctacggaagacgggtcgccgccgtgctcgccgcagatacctacatgaagggtcgggcgctctgctttacctaacttgatcgccatctccatgagcttacctacgccagtctgatccagttttgcaaatggatcgctctcgaagatcttcttgtcatagtaagcattcaggaacttgcctgcatcatcacgggagaagccgtaggtcatctgagttaagtcgtttgtaccgaagcagaagaattcagcctcttttgcgatgtcgtcagcggtcagagctgcacgcgggatctcgatcatggtacctacttcgtacttcagatcaacgcctgctgctgcgatctcctcgtcagcggtcttcacaacgatatcttttacatattttaactctttcgcatcgcaagcgagcggaatcatgatctccggttttacggaccagtcagcgtgagctttctgtacgttgatagctgcacggataactgccttggtctgcataacagcgatctccggataggtaactgccagacgaagtccacggtgacccatcatcgggttaaactcatgcagggaagcaatcaggttcttgatgaactctacagatttgccctgagcgtcagccagtttcttgatgtcctcttcctcagtcggaacgaactcatgcagcggcggatccaggaaacggatagttaccgggttgccctccagagcctcgaacagaccttcgaagtcgccctgctgatacggaaggatcttatccagagctgcttctctctcttctacagtgtcagcacagatcatctcacggaaagcagcgattctgtcttcctcgaagaacatatgctcggtacggcaaagaccgataccctcagcgccaagctctctagccttcttagcatctgccggtgtatctgcgtttgtacgaactttcagtcttctgaacttgtcagcccatgccataacgcgaccgaatgtaccagcgatagtagcatctacggtcttgatctcaccttcgtaaatattaccggttgtaccatcgatggagatgaagtctccctcgttgaatactttaccagctaaagtgaatttcttattctcttcatccatagcgatgtcgccgcatccggatacacagcaggtacccataccacgagcaactacagctgcgtgagaggtcataccaccacgaacggttaagataccctgagcaaccttcataccggttatatcttccggagaagtctcaagacgaactaagataactttctcgcccttctcagcccatttctcagcatcttctgcggtgaatacaactttaccgcaagcagcacccggagaagcacctaagccttttccaagcggagtagctgcctttaatgcagcagcgtcaaactgcggatgcagcagtgtatcgaggttacgcgggtcgatcatagcgactgcttcttcctctgtcttatgaccttcatctaccaggtcgcaagcgatctgcagcgcagcctgagcagttctcttaccgttacggcactgtaacatgtagagtttcttgttctctacggtgaactccatatcctgcatatcatggtagtggttctcaagcacatcacaaaccttgatgaaatctgcatatgcctccgggaactcctgctccatctgtgcgatcggcatcggagtacgaacaccagcaacaacgtcctcgccctgtgcgttctttaagaactcgcccatcagcttcttctcgccggttgccgggtcacgggtaaatgcaacacctgtaccagactcatcgtttaagttaccgaataccatcggcattacgtttactgcagtaccccaggaatacggaatatcattatctcttctgtatacgttcgcacgtgggttgtcccaggaacggaatacagcttcgatcgctaattttaactgaacaaccggatcagacgggaagtcctcacctaactgtttcttatactcagccttaaactgctctgccagagtctttaagtcagctgcggtcagctctatgtcgtagtgaacgcctttttctgctttcatcttgtcgatgagctgctcgaagtatttcttaccaacctccataacgacatctgagaacatctggatgaaacgtctgtaggagtcatatacaaatcgctcaaatttcgggtccgggttgcctgcgatcatcgctgcaactacctcgtcatttaaaccaaggtttaagatggtatccatcatacctggcatggatgctctcgcaccggaacgaaccgatactaacagtgggttcttcagatcgccaaatttctttccattgagctcttccatcttcttaacgccttccatggtctgtgccatgatctcgtcgttaatcttgcgaccatcttcgtaatactgggtacaagcctcagttgtgattgtaaatccctgtggaaccggcagaccgatgcttgtcatctccgccaggttcgctccctttcctcccagcaggttacgcatggtcatgtcgccctcgctaaacatataaacccattttgccataagtattttcctcctatactcgtttatgttttacattcacatatttgtatttatgtgaaagataaaagccatcgtgaatattataacataaactgcggtctagtaaagagtttttttgaattctttccaactttttttcgatcaatatatatttttttgtaattttcgtgaatattaaatgagatgactatccagaacagtgcctaatctggcccaaaataaatttcgttctttgcaaaatgccaaaaatgtcacaagccctctctaacacaaaaagcagaaaccatctcctattttctggaatatggtttctgcttttttgtttatttaaagattagaaacggaacttatcctcaaagtagttctttaactcggcgatcggcacacgtacctgttccatggtatcacggtcacggacggtaacagcctggtcggtctccgactcgaagtcgtaagtgatgcagaacggagtaccgatctcatcctgacggcggtaacgcttaccaatgtttcctctgtcgtcgaactcgcagttgtagtacttggaaagctctgcgtagatcttctctgctccctcgttaagcttcttggacagcggaagcacaccgatcttaaccggtgcgatagccggatggaagtgaagaacggttcttacatcgccctctccgatctcttcctcatcgtatgcagcacacaggaatgccagggttacacggtcagcacccagtgacggctcaatcacatacgggatatatttctccttcttctcatcatcgaagtaggtcatatcctgaccggaggtgttctgatgctgggtcagatcgtaatcggtacggtctgcgataccccacagctcgccccatccgaacgggaacagaaattccagatcggtcgtcgccttgctgtagaagcacaactcttccggagaatggtcgcgcgcgcgcatctcatccggcttgatgccaagtgtctgcagccagtcgatgcagtgctgtttccagtatgcaaaccactcaaggtcggttcccggttcacagaagaactccagctccatctgctcgaactctctggtacggaaagtaaagttacccggtgtgatctcgttacggaaagatttaccgatctgaccgataccaaacgggatcttcttgcgggaggttctctgtacgttcttgaagtttacaaagataccctgtgcagtctccggacgcagatatacggtgttttttgcatcctcggtaactccctggaaagtcttgaacatcaggttaaactgacgaatgtcggtgaaatcatgcttgccgcagctcggacagcagatgttattgtcatcaatgtactgtttcatctgctcctgggaccagccgtctacggaaccctcgatctcgatgttgtgctctgccatatagtcctcgatgagcttatctgcacggaaacgctctttacagctcttgcagtccatcagcgggtcagagaagccgcccagatgtccagatgccacccatgtctgggagttcatgagaatcgcacagtctacacctacgttgtacgggctttcctgaataaatttctgccaccatgcacgttttacattgtttttcagttctacgcccagattgccgtagtcccatgtattggcaaggccgccgtaaatctcagaacccggatatacaaatcctcttgattttgcgagcgccacgattttgtccatcgtcttttccatttgtcttgtcctcctgattcatttatcattgtacccgtccccgcctcttctttcgatatctggcagatggacgaatttaacaatcattctgttttttatcttttaaaaatcacataagccgtgcctgtttccggcagactgacggttgaatcgtcttttaactcggtattcgaactgcggtaaagcacttttccgccgaccatcagcgtcgcaccgccctcgctccggactgccatgccgctcttttcattttgaaccgtatccgttccggcttcgcttccatctgcctttaccagctcaccctcggaaaaccatccatcggcaatcgcctccgaaagcggctttgcctccagcgccgtcagggagttgctggtgtcctcgttgtcattcgtctctccgaatgctttcagatcttcaaaggaagcataatcaaagatcgcagtcaccgtgtcttttcccgccttcacacttttcaatgctgccggcaatctctcggcatttttctggttctgtgccagcgccccggcgcctttttcttcattaaaatgaatcactgccgtctctaaatactgctttaattcattctcatcgaccgaaataccgccggtctgctccaccagagcactcgacagcgctccgtcttttgccacatatacgcagctctccgaaggggaaaaggcggtttcccgtgagccacagccggacagcatcacacccacggtacacgctgccagaagaaatcctctttttttcattgctcttcctcccaagcgcaaaaatgctcctacaaccaagtttttatagtatacctgcttttctatgtattttcaagacttggacctgaaaaaacgcatactcgcacttccgtttccagagatacctgcctttcaaccgtaaatcctgctttttgtcaacgtcccccattcagggtcttccagatgtccggacggtacctccgcaacacgcgcgccgcctgataacagagtgtcactgcaagtagcggcatgcacacatacataaacatcgaaaccagctggctgcccggaaatagcagcgccgccgccttattgaggaaacggaccaccacaaagtgcgtcgcatagataaaaaaggtgcaggtcataaacggtctgacttctcccagccagcgctcgtttaccatcatccagataccgatgactgccagaagctggtagagaacgattcccggcacaaaatagtgggtataatagctcctgctgagcacgattcccactgccagcaggcacacccccagtgccgcccgcttccacgaccataccgcctccgcccattttctcccgtgcagcgccgcataggcggcaaaggaataataaatcagggcgtccagattcagctccggcagcgccacccccttgaaaagtgccacaagcagcaccagcagaaatgccgcgccggtccagatatttttcagaaacagatacagcaccggtgccagcagcaccagcaaaatgatctgatacatgaaccagaacaccggattgaaggtatacttggtgatcgcctgccatgccccggacgtcgtgatcaccagatccgtccggttggcgatcgtctgcagtcccggaatccggctcgccgccacatacgccacgtagtagatagtattccagagcaggtacggaaccagaagcgaatgcagacgtttatttaatttttctcccagccgcttcatcgtgaagttccggtagaacaggtaggcagacagcatgataaagcatgggatgtccacccgcagaatttcctgcatgaccgggtactggaaatgccaccacggtgcgtcctgccccagttccgggaaaaacagatccgcgttgccggaatgcgtccagatgaccatgaggcagcagatgaaattgaaccaggcgattttctggtggaatttggcttctggcatataaacagctcctccctggatagttgtatgttatgtaatcgtctgcaatatctccaatgagtgaaaacttttatctacatacgccctcttattccgctccacattcgccgcaaattgtgcaaatgcatcttctttcagaagaaatgtatacaacttctcgatcggcgcgtagatgacgtactgccaggcgtagcgtgcggagtctccggcgcgcaggggtggatcttcggtgtattcgccgttgatgaccatgatttttaactcgaagatacgctgtacaagtttgttggggagtgcgggttttaggagggcgcggaaggactggtagagtaatcgcagcatttctcttgcctccagaccttctcttccgaagtattcggcgaattcagcaaaataggaggcgtagcaggcgcactcaacgtcctgttcaagtccttcgaaatagttttcgatctccgcgccataaagattgtaggcatcccgcgtctcagaaagtgtgaaggttccaaatgcgaaaggccggcttgccgcacgcagcaaacttccagtgcgcttcgccccgcgggcaaatgccgtgatttttccgcggtctcccgtcaggagaatcagacgtttatcaaattcaccgaccggggctgcataaagcaccattccggttgtctgtatcaaatctcgcatgcagcccttccttccctcacttaaatttctttcgggttatatccgtaattcttcatatacatatcgctgtctctccactcccggcgcactttaacccagagtttcaggttgaccttcgtgtccatcagattttcaatttccatccgggcagcggttccgatacgttttaacatcgatccgccttttccgatgatgatgcccttgtgggaatcgcgctcgcacacgatcgttgcatccacgtcgatgatgccgtttgggcgctctttcatctggtcgatgacaactgcaatgccgtgcgggatctcgtcgtccagcatccgaagcgctttctcgcggatcagctccgctgcgatctggcgcatcggctggtcggtgacggtatcctcatcgtaaaactgcggacctgccgggagatatttaaaaatactgctcttgacatcctcgatattcatctctttgagagccgaaaccgggataatctccgcaaaattcaaaatatccttatatgccgcgataaaggtcagaatctcttccttcgatttgaccgtatcaattttattaataaccagaatgaccggcgtcttgatcttcgaaagctgctctgcaatgtgacgctcgcctgccccgatgaaggtggtcggctctaccagccagagaatcacgtcaacctcttttaacgtattctctgcgacattgaccatgtactcgcccagcttgtttttcgccttgtggatacccggtgtgtccagaaaaatgatctgtccgcgctcgtctgtgtaaaccgtctggatacggttccgggtcgtctgcggcttctcagatgtgatcgcgatcttctgtccgatcaggtggttcatcagcgtggatttgccgacattcggacgcccgatcagggtcacaaagccagatttaaactcttttgtatctgtatttgccatcttgtttcctttcacttacattttgtttagttaaacagattcttcaccgtcttaaacagatcctgatttgccttgactttctctgcatttccaatcgcacagatgctctgctcactgagcactgccctgataatcggcgccagctcccggatatcctccggggtaactgccaggatctcgtctctctctttctggatcatcgcatccgtcacgccgataaaccaggccgcgtcggcgcgaatgcctttgtacggcggcagaagcggcgcatcaaggtcgctgatggttccaatcacgaatttcgtcatatcacgctcgtctgcctcaaactgctccagatacggcacgatgccctcgtaaacctcattcgtctcgcgcaggttcggatcgcggtaggaaacgaaatagctgtcgccaaaccgtccggctccattcatgacgccgtaagcgccgcccttgacacggacattgatccacagataatcatatccgagaatgactttcagcgtccgcagcgtgcccttgtatgccagccctttctccacgaaattgccgcagcgcgccagataattgacctgggaggaggtcatgaatccctcgtttaagttctcttttttccactcaaacggataaacggttccatcgccctgtggaagacgttcttttaagagcggaagtgctgcttcaagccctgcctgatcgccagctgctgccgtgtagcttatcagcatattttctttcgtaaacaggcgtgccgccgtctcttttaatttcgcgatcacctcgccctttttctcatcaaagtgctttgccgtctcttcaaggaactggtaaaatccgattccgcccgtgcagtcgtcaaatgccgattctgccgaaaaataggagctggctctcatcactgccgctgaatgtgccgcctgatttaaacgcatctggctcttcgatttcgtctccgccacaatctcgccgagacgtttctcatcatcaaggattgaatcaagcagaatctccgcgatcgctgaaaatccgaagtccagcttctcgcacagcacccgggcactcgcggtaaaaataccggtaaacgcgccctgttcccgactgtccgcataggagctgacgctgagcgtgataccgccggtatttaagttgatctcatccgacaaatcgctgtatgtgtgtttcgtcgtatcgacaaatccaagcactgctttcaaaagtcccacatacggcagagccctggatggtacacggtcggtacggaacatcacgcgcagataaccgatgcctgaggtaaagagctcatgtgccagcaccttggttccgctaatctcgcgctcggtcaggataaatttttccgcctctttgcggatatctgaccgtttcaacagcggaatcttctctaaatcttccttcggggacggggtgtcctgatactctttcagctctttcgtgccatccacgatcgcctgaatctcctccgcgcccaggctcttcttatatgcttccagcttttcacgcagcttttcatcctcgatcgccgtcagtccccgcttcggactgaccgtgatcaccgcctcaaacgggttatctaagagatatttgcggatcagttcctcaaaatatccctcttttgccgcttttttgaggaatgcaaatgtctcctcatattccaggtgcatcagcggatcgccgccgtacagccagctgtctaagcactgcaagccgtacatcaatcctttcggcgcgttgccgaaatctgcctcgcggctgcggaattcatagtagttgatgcccgccagcaggctcttctggttgatgccatcatctgccagcttcttaagcgttcccttgacggtctttaaaaatgcctctttctggctgccatccgcatttttcgcgatgacggaaaaatatggctgtaaaataccattttcatagcttcccaggatatcctgaccaatcccggcgctgatgagttctttctttaaaatggcgcccggcgcgtccaaaagcacatactccaggatttgaaatgccatgtataaaatcgggtcgagatcgtcgcccaccaccgtattaaccgacaggtaggttgcgtgatcctccggctcatcctcagtgatcggatagaagatctcgcggtccttcggcgcgtcaaacggcttctggtagtgaatttcagaatccaccggctgacggtcatagtggcttaaatactcacgatccagccagtccagcttctctgccatatccatatttccgtacagatagataaagctgttggacggatggtagaatttgcggtggaaattcaggaaatcctcataggtcagctccgggataacctccggggcgccgccggactcatgcgtatagcagatatccgggtaaagcgtgttctgcgtgtagcggtcaagcacgccctccggggaggaaaatgcacccttcatctcattgtaaacgacaccgtttaccgtgatcgggctgtccgccgactccatctcgtaatgccagccctcctggcggaaaatcttctcttctttatagatattcggatgcagaaccgcgtccatatagacgtccatcaggttctggaaatctttgtcgttgcagcttgcaaccgggtataccgtcttatccgggtaggtcatcgcgtttaagaaggtatttaaggagccctttaccagctctacaaacggatccttgactggaaatttcgccgaaccgcacaaaacgctgtgctccatgatatgcggcacacccgtgctgtcagatggcggggtacggaatccgatgcagaataccttgttctcatcgtcattcgagagcaggaacactctcgctcccgtcttcttatgttccagaagaatcccatcagaattcagctcttttacgtgtttttcattcaggatctgatagctcttcaaatcttttactgtcatgctgtctttcctttctctgaaacgattccacagtgcatacagacatctgttgaatcgttactgttcacgcatacgtgaacagtaacgttgaatcgcacctttttttcttttttttacagtcttcccataaatttgtcttttagtacggcaaatgcctcccgcagccacaggtgcaccgccagcaccgggtcgcacgcagctgccacgccgaccggctcaatctcctgtctgcgcgcgatcgcctccgcccggaacacatggtaattgctcgtcagaatcccgatccggatggtatcgccgtccgggcgctcacggtaaaactccatcaggtgtgcccgcgccgcctgcgccttgttgtattcctgccggtcgatcaccgtccggctgaactcgatgttctgcaccgtgtcggaagactggtcttcaatcagcagcttatcctccggaatcccgttgtactgtaaatattcgtacatcgcccgcgcctcgctgatctcctcgcccggaccttttccgccggaaagcaccagaaccgtgttcggatattcctccgaatactcgatcgcccgatccagacgctgctttagggaattgctgatcttggtgccgcgcacacgtgctcccagcacgatcacatagtccgccggctgtcccgtcgccgtaatggcgctccagccgatcaaaacctccgtgatcaccagaatcagaaatcccgccgcacatactgtcccgacggaaacgccgatccacacggggattctgccctcatgctggctgccaaaccaccatccagccgccagaagtcccaaaaagatcgccaagcagggccagatcaaggcaaacgaagtcgaaacacctgaataaataacaattatgatataatataacaggcacaggaccgccgttcctcctaaaaaccaaaccatctgtcatcctcctgatgtccatccagccgcacctttacaaatccagcgcttcgtcctcacgccgcaggatatcctgcggctccgctataccgcctaagtctacccagagctgctgcttcgggtgcggtgcgctctcctgcgcggttccatcctcagtaaagatgcctttcacttccacacgcaggttacgtccgtccggcttcatgatctcgatcgtctctcccacgctgaatttattcttctgctccagatgaaccaggccatccccgcgcacagcgccgaccgttcccagataggtgtacggttttacataagtattgcttccgtatacctgcgactcggtacccggtttatggaaataaaatccggtgatgtattcccggtgggtacatttgcggatctcactcttataccactccatcttggactggtatttttccgggctttccagataatcgtcgattgcgattcggtaggttctcgccacggttgccacatagagtgctgtcttcatgcgtccctcgatcttgaagctgtcgattcctgcttcgaccatctccggaatgtgctcaatcatgcacaggtcgcgggagttgaaaatatagctgccgcgctcattttcatagaccggcatccactcgcccggtcttgtctcctccgccaccgcatatttccagcggcacggatgagtacaggcgccctggttcgcgtcgcgccccgtcagaaaattgctgagaagacatcgtcctgaataggaaatgcacatcgctccgtggatgaagctctcgatctccatatcctccggaatatgttcgcggatctcgcgaatctccttcaaggacagctcccgtgccgttaccacgcgcttcgcgccctgtttataccagaaaaggaacgtcccgtagtttgtattatttgcctgtgtgctgatatggatctccatctccgggagaatgcgtctggcaatctcaaaaacacccggatcggaaataatcagcgcatccggcttgatttctttcagttctgtgaaatattcttccacaccggctaaatcatcattatgtgcaaaaatatttgctgtaatatatactttgacgccgcgctcatgggcgaacgcaatgccctctttgatctcttcgttcgtaaaattcttcgcctttgcccgcagaccaaacgcctcgccgcccagatagaccgcatcggctccgtaaaggaccgccgtcttgaggacgtccaggctgcccgccgggattaaaagttccagttttctcatgtttttcctttcttttatcgctttacacttaacgccacgccatccccgatcggaatgacagacgtctcaaattctttcatgtgtgtcagttcatataaataatcgcgcatccgcgtgtggatcgtccggttgcggcgctcgaccgcatagcgggattccacgatatcgccgtcctgtaagacattgtccgacagaagaacgccgccggacggcagcagacgcaaaatctgaggcagccagtgcatatactgccccttagccgcatccataaatataaaatcataagggccggaaagcgtccccagtatctcttccgcatcgccttccagtaaagtaatgcacggctcttttcctgccctttcaaaattgcgcttggcaatcggtattcttttttcgtacttctcaatcgtcgtgatccggcagttttccggcatcacacggctcatcagtaaagccgaatagcccacagccgttcctacctccagaatcgactgcgggcgcttgagagcaatcagtgttttcagaaatgcggaggtctccctgcggatgatcggcacgcagtcagccagcgcttcttcctctatcgagtcgagcagcggtccgtttcccgcgtccaacgactggatataggcggtaattctgtcatttactatcacttttatcctcctccgggctggcggcagaagctgccgcctcatccatctccttcagcatctccagagaagtctgggcggtgctgaactgataggttcccggatatatcttgtattcataaatctttgcctgcagcacaaagaccacgcggctcctaatcaaaccgacgcgttccagcgcttcgcctgcctcggaggtgctttcgctttcctcgatggtaaccgttctcattcttcccggctctgcctcaactgcggtcgggttaaatatctcatgccccagccagtaacccttcgttgcgccctcatagagcagaaacagtgtcagtaccagaaaaacgatccggaacacactgtccagaattgatactgcgatatggggttccccagatctccggctcatattccacctccgtgctgcttttgcagtcttctacacttccatgatgatcggaagaatcatcggatttctcttcatcttcttccataggaaatcactcaggctgtcgcggataatgttcttgatcttgccccagtcgctcacgtgcttctcaagacagccttgtacggcttcatccacgattctctgtgcctcttccatcagatcctcggactcacgcacatagacgaaacctcgggacacgatatccggtcccgctaagagctggttgctgtatttctccaacgtcagtaccacaataatgataccattctgtgccaggttctggcggtcgcgcagaacgatatttccgacatcaccgatgcccagaccatcgaccaggatgccgcccgcctgtacatggtcggcaacacggtagccttcgtccccgatctcgatcacatcacctgagcgcatcaggatgacattttccttcggaatgcccattgaaattgccaggttgcgctgcgccatcaggtggcggtattcaccgtgtaccggaatcgagaatttcggacgaactaaggagtacatcagcttgatctcctcctggcaggcatgtccggatacgtgggtatcctggttgataacctctgcgcccttcatcgacagctcgttgataactcttgcaacggctttctcattgcccggaatcggggtggaacttaaaataaccacgtcgcccggcataatcgaaaccttcttgtgcaggtctgccgccatacgggacagtgcagccagagactcgccctggctgccggtcgtgataaggacggtatcctctttcttataatttttcagatgttcaatgtcgatcagtgtattttccggaatattaatgtatccaagttcgctcgccgtgccgatgacattgaccatgcttcggccctcgaccactaccttacgtccatagtggtatgccgtattgatgatctgctggacacggtctacgttggaagcaaacgtcgcaacgatgatccggttgttcttgtgctctgcaaaaatcgaatcaaaggtcttgccgacggtgcgctccgacatcgtaaatcccggacggatcgcgttggtactgtcgcacatcagcgccagcacgcctttctttccaagctcggcaaaacgctgcagatccgccggttcgccgaataccggtgtgtaatcgatcttgaagtcgccggtgtggacgataatgccagccggggagaagatcgcaagcgccgatgcatctgcgatactgtggttcgtcttgatgaactcaatccgaaaacatccgagattgatggactgtccgtgctttacgaccttgcggcggacggtcttcatcatattatgctcttttaatttattctcaatcagtccgatcgtcagtttagtgccgtataccggtgccggaacatcgcggagtacatacggcagcgcgccgatatggtcctcatgtccgtgcgtgatcacaaagcccttgactttgtcaatgttgttctttaaataggatacatccgggataaccagatcgattcccagcatatcgtcgctcgggaatgccataccgcagtctactacaataatgctgtcttcatattcgaaggcagtcatattcataccgatctgttccagaccaccgagcggtatgatctttaccttattatgatttgtttcctttttcaatcaatgcacctccaaaaattcgatttttagatttttattcgatatcaacgcccagatcgctcatcagctccgcaaacaccttggacatgtactccagttctccgtcatcgtccacaaattcgtaagctgcttctgcatcctccggctttgatgtatctctcaacagatagcactctccatcgccgtccttcgtatcacttgccagcagataggactcgccatttaactttgtctcttccaggacatacagcttcacttcctcgccgttctcatccctcagcgtgatgctgttttccatattattcagttcatctaacattgaatccaggtttcccattctatgattctccttctattctttattttcaatcattgatttttatcactgataatttattcttccgcttttccttgtgcctgtaaatccaaatatccctgcaaaatcaatactgccgcaatcttatcaatcacgctcttccggttttcccggcgcactccactctcgatcaggatctgctccgccgcattcgtcgtcaggcgctcgtcccacataacgaccggaaggttcgtccgccgttccagcatctctttaaatgccagcgtcttttcaacgcgctctcccagcgtattattcatatttttaggataccccaaaacaatcgtcccaacctcgtattcccggatcagctcttcaatccgggcgcaggtctggcgaagtttgttctcatccttccgtgtgatcgtctcaatcccctgtgctgtaatgcctaacggatcgctgactgccactcccgtggtcttcgatccaaaatcaagccccataattctcatattctattttctccataacaaaacaagctggcagcccgtcagatattggactgttgtcgccagctgtttactcttccgctttttaattgccgtgctgcatccactctttactgaagcttcgtctcaatatataccttcacaagctcttccagaatttcgtcacgctctaccttcataatcaggcttctggcactcttgtggctggtaatataagtcggatctccagacataatatatcctacaatctgattgatcgggttgtaacccttctccgtcagcgctgtatatacctgttccagaacctggcttgcctccagcttcttctcttcctgtactgctctaaaaaactgtgtattgctgatatcacccattttgtcttcacgtccttttaaatacccgccgcgctctgtcactctgcagatccatgcgtgcaggtaaactactcttttttattttactctactttaccccattcggcaagttattttttatcattataatcatccaggaaattgtacgtccaatcgtccttgtggtaaccgatcacagtctttaagttgatattgtggacactcttaaagatatttttctcgatcacgtcgctctccttgcggaaatgggcgatcaattccttcatctcatcgcgcttggaaccacgtccgcctccgcagctcacgcaattttcagtaaaacggcacgcgcactgtataaactgcagtccgttgtaatcacgccacgccttgaccgcatcttccttgataaggtacatcgggcggatcagctccatgccctcgaaattctggctgtgcagcttcggcatcatcgtctcaatcttgccgctgtacagcattcccatgaggatcgtctcaatcacatcatcaaaatgatgcccaagcgcaattttattgcagcccagcgctttcgcctgtgcatagaggtgaccgcgtcgcattctggcacaaaggtagcacggattctgttcgatcgtcgccaccgtgtcgaaaatatcgctctcaaataccgtcagcggaatgccgagaagtttcgcattgtcctggatgatcttccagttatccgcattgtagcccggattcatcactagaaaaacggtttcaaactggaattttccatgttttttcaattcctggaaaagtttcgccatcagcatggaatccttgccgccggagatacagactgcgatcttgtcgccctcctgaatcaggtcgtaggtgttgagtgcccgcgtaaacgcccgccagatcggcttgcggaatttttttataatactctgctcaattctcgcccgtttttcctctcgatccgcctcggattctccgcctacgaagcgggacagggaaaggcgcagccacgcacggtaaccaccctccacattgaccgcgtcaaatccgtctccggtcagacgacgcacccactcctggctcttctcgccggtatggcacatcacgtacactggatgcattttgtctaacctgactgtttcttcctcatattgctcttccagccgggacgccgggaggcttaccgcccccggaaaagttccgcgcatatactgatcctgcgggcggatgtccacgatcgtcttctccgcatcctttaacgcttccagctcctcaatcgtaatcgttttcattgtatattctcctgtatccgttatctgcaaaatcctctttaagaaaaaaatgtaaaaatgtgcctacccgtgtacagtaaccacaattctcatgaaatgaaacaaaagcacaggatccgcgctgacagtgctctgccaaacaaacgggtcctgtgtttttctgctgttttgttaccgttcacgcgcacgtaaccagtcactcattttctgttaattataacactctccctgcattctgggaagtcctatttctataattagtctcttataattagtctcttataattagtctcttagtcctctgtaaagagtggtgtggaataatagcggtcaccgctgtccggaagaatcgctacgatggttttccccttattttccgggcgttttgccagctcaatcgcaccatgcagggctgcgccggaggaaataccgactaagatgccctctttgtgtgccagcagttttgctgccgcaaatgcatcctcattctccgcctcgaaaatctcatcataaatcttagtgttcagtacatccggcacaaatccggcgccgataccctgaatcttgtgtgcgccgcccttgcctgtctttaataccggggatgaagctggctccagcgctacgactttcacattcgggttctgggattttaagtattcgccggtacctgtcagagttccgccggtaccaacacctgcgatcaggatatcaacctttccgtcggtatcattccagatctccggaccagtggttgctctgtgaaccgccggattgaccggattgacaaactgaccggctaagaagctgcccggtgtctcttttgccagctcttctgccttctcgatcgcgcccttcatgccctttgcgccctcagtcaggacaatctctgcaccgtacgctttcagaatgttgcggcgctccacgctcatcgtctccggcatcgtcaggatgatgcgatatcccttcgctgctgcgatagacgccagaccgataccggtattgccggaagtcggctcgatgatgacagaaccctctttcaggacacctctcttctctgcatcctcaatcatgccttttgcaatacgatccttcacgcttccagccgggtttaaatactccaattttaccagaaccgttgcttccagtcccagcgctttctcaacattcacaacctcaactaacggtgtgtttcctaccagccccagtgttcccttataaatgtttgccatgatgatttcctcctaatatctgtgatgatttttatattttttaatttttatagatttctatagattcttcttttttccagaactcatttccaatttgaaaaactcgctccaaaagaagtttaaaatgcgaaaagagcccatcctctatacacatttcccgcccgtccaatccagcttttctgccgcctgtcctgcttgtttttctgtgtacgcggatgcgctctttctatatccttaacccttatgaataaaaagattcacgaaacccgttttccccggaagccccgcttaccgaagtccagctttctggttttcgcgtacacaaatgcgacaacaacatcgatccatacaggtacaaacattgctgcaacacatcgtattcatccaaaaaccattgactgctttcatgatcttcactccttttctttttcctatcagcttagtaggcatattatcactttatgcaatatctgtcaacctttttttgcccgttgttactgttcacgcacgcgtgcccagtaacggaatttgccgtggcttcgcatttaaatacggcaaattcctgctgccaccacgttttcttacggcactttcggttccaaaagtgcccacccgtgaacagtaacgattatttgcacactttgttacgtttcttcatgtctttcttgacaaacgcagaccgcacctttacaataaaataccgaactgatgggtaaaaaacgttcagaaacagagcctgctattatttagtatagcacagttgtgactgtgaagctactgacagaatatattacaagggagtatcatatgttaaattcattttcacgaacggaacttctcctcggcagggatgccatggagcgtttatcaaaagcacgcgttgccatcttcggcatcggcggagtcggcggctatgcggtggaggccctcgcgcgcagcggcgtcggcacgcttgatctcatcgacgatgacaaggtctgcttaaccaacatcaaccgtcagatcatcgcaaccacctccaccatcggaaagtacaaggtcgatgtcgctgaggaacgcatcaaatccatcaacccgcatgcggttgtccacacctacaagacattctacatgccggataccgcgaaggaatttgatttttcccagtatgactacgtgatcgacgcaatcgacaccgtaacgggaaaactgatgctggtagaacaggcagaggcaagccacacgccgatcatcagctcgatgggtgccggaaacaagctggatccggctgcctttgaggtaactgacatttataagacttccgtctgcccgctcgcgaaggtcatgcggcgtgagctaaaaaaacgcggaatcaagaaactgaaagtggtttattcgaaagagaaaccgttgactccgggcgatgatatggcaatctcctgccgttcccactgtgtctgcccgccgggaaccgcacgcagctgtaccgccagacggcagattccggggagtatctcttttgtgccgtccgtagtgggactgattattgctggggaagttattaaggatctcgttggggttcattgattgcttactgattaatttgttaagccgatatattctatttatgtcattttttttaattttatatgtatgtaaaaaaccaatgaatcccatcttgggggtatcattggttttttcgtttcctgtcttttattcattttccagtaaaagcacctcttcattcagtgccttcgtgaagattcccttcaccgtcttatttttcaatccttcttcgtatggcacggcacctttgacatactggcgggtgtgtcccatcatgtatttggttccgtcaatctcgattggttcttcgagaaggatttcttcttcggttccgaggaagcgcccgcggtattctaaggactgctgtttttccagtgccagcaggatatcgctgcggacagatttggttccttctggtacctgatccggcatatcggcggcgcgggtgcctgcgcggcgggaatatttgaatatatgcatctcgtagaaatggatcgtttttaagaagcgctctgtttcagcaaattcttcttcggtctcacccgggaatcctacgatgacatcggtcgtgatcgccggattgtcaaattcttcccgcagaatttcacagcacacctggtattcagcagcattgtagcggcggttcatgcgctttaaggtcgcgtcgcagccactctggagtgacagatggaagtgcgggcagatggtccgcagactcgccagctctttggcaaattcgcgggttacgatacgtggttcaagagaaccaaggcgcaggcgctcaatgcccggaatctgatcgagacgtttgattaaagtcagcagattttctttctgctcatccttgaaatcgacgccatatgagcttaaatgaatacctgtcaagacaatttccctgtatccggcttccgcaatcccgcgcacctcgcgctcgatgtcctccgggcggcggctgcggacgcgtcccctcgtatatggtataatacaatagctgcaaaactggttgcagccgtcctgtaccttgataaaggcacgcgtatggtcagcaatccggcggatatggagttcttcgtattcctgtgaatgtccgatatccagaatctcaccgctattttcgtgatctgcaaaataatcatccagaatctgtaccagatcttttttctggttattgccgacgatcagatcgaccgcctcatctttttttagctccgcgcctgctgcctgcacataacagccgaccgccacaacagccgccgacgggttcattttctttgcccggtgcagcatctggcgcgatttccggtcggcgacatttgtcacggaacacgtgttgataatataaacatccgctccttcccggaacggcacaatctcatatcctgcatcctctaagagctgctgcatggcttccgtctcatatgagttcactttgcagcccagattgtggaatgccgcttttctcatttttatctcctttaaattgaatcctctcttgacttttgtcagattactttgtagtataaaagtattattgtagatagaggaggtttttttcatgaaaacagttcgtatttctttaaactcgatcgataaagttaaatccttcgtcaacgacttagcgaagttcgacgtagattttgaccttgtttccggacgttatgtgattgatgctaaatccatcatgggtatcttcagtctggatctgtccaaaccgattgatttaaacatccattctgagaaccagattgacgagatcttaacgacactggctccgtacattgtatagcaaccattagaacgatcgagatggttctgtttgaaacgaaaaaaaccgctgttaagcaacgcgctttgcagcggttcttttttagatttggaagaacggctccagcggcttctctggattatcgttgttcctccaaatcctctattttatatgactagcaccggataacctcaaccgtatcgatcgcctcttttaccagcgcatctatcttctcttccagattgcgctcggatttttcaatcaggtgcaggaccggcttggtaaccgggtgtttggctacgaagatggtgcagcaatcttcatacggctcgatcgatgtctcgtatgtaccaattttcagggaaatatcgacgatatcctgtttgtcgaaaccgatcagcgggcggaataccggaagtgtgcagactgcattggtaaccgccagggaatgaaccgtctgggatgctacctgaccgatgctctcgccggtgatgagtccgagacagtcgtctttcttcgccagctcttccgcaatcttcatcatgtagcggcgcatgataatcgtcagctcctcatgcgggcactgctcgtaaatgtagagctggatgtctgtgaaattgactacgtttaacttgatcggacctgcgtattttgctacctgttttgccagatcgactactttctgttttgcgcggtcgctggtgtatggcggtgcatggaaataggttgcctcaatagtaacgccgcgttttgcgatcatgtatccggctaccgggctatcaatgccgccggataaaagcagcatcgcgcgtccattggttccgaccggcataccgcccggtcccggaatcaccagagagtatacgttgatacgttttgcacgcagttccacatttaaaagaacatccggattgtgtacgtctacctttgtctccgggaatgcatccaggatgacctcaccgagatcgcggttgacttcctcggaggtatgcggatactgtttgtttgcacggcgggtgtttaccttgaacgtaaagtgtttatccggatatgctttgtccacatactcaacaatcttcgctttcagatcgtcgtaaccgttgtcctctaactggaccatcggacagatcgccgcaataccgaatacctttttcagtgcgtcgataacctcatcgtaatcaaattcttccgctgcggtcgcatagatacgccctgcctccttggttacggtaaattttccatcgagacgttttaacgagtgatggatatgggacaccagcgcgtcctcgaatacatagcggtttttacctttcaggccgatctccgcatatttaatcaaaaatgtatgaaacatggaatttcctttctacagcaggctgtcattcctctgctttcccgcaaaaaaactgaacagccattctttaaacagccattttatttcatctggtaacggcgaagtaccggaagcagctctcccagaacgccgatcgcatagtctacttcttcctcaacattcagatcgcccagactgaaccgaatcgtcgaatcgagaagttcttttttcacgccgattccctttaaagtaccgctgatgcccggatgattggacgagcaggcggagccggacgatacataaacccctttgtcctccagtgcatgaagaagtacctcgctgcggacgccctcaaagcttgcgctgacgatctgcggcgcgttggtgcggtcctcactgccgttgatggtaacgccgccgagcagtttcaatcccgcaatcaggcgttcccggagtgtatacagcttttcaatgcgcgcatcaaaatctttgtacgcctcgcgcgctgccacgccgagtccgacacaccccggcacattttccgtaccggaacgcatgcccttctgctggccgccgccaaacagaatcgggcggatcttgacaccgtcgcggatatagaggaatccgacgcccttcggcgcatggattttgtgtccgctgacagaaagcaggtctattccctgttttttcggacggatcttatattttccgtatgcctggatcgcatcaacatggaacaatgtcttcggatttttcttcttaatgcactggctgatcgcctcgatcggctctactgctccgacctcgttattgacgtacatcacagataccaggatcgtgtcctcgcggatagctttttccagatcctccagagaaatatgtcccagatgatcgaccggaagataggtcacctcaaagcccatctcctccagaaatgacatcgtattgtagatcgacggatgttccacgccggtcgtgataaggtgttttccggctctgcggtttgccagcgccgtgccgatcaacgccgtattgttcgactctgttccgccggaagtaaagagaatctccttctcctgcactttcaatgtatccgcgatcgccttctttgcctcgcgaatcaaattttctgcttccacaccttttctgtgcttcgccgccgcgtttccgtagttgacacacatcgcatcaacgaccgcatccttcacgcagtccagcaccttggtggtcgctgaattatcaaaataggcttccatttttatctctatctcctttgtaattttccaattacacttccaactgcagcatcagcgccgacaacatacacaatcctgccgtctccgtccgcaaaattctctttccgagcgttacgatctccgccctgttttccctggcaagctcgacttcttcgtcctcaaaaccgccctctggaccgatgaaaacggcgatatccgtgcccggtttgaccgacgccaacagttcccgcgttttccggatgccgtccgccgactcatacggcagaagaaccatatcgtacccggctgcctctttgaccgcctctttgtaggtcataagcggcgccacctccgggataaggctgcgcttggactgcttcgcggcgctctcagaaaccgcattccatcgttttcccttcgcatccgcttttttcgcatccagcttgacaaccgagcgcttcatgctgaccggaatcacccggtacacgcccagctccaccgccttctggatgatcagttccatcttatcgcccttcggaagtccctggaacaggtgaatccgcgccggaagctcattgttttcccgttcttccagaatctttgccgaaacatactctggttccagttcttccacacggcagaaatagtcgccgccctcacggctgctgatcaggatcttctcgcccggcttcatccgcaggacattgcgaatatggttgacatccgcgccctcaatccggatttcttccgccccgatctggtgcggttccacaaaaaaatggtacatgattatttcttcctcgctgtgacagaaacccactcgccctgatgggtgatctctacaatctcaaaggcatcgttcgcctcaaatgccgccttgactgcctcttccttcatatcaatgatacccgatgtgatgaagataccatttttcttaatatgaaccgggatctctttctgcagcatgatgataacgtctgccaggatgttggcaaccgcaatgtcgtaatactcgtattttacctcgtcctgcactgccttatcgtcgatgatgttgccctgtacgaccttaaactgctccggtgcgattccgtttgcttccagattctcgccaacggctgtgatcgcattttcatccagatccgttccaaatacgtgttttgcgcccagttttaacgccgtgatacctaagataccgcttccggttccgacatcaagcacctctgaatccggtgtcacgtatttctcgagctggcggatgcaaagctgcgttgtctcatgcatgcccgtaccaaacgccgtacccggatcgatctgaatcagcagcttgtctttgtgctcctccggcactgtctcccaggtcggcttgataaggatgtgatcgaccgtaaacggtttgaaatactgtttccagttgttgatccagtccttatcctccgtctcggattctgcaaacgtgcaggcgcccagatcggtaaacggcttcaattcttccagcgcctctttgactttcgccatcatcgccgggatatcatcatcctcatcgagataaaaacttaccttcgccacgccctcatccggcggaagctccggcagaatgtcgatgaacattcccttcgtctctttctcggtcagcgggatattgtcctcaatctcaatgccctcgatgccgagttcatccaatgtgtagctgatgagatccaccgcctctgtggtggtcgtcagcgtaaatttcttccatttcatgttcgttacctctctttattgaaacgacttatcatccaaacattcacatttcatcacgcagctatttttgcatcattttcactgtaaatgtgtcaaacgttactgttcacaggtaggcacttttggaaccgaaagtgccgtaagaaaacgtggtggcagcaggaatttgccgtatttaaatgcg

SEQ ID NO: 10990 - DNA, 6973 bp, Unknown
  gut microbiota DNA sequence
agaatttattatggacgagtgaaggaatatctctgtattctttctgagtcaagctaattcaaaacttttatttgcagaccagcactgcttgtggtggtcttattttagtgcctaattttaaccatgtaaaattttatatttttttccccattaagtcttgactttttatttgcaggctaaagtaacgagaatgcggtgtgccgtttttcaatgactgatcgttaataaactctgaaaatgcctgcatcgccgcctcatgatccagtttggcaattttgtgtaccatcagaccaaatggtgtatctccaaactccctctggtagtcttccttaccgccaagttccgtcgtgagaatccgctctaactcctgataatctccctgtgtcagcttaatattgtgcgttaatttatgaatcgccagtgtgtttccatgttccccgatatatcgattaaccttttcccgataatcctcaaaatcatatgccgcatctaactggacaccctcctgctgatcgataatggaatctgtcaaatgagtcgtgatcgtcctgcccccctgatcttgatccaaaaacctcatcagttcccgcaatttctgccggacgcgttcaaattgaagaacatcatttaccttccaaaattcatccgtctgaatttcttgtataaaatcaagtttttcttttacctgaggaatactgatcttgcgcgacagcaaaccagcaatctcacaaagcacctttttcgctctcttaaaagacggcatctgttccatagaagccagcatcagaccatacataaaattgtcaaaccgtttagccagctcatcttcatcattcaaatgcaccagcggcgcaatatgctgtaaaagttctcccttatccccttcactgatcacgtcaaaatccgtctcttgtttaaatttctccacatattgtaatttaagctttacagaaatcagcttcggatccaactccacaagctgattatggcatcccgatatcagttccttccgccactcttcataagtaccttccgcatagcaagcttcctgcggcagagaaatgagccggatttgttttccaaaaatattttcacttaaggatttcgtctccttcgacacaaaaccttctatatgttcacgaaaatattcaaaattcccacaataatcaaaaatcaggaaacgtcttttatctgtatactccccgtctatcggatccatgcaggtaagtcccttgcacaaacgagtgccgcgtccaatcatctgccagaattttgccttagaacgtaccttcttaaaaaatacaagatttacacattgcggcacatcaatccccgtatccatcatatccaccgataccgcaataaaaggaggcttattttcaaccttgaagtcatcaattacagtctgggcgtatgcatcatcacaaattaccctctgtgcaaatatccccttcttttccggataaatattgggatatagcttgttgaagcgttccagaataaactccgcatgctttttattctgtgcaaagatgattgtctttccaatccgatcgccgccagccacatgaataccacgttccatcagatcctgaagcaccatatctaccgtcacttcattaaagataaacttattcatcgccgcagaaggaataaattctggcatctgaccatcttccacaaaatcgtcctcataccgttccttatccttatcgaataaatcatcatacgtaattccttcatccagaaacttcgtctttacctcataattataatatggaaccagcacatgatcctgataaacagccgtctcataatcgtatgcatacgtcggcacaccatgttccatttcaaagaaatcatacgtattccgatccacatccgttttcggcgtagccgtcagaccaaccatgattgcatcaaaatactcgaaaatcgcccggtatttcttaaaaatactgcggtggctttcgtcaataataatcaaatcaaaatgtgccggtgtaaacaagcggatgccatccttatttttcgtatcatcaatcgcatttaacatcgtcggataggttgaaaatacgatacgtgcattccgatcatctttattggtacacagattgcaaagtgacatatccggcagataattcttaaaatcatcctttgcctgttttaccaaggcagtccgatccgccaaaaaaagcacattcgtcacatattttccacgactcaaaacatccgtcaagctggaagccgttcttgttttaccagttccggttgccatcacaagcaaatgtttccgataaccgcgctgtatctgttcgcacaccgcccggatcgcttctttttgataataacgatccgtgattttatcatcaatcggaatctgcattaaatccttatgttccgaacgtcggttcatcatcttctgcaaatcatctttactgaaaatgccactgaccggacgctgtggagaagtcttgtcatcccagaaatacgtttcaaatccattcgtcgtaaacatcatcggtctgcggccaaacttccgctctaaacagtcacctgtttccgaccaacattcggatccttgctggtgcgcttcgcttccaccaccgctggcgcaaataatgcatattcttttgtattctttaaaaattcaaagtttgacataagatcccccctatttggaagtattcttctttttctttggcgctgtcagctcatagcttaacgcaagtaaatttttaatcggctcatccagccccgcatcccccagcaaaacactgatccacttctccttgttcatatggtatgccggaaaatatcctttctgcccccgcaaagaacctatcagcatcggatcactctttagatttataacatctatgatattatcatcctccagccccagcttactccctgcaacactcaaaatcacgccataccatttatcattatccgcccgacgcagcactgcgttcgaatccttccacggatattccgcttccgtgccatattcttgttttacccattgaaataattcttctcttgtcattttggtgaaacgcctcgctttcggtttcaaggtaaaatatatttgttatttgcaatgtttgtatttgtgtaaatatgtttttatagtgcagtatgatgttctgtttcagcgacaatttatccttttacaaaagccaccccaaaagctctctctcgaacaccgccaacgcccgcttcacatactccctccgcgccgtttcatccacaagtgaaaccgcacacggattcatctgcttaaaatccggcacttctgcctcttcgcagtggcgttttccgttcggataacaccaggcaaaccaccagtcctccggcagaattatttcctttttgagatatctggatgcctcctgcttaagcccgtcggttatatcatctacctgatagcctttcgaaaagccatccttggagctggcttctttatcaaacaggcagaatcccgcaaacaaattgtgctctacttcaattcgaaaccagagttccagacccgctttttgaaattttgccttttttaccacataattcaatccaggataggtgctgtaacaatcataaaatttatcatgctgtaaatcctgataggaataatatccactatccttttctaatttcaaaccatatttttctaaaattggctgcatctgctgctgaaattcttcaaacacctggcgaatcagccgcacctttgcctttttcatcgatttttcaatctcgattccggcaagaaatttttccggcgattcgtacaatgcctcaatcactttatctgccactttcttctctctttcatccgctatgctatgtaccgcatccaaatattgctccatcactgcccgaaatggctcttttaaattttgcaattcaccttccagccaccgatagatatcttctgcccatgaaatacactggatttgccctaatggtaataaatttcctccgcctttcttcttccggctgtactcagatggcggcgttccaaaacgggttagatatatcaatcgggaattttgtgccatctcaaagtaatccgaacactgtccttcctgttcccccgcatagatttttacctcgatcggaatctgatactccgcattccgtatgaaaatatcaattcttctctctttatcaatcgggtactctttgactacctccgtatgcaatagcaatgtatcgcttaccggatccattttcaacacatctcggataaacgatttcagaaaccggattccgcagccatgcattccctccgggttcagcagatcggtcaaaaaacggcacatgatcacttcacggctctgtatctctaatacatcaaaaatgttgtaggctgataatttcttatgaaatggtatgtttttacagtttgtatgaatttgcgatagtaaatctctatatgtttccatttctcattctctggcgattcccgtttgtctcacttttcatttataaaacgatttctttttatctatcataccataaaaaacacggttctcacagactctatccaaggcatccctccaactttcttcacaccaaatcataccttatttatgaaatgcaaaaaaagtcgatttttatttgcatttcagtgcataaactttatttttttagattgtgcttgtttgttcagcaagcgtaatactgacatcacaagcaacatagcaaaaacacagcattaagttttactttttgcaaggtagaaaaggtcaacaaagtattgcagataaaggatttttagacaattatctctcattcaacttgttcaaccacaatgaatatctacgctcacagctttgaggaacagcaagaggaagttgcaacaaaggtaaatgagttcttgcgattgaacgcataaataattgagagccagaggacaaaatccaaaggctctcatttagtcatcattcatctttcaattccatgtggtcaagggcatattgcaaagccatgctgattagttcattacgagaacgattcgtcttagctgctaaatcgttatattcttcttgcaaggctctatctatgcgtatcgtcatggtgacagatttatcttcttttggtgttacgataaatttctccataatgcaattcctccattggttttgattacattatagtattgacaagaggtgcaaaactatgacacaatagtgagttaaaattatgctgtacttttgtgttacactctgctataatgctactatcaaccaaaacttggaggtatggcattatgaaagataaatcaaccaaaagcaatggaaagaaacctattttcaagaaatggtggttttgggtaattattgttgttattctggccgctatctttggaaactcaggaacgaatgacagcattaaggacgaaacaaaagacgcaatcaattcaacggaacagcaagcaacatctgacaaattcgttgaagatgtgaaaaccgctatttctggtgctattgacagcgacaatgaagcaatcacagatattgcgttgaaagacaaagatctgtgtgtaacagttgatttgagtaaagcagaccccagccctcttacaatagaggacttggcaatctctcgtacaagttcaatcacagacgctatacttgaacttactggttacgacagtcaatggaacacgataacagttgattttggagatgttggcaaggtcgtatgtgacaaagatagcataaaagaaaatgaagcaggtggacgatacttcccatcagaaaactttacattaaaataaatggggaaaacaaagagagccttgacaggaacaacaaccagtcaaggcttttctttatactattgttatactaaacttacggcgtgatatggtgtgatagaccgagttagggaaagtagaaatcctaaaaaggtaatacgggtatcacttatggagagttatggagagatagggcgagtgcctgttaatcttttttaaatttatgctatactcacattataaggaggaactgcacatgattgatattcacgaactcaaaaaaagagatttatacttaaataaaattatagcgtttcaggatactgaacctgtaaaagttgtcaccggcatccgtagatgcggctagtcaagtcttcttagattgatgaccctccacctgaaagaaaacggtataacggatgatcagcttcttgaaatgaattttgaatataccgataaaatctatattcaagtcactgaatcaatgacaagcgaggacgtccgcaaacgtgaattattccctcttcaaaaaatcaatgacaattacaaaaaaatcgtcctttccctgaatcccggaatggactcttcctatgatggcataaaatgtgaactactcggcaactaagttaccagagcatctgaaatctggcgggataccgccttttttcagggtgcgtccatgacaccactactgcttacctttcggctatacagctacttttattatttctggattctttagtccggttacggacagttctttctgttttccggatacggaaagatttttacgcaggatattaaatgctcctactgcatccgcattatatcttactccatccgttatatacatgccccgctcttttcggtttgatgcttctgcatatctttttgatatttctggtgaaaacgggctgcactggctggtatagctttcttcctgttttgtcagtgatattccatacagtttcagtttatactccagcatgatgtagagtttattatacggcagtccgtgaaacttctggtttgtcttgtgccctatttcttttcctttacggatgtttcgggtatctcctatgattacacagcttatcctttcttttttacagtattctgcaagccatctggtaaccttatgaaggtaatcctttactgcgttctgttttttccgataaagcctcttgatatgtttcgatgatcggggat

SEQ ID NO: 10991 - DNA, 44554 bp, Unknown
  gut microbiota DNA sequence
tcagttccttaaccgtccgttctttcataataaaattcttttgtagagtccccaaacattcttccacaacacccacatttgttgtaataaccggaaccccacaagccattgcttctaaaaccggattaggtgttccttcatgtaatgacgcgcaaatataacaatcaattttgctataaaattgaggcatacggtaatgcggaatcattttttcttccctgtcagaagtatataattcgatattatagccttcctgtcttaattcttgtatcgctggctttataatagtattaattccttttaaatcgttaatactccacttactatttcctacccacccaacacgaattaatctatcatttatattgtcaaatctacttaaattattcggttggaacaaattcaaatccactccatctggcaagtaagcatccggtcttttttttaattccactttttcctggtatattctttcaagtttttttgaagatacagcatatgccgttagtatcgactctttacgagcaaacaacttttctgtaaccatcttttcttcatcatctaagcatagatggtcatatatttctgttgatatttttttgttttttatgtacttactaaaaaactcttcttttgtataacccaatcgaaaaattcgattttgcacccattcactatcataagatgataataatcccctccaaaaaaagtgaactattttgcagtcctgacttaaaataaatatatctgccacattctctatatcacaagcataaatcactttaaaatcataatattgattcaaatttttctttatttgatccgcaatatgatcaaacgcccaatcaggtctatctacaattaaagctattttttcttttttatttttttgttttttattttcatctacaacatcataaacacactctcgttgtatctcttttcttccttttactatgtcaatcaacttccaacatttattaactattcgatatccttttgttttttttataactcgcaaatccgtttctaatctatttgttcgctcccataaaatatcacattcttttgttttcatttccaacaatctctgtgttcgctctttttcaacctctataattcttttctcctctttcaaatcttgaactcttttaatagaagtagactcttctgtaaaatctgttctttccataatttattctcctctttttatcttccttagtacttttttcaagaatctgatatccgaaatagattcttgcattttaattttatttaattcatcaactctatactcatccattcccatttcaaataaacatcccgacagtctaattgtcaattcatccattttagcaatatgtgatgtaggagacaaatatactaacctctctaccctattatccaataatactttttgtatatctctacttctatattgataatcaccccaatttgctttttctgccgaaaaaatatgctccaactgacattctaaatatcgatctccttcttctggagaattctcgtcggtaatcagtaaaacttgttttcctttttcttcgaaatattttttatagtttaataaaaccctatccatttccagatatccaacatatcgataataaattgccacttttgatttatcatttattctctttaatattaaatcctgtttttcaaaataattagatcctattaattttattacatcttgagcatcccaatactgtaataataattcaaaacattttcttgcatttttctcttcgattttatataaccaacaatcaatacaatccaacaaaatttcatcttttaaattaaaaaactcatttttatagtcttcgaatttacattgatgaatcaaaaattgttttacgttttcgacaattacagagcccttacatctactttcaaaacgtttaatatctaatacgtttccccccgtaactccaacacccaagcgataatgataaaacttttcttttattattcctacatgtttggcataataagaaagaataaacagtgcatatctgtcttctgcagatacatattttccatctaaaagcttagcaaatccctctttgcacaactctgttttccaaattttattgaccaagttgcaattaaatttatgttcaacaaaacaggcacttaaaatatctttctgtatcccacttgtgtcctctggattcataaaatgatcaacccataaaatcaaatcgtctgccagtttttctcccgccaaaatttctgctccaaattgtgcaaaatcatattcttctttctccataatgcaaaaaagatattcgcaagtattcaaagatatataatcatcactatctaaaaataatatatatttacctgtcgctatttctactgcatcttttcgagttttgcataaacccatattttcagcatgttttattaatttaatacgtctgtctcgattcgcatattcttgcagtatttttagtgaactatcttctgatgcatcgtccacacaaatgatttcgatatctttttctgtctggttaattgcgctctccaggcactcccgcagatatttttcaacattataaactggtatcaatatggatatttttggcataacccctccaatatacactaacgttttctcttaatgattcccttaacccactctctcctccgactcccaatcggcagcaccttattggcgatcttccggatgcccgcgttctgctccatccttgcgattcttgacagttccgcttctctctcatccatcaggcatcgtttcgtttttctcaggatcatcggataatacggcgacagcttcgcatactcccagaaatattccgcaaaatcacagtccaccacatcccaaggtttctggtatccagcgaaatggatcagatacgggcgttttctcgcctgtgtgtatgcttcatagagctgtctcggcgccatcttgagaatgtccatacggctgcgtccaatctcttgccagtccatcagcgtgttccactgctgtggcaggtaagttactttgtttttgcacacgatgttcaggatatcctgatcgtgacagcgataggaatgggtcagtgccatctgaatcatatcttctgaactcatcgtcctgcggagtccgtccagatcaagaatcaggacacctgcctggaaatagtcatacgggctatccagacccaatatctcggtcgcataggtctgccagttgttctggttcagattcagctgtcctgccacatcgatgtcttttgctgccccgatcacagctccgttcaggtcgaaatcatacagttctgctacgtcatgatcggctaccatatcacagtccaggtagagaatcttgtgataattcggcatgatttccgggatgatcaggcggtaatatgtctctacggacaagtgctgatcgacaaataatttgcccgcatcgaagtattcacatactcggatgaaacgaatcgatatattctgtttgtccctggctgccatggaaatcagatgctgatttttctcagaaatgtcgttgtacagaataatgatgtcatactctctctccggtgaggcattcacaatcaccgagcggatcatgatgtcaagatacggtgaaaatttatcgttggcagacagcacgatcggcacgcctgccggataaaccggctccagaaccgctttcggcgctgtctctttgaacagggttttcggcaattctcccgcccggattcccggctgggttttcagccactcatagtagatgccgcaaaggcgttctgccagatatcccatcacccggtattcttccacgctgtaccaggtactgtcgatccgcttttctgtctcaaaaaggatgtcaaagagccatgcacagtagtctttatagatctcttttttcatgatgaacatattgcactcatgggcgttttcggactgcatatacgaatctgctgtctgtgcaaacgccggatatttttctttcaaaatctgcagggtaatgtcgagatctttccggtgctggaaaggaaccatgccatattcatggtatacatccatcgtttttccttctgtcttaatgcgcggataccggcgtccgcggacgctgatcacgtcatattttgtgatcagatcgcgcataatctccggctgaagtttcatttcctcgatcgcttcttctgagatgcggtcataggcaatattcccccatccatcgtctttgttcagagacggatcaaatgccagatagcggcggtaatggaaaaatccatagtaatccgcctcttcgtttttccatgcccaatactgtgccgtcagctcacagtatgtcttattccgttcggaaatattgtctccctcatcgtcatgcagcatccccggaagtttttttccggagagtgccgttcctacctgaatcgggtataaatatgggttttccggcacataggccggtttgtggcagaccacgtagatccggatatccgggttctgtcctgcttgtttttccatgtatattacattcctttcatctacagcattttgcgggatttttatgcgttttccggcagattcaggctttccatataagcatcgcagacgctctctgcctcgccctgcataaccacatttcccttgttcagccagattgcatggtcgcagagctgacgcaccgttgccatcgtatgggagacgaacaaaagcgtcgtaccattttccagcatatgatgcatgcgctcctggcatttttcctggaacgctgcgtctccgaccgccagtacctcatcgacgatcaggatctccggctgcacgatcgtggcgatagcaaatcccagacgggctgccataccggaggaatagtttttgatcggcatattcatgaaatctttgagttctgcaaactcgacgatctcatcataatgcgcatccataaattccttgctgtaaccgagaacggcgccatttaaataaatgttttccgtcgccgtcagttccccgtcgaatccggcacccagctcgatcagtggtgcaatgcttcctctcacttctaccgtgccgcggtacggcttcaggatgccgcagatcagttttaacagggttgattttccggaaccattggttccgatgaggccccacgcttccccgcgttttacttcaaaattgatatctttcagagccatgaattcctgaaacatgagctcccgtttgatcagttttacaaaatattcttttaagttatcgatgcgctcggaagccatattgaaacggaccgccgcattggttacttttatgattgtatctttgtccgatgccatttctgcctcctagatatataagataaatttatcctgcgtctttaagaacgcgcccactccgaccagaagtgcgatacctgctgccacgaatccggcgatgatcagatacggatctggcatccggcattccagaacgatctgtctgaactgcgtgatatagaagtacatcggattcagggtcataaccagtttccgcagtgcctccggaagcagggtgatcggataaaataatggggtcaggtacatccatgcggtcagtactgcattgtaaatatgctggatatcacggaagaatacacatccctgtgctaacagcattcccagtcccaggcagaatagatattcctgcaaaagaatcaccggaatgaacagaaagaatacattcgggactacccggcacacaataaatacgataataagtgcccccagagcaaatatcatatttacaaaggaacttgtgattttagagacggtaaatacatatttcggtacatacgttttttttagcagggacgcatttccaatgatggaaaagatcgcctgtgtggttgattcactcataaagttataaagagtctgtccgataatcaggtataccgggaaattggtaatatccgaccggaacatattggagaatacaattaccatgataaccataaccatcagcggattcagaatactccaaagataccccagaaagctccggcggtatttcagcttgatgtcttttgtgacaagctgctgcatcaggaagcggtatttgtaaaatccgcccagtcgttttaagaacaaattcatatctttttcctttctcttttttttcttttatctcagaaaaagtccgcgcagcagaacccgtcttaaacttcctgccggaaataagcggtttaatctgcgcatgtctatttttattttgatctttgtcggttttagcctgaattcccgtatattggatgtgctttcctcctttcccggttcggtatgatagaatttcagatagggaagttccgcacactgcgtccccctgtttctctgatataagtaaaagatgccgaacaggcgctccgccagatacccaatcagtctcggctcctgtttctgcctgtctgcttcttttctctctgcttcaaaggcgcttaaaagcgtaaaaagccattccatgtatttctggaacagctcttttttcatgatatacatattcatataatagatttctttggaatgcatatatgcgtccgccgcatctgcatattccggataaatccggtttaaaagtgccagcatctgattcagattgtttccatcatgatactgacagtattgtcggtaaaccgttgtattgattcgttcgcgatacacggtcagaagatcgtattgttcgatctggcggcacatccagtcttcctcgatccagtatggtgtcagatcttcccatacggaatctaattctatatatgggatatgacgttttcctattattttccctttcgcagtcaccgggcttagattgcgaaaggtcagataacggcgataatggaaaaatccgtaataatcgcaatccaaatgtttccacgcccagtactgggctgtcagttcgcaataatctggatttttttcggatatattatcgccctcattgtcatggtatgccattccttccagccgccgatctgtcagagccgttcccacctgtatcggataaaaaaggggattttccggcacatacgttggcttatgacaggcaatcaaaatgcgtatatctgcttgtttttccatgttttattttccgtttgtcggctcctgttcttctttgaccccttccgtactctctttcatcagcatgatcttcggcgtcatgataatcagcttcagatcttccagaacagaatagttccgtatgtacgtcaaatccagcttcagcttgtcataaggggttgtgttgtattttccatatacctgggcataaccggtcagtccggctttgacctgcaggcggaaggaaaattccggtatctctttttccagttcggctgctaattccgggcgctccggccgcggacccacgatggacatatcgcctttcagaatattgtaaatctgtggcagctcgtccaggcgggttgcacgaaggaggcggccaatcggcaggattctcggatcgtcctcactggccagtcttgcctttccatccgcctccgcattctgcaccatggtccggaatttatagatttgaaatttcttgccattttttgtgaggcgcgtctgatgataaatcaccggtccgccgtctgtcaccttgatgctgattcctacaatcaaaaaaaccggaatcgtgataacgattccgacgagcgatccgatgatatcgatgatccgcttcatgatggcctgttcaatctgcagtccctggttattcctcgaaagcagcagcggcgaatcaaacagattcagttccaccgaactccgaagcagaatgtctgaaatttttggtacactgtaagtccggatattccgtccgaagcagtatttgatgatatagttgcgctcgtgcgccggaatatctccgacaatcacgctgtcatatctggcaatctccgcctttacccgttccgggccttcgtgatagctgatgatctggctgatgatgtatttatcttcgcgggcgttcatcttttcgatcagatgatagtcggagtgatcgcccgatatcagcagcagttctctcggtggaaacatcccccggtacagccacagaaatgtcatcgtccatgccagaatgatgatgactgcgccgaccagattgactgccagcggcagaggtgccgtgaatttcttatcctgcacactgatctggaaatacgtaatgatattggtgactaccaccgccagtatctgcgagtagatcagattgccccgtttcaggagcgctatcttaaatccgccgtacagctgcataaagaaaataagcaggagtccatagatgaatatcatcatccagttacccctgcggaaaaacggcgcccagatgatcttgttgtaccagttgatccagatggcaccgtaaagtcctgtcagcagcgcgatcagaatcagggcaaagcccagcttgatcagccgcttatatggttcgaattgattcatgcttttgtgttttggttccttcctttttatttaattttataatttaaggttctgtttttacagtctgtcccttacctttgtcttacttatcttccggcagacggattcccaattctatcctgcgcttttctcccagaagctcgacctcgaccgtcacgatccgcttacggatgcgcttgcgtacaatcttgtcctggaagaaggataatggtccctgggcggttaggatgttgccgtcttcgtcaagggtgacaaaggagcggcggacaagacattcatccaactccatcatctggcaaagtaatttcttttcttcctcctggatctcccagaattcacagtccgtccgcaggagtttggagagcttcgggacccgctttaatgccagaaagaattcctccggcgtgtcggtgtccgcgataacataggatggaaagagcggtttctggtattccaaaagttccccggcattgcgccagacgcattcctgctcgatcacaaaacaggcttggtatccatttcctttcaaaacgcgttcgatgcattctgtcagctcctgttccctgcctgtctgtgtttggatcacataccacataccgcactctcctttgcattttccctgctttcaggtgcacaatgggtatgcttcgccatcccggagccgccttctggctgcccggatacgatctcgatccatcctatgttccatctttcatctgaccatgacattgatcacaggcagcttactccacgtgcttttgattcttattctgcgtctcttaacgcgctttcatacatccgcatccggcacgccctgattttagaggatttgtgcctatgcgaagtctagtttattatactacggtttgtggggggattcaatagaagtttgtgggaaggaatgtttaggaaattcttaaaataaagggtaaaaaggcaaaattctatatttacttagaaatacatatcggactgatagcgaactcagttgacatcgcagaacataagttctataattagcttgttagcatttacaaattacagatttataaataatacctcggaggccaatgccatgaaaaaaataggtttaaccatatatgctttaaatgtttttcatactggaaagtatcactttgaaaagaaacatggacatttaacttttatagatatgatttcagctttctctaaacagaatgcgaaacaatttgatattgataaccatgctgagaacatttttaaagtcaactcatttgaggtggaatgtgtaaaagatgaggatggacatattatttttaatgcttttacaggagttgtaaaaaccggagaatatggaactgaagccgaactcattcacacaaaaaccagaaaactgacccacaagaagaccgttgaagaggctgaagttataccattcgctttctatctggcactgtctcctataagaccggaacgtggcatacttatttttcagaccgaaggccgcagcagcatgaaatcagcatttgaacaccgcatgaaaaaatttgtcagacacacatatgaaggctggaacttttcattagaaactcttatgcctaaagaatatgtagaacactacctggtagatggtgttttaaaagaactccggatgattaaatacggaatttcccaggatatttctgagcgaaatgggatacgcggaaatgatgaggccgtgtatgaagaacggatcatccataatcctttgggttttcttgaaaagggcgccgataagatccgggaggtcttaagaggacagcggagcttatgtgaagttgtttctgtatccgatttcgattatgactgcctgaaattcaaatttcgcctaggcaagacagaaaaaccattgatatcggcaatttagatgccctggttgtgacagaagacatcaccgatcaggccggagtcaaaacagggcatcccgatgtagacatattaaagtccgaaatgcgcgaaacagcaaaagaatatatgcggagcatggggttagcataagaaggtgaattgatgaaacattggatattaagcagagaaggttctctgagtatcatactggtaatatggttgtttaatagctgtgttcttaaacttaaatacgcttccttggtggatatttttaaaaattactttagttgttttaaggataaagaaggacatttgttgatagcaccacttttaaattatatgatcctgccgattcttctggctggaattattgccagagaaaatccaatcagcgaaacgatccaaaatattttaactgtattaatttccattttaacatccatgttatttgcacttttgacaaccatcatccagatgaaagctaaaattaaagaagatttggattattacagtatagaagcaaacacctcaaaacaggcattgatagaaacctattatattgtcatgtttgaaataaccatgtgtgtatctgtattaatcctgtgtttagtaaatttattcacaggacagcttagctgggttttcagctttttaatttatgcctgctcgtttttagtcatttttaatttattggtggttgtgaaacgaatttttagggtgattgatacggatatgaataagtgagatatgccaagagcgggcgagagtgacaggaaaaggtgtcctttttggttgtttatacataaaaaaacagtaactttttgttccgtactgatattccttattttacctcataagctattggtaagatgagcatcgtttttcataaaagcgaaatctctgtatgggaagaaaaggttagaaaagtcttaagaagtgagaaaaattgtttttctcatcacaaaacaaatgcaatcgactgcatgatagaatgaagctgccaattttcacaaaaaggcagcttcttattattttccctccagcaacggcatatccttaaaaaatcgattctcattataagcctgcaccagctccggaaaatactgtatcttagttgatttttcttcaatataatgccttattcgatctttataaggatacttattttcccgctcaataaattcaacatacgcaatctctcccaaaatatgctcccgatttttataatcccctgtcattaaacaagtgaaaatctccgctctaattttttgtttcagctttcttggagcctttaattctaccgcgttctccgcttttcctggtgaaatcgttattcctgtgatctgctttttattcgatggcgtatgaaaatgtgtttttctttcattcaatagaaagccctcatcttcgattatcttttttataatgggataatttttcaataacagcaatttatcatcacaggaaaagtacatatcatctgcatagcgtgagaaacggattcctcttttttcacacaatccaatcagacgtttatccatattcatacatatgatgttggatatcgccggggaacatgcacttccctgcggcaatcttccatccagcgtacaaagattcgtcagtatcgctgctgcaaagtgattatagcccagattagaaaaaagcgtatacactttattcgctgttatgcttggaaaaaagtccttcaaatcaatcgccagcccatataaggtatctgcatggtaaatagcattttgtttatgcccaaaattgtcacccttcctaaaagccatcgcactgcttgaaggaactaatttattcaatatttccatcagaatccatctttgaacgatatgtaatgtataggatggaattgatatttcacgcatttttccgttgcgcttggggatttctatgacgttataataccgatccgttttcttggaaagacaatacagcagacgcgtactcagcctggttatctctgataattcttccaacgtctcaaacaccggtaattttaaagaattgattaataatggagatattttttgagacataaaaagtcgcccctttcaccataagtttttcgttagggttagctggataattcatgactatgaactatactgctaagcataacgaatcatgtggaccatacaccaaggaagcaagaatcttcttccgaacacaatgtaataatacgttatgtataaactaaaaagggcgactaattatttaattgctctctcagtatatcacaccgtatcttatcatgcaagacagtccgattagccgcatacgacagcttcagcaaatcattcacttccatatatcccgccttcgataatgacaatatctcatcattctcattttcatcaaaccttgttgtcaggctcccagaacggaccatatatttcagggatgcattaaacagcttattataggttgctggcagctccttattctttaaaagcaattcttttaatgttttatgcagctctttccgttttacatctttgaaaaagtacacaataaccggtataaacgaaatataggcagctatattttcaaaactctgcatcttatttcctttttgtgcaaagcggcgcaaaatggtcatttttttgctcaatgcagctcccagtttttccggttctgtatctttatatcgtatgactgcctctttgttcttcttttccagatgcttgaccggccccatcataataaaacttttatctctggcatatttctgattcatgcagacgatcagtttttgttcgaatttttcactctgaacaaaggctcccagctcgactgccgaccccatactttcacaaatgatgcacacaacatccgcactgtccgccagaagattttcgtattcgagcagatcactgttcttatcccgattgagcatatccataaacagatcttccggatagagaacttgaaaccgttccttttctaaatacgttctgacccggtttctaatgttatttttatctgcacctccgcacaaaaacacaaaaaagaagcggctgaatgttttgcagaaaacgtccttgtatatcttttcatatatatttaacagttccatcgtatttcctcgccttgttcagcatttttttactctgaaatttccgctgtccctttgaagtaattaaaaagtccttgccgcactctcgctgatgcgccagtcccatcgatttatttagttctctattatattatcacattataaattccaattaaatggggtaactaaatattccgtacctcttgaattttcatctcggatatcctgcttgtttttcctcaattttaaaatgaatttttcggtttcagtttgcggggtgacattttcaataaacgattgaagaaaacctatttctccaaacaaaagtttctcttttccttcgttaaatgtatatccatgccctctgattccatccgactcttcgatcacatccgccagcacgcggaaaagatttttttggttgacaattgctttcatataaatatgaattttctctttctcttcaaatgcatcatataaagaccagatttgaaatctttgataaacaggggcttcatataaatcgatcttctgttctataatttgattacataattcatcatattttctttcaagaatcaattgcagctcctgatattcatggtcttctgttctcctaaaagatttgcaatccgaaatcatctcttccaatgctaaaatattatatctcctcgaacaagcttcaacaaaatcattaagcgcagccgtatcagcacctcctgccaattttgttgctacaattaaggctctttgatagacagaaccaaacctaaacgaaggagaacggtcaatgtatgtaagtacattgcaaattccctttgcaacaagaatacgtttgtctttatccagttctttcgttttattttggagacattcaagccattctctttgcctttctttcggaagttttataatcttttcctgagtatacgcaacaccctcttgttcttttgacccattaattgaaattataaagttattaaccagggacattatttcaagatgatcgttagtaccatatgaaaaatataggtcaaaatactttatgctggaaatcgtcgcaattgtaatatgtttttcttcaccagcttcaacaaaacgttctgattttaattcctgattttccttataccgttgaacatagggaaataactctgccagcagatcttcatattgttcaaacttttgaaacaattcttcgaaaaacctttttccttctgtattaaattcctgcctgcttccattccaaccaactctgctcagaataatcccaaaatctctggaaataaagaattgaggattactttttatcgtttcatataactctggctctaaaaaacgtattgtttcaatcgccagtaaatgcggtttaaatagaatattatcataataaaatgttgttacaaacgcagtgttgaaaaggcgcttcaactgcctcaagctagtaatggaggtactgatcacctgaatgattctagtatactgatttaaccaatcctcagttacaccatagcattgcaagagattttttatacattcatcgcagatggtctccagcctttccttctgaatatcaggaattgcgatttcttgctggacaattttctcaatatactttggattgatttttttctcatcctcaaacaccgccttaatccgtttatcatcatatgacaaaatatataggatattggggagatcaaacactgccccgataagcttaaataaaaataaaatattatctgcctcagcccgatctatattatcaataactaagacaatctttttgtcaataaaacataaatatcgagcaagattctgtttcaattgttttacagtttcataagcagttttttcatcatttagaaaaacatcaaatacgcctaataactttttagaatcagcaactgttttctgcagctttctagctattattcgatttctataggaactatattgaagccctgttttagacaatatctcatcatacattgcagtcagaagtgcttcctgtgtaccaaatatccatggatcgaaatcatctataatgattattttttcttttttttcacgcaattccttctttgcaatatttaaaatagttgttttaccacttccccatgcacccttaattccaatcacatatgcatgttcagcattgcaggcattaacagaattgcaaatcatattaacaagcccctgacgccccagtaaatctttatccggagtagactccgaaaaaaggatcggctgaccttctgcatgaagttctccatttaataattggagcaaatcaaccaatttctttttatcttgttctgcatttcgaaaaaaagttctccaccgccaacgtaaaactaaactcgaaagcagcaataacgcccctaaaagtaacaatttgtaacagtacaaagttttatatatgcactctcccacaccaatcatcaaagacgaaagcatgataaaaaacatacttgcatctgccgaatttttatggggtatttgcagcaacttccaccagttccatttccacaccaagaccgccaatatcaaaaagctgaaaatcaacactatataaactctaaacacaccatactgatttttacaatatgtaaatgctccatatgaatccagcactagaatgcaacatgaaaacacaagcgcccatataatgctcgtactggcagaatctttatctaaccagaaaccattccattcttgaagtttttcttttatccgatcctttatatgcaatatttcattcccacctttcaagctttgttccacctataccatttatcccctagaaaagtaaaagcggcatccagtttaaaacgctggataccgcttttcttctataaggcctatttttagaattttgaacaaaatataaccgatgcaattcccagaatcaacaatacaattccatatataatcgcaaaaccttttcctcttcccttattaattaaaaagagaatcattcccagcatcacggcaatgcagaatgtcagtgataaattcatcgcaatgatatacgatgggctgattgtctgtccatcaaatatacgtgaattaatagatatcagcgaaaaaatagcaactataattcccatcaatgtcaggacatttccataaatacgatgtgacgcactctcaatattctctttgatatcctgcattttctcgaaagctttaatattttttctataggcttcttcgtattttccaaaatgtctatactcatcttcgttctgaaaggatgcattttcctgctctgcatatgttttttctggtcgttcttttaattcttcaaagtatatctgtgctatatgcatgccaactttcaaagttatctcatccgcagagatattctggacgcgaagaaaggcataggttgtatgacccggctggtactgtggaccatccacttttaatcccattcttaacagtgaattcttttctcccactcgcccggtaatattatctggaatacttaatttttccttcgtttttattatcaccgtggcaccaggtatcaattttttctcagtctctgccttgtctgcaaaacttccaagtgtcaaatcatatgatatactattgacattttcttccgtatacgcttctttaatcagctttccttcagcagataattcctttatatttttatcaactaatatcatataactcacctgccttttctttgattctaatattatagcacatccggatcctttttcaaggtgattgacaggtctatttttctttttttctcaacaattaataaagtaaatattatacataataaacaaaagaacacaaaggcatctatatctattccatatattttcatgtcctcttttgtcacttttttaggagcctctataacaaaaaagcggcatccagcacccctgccagacaccgccttcatcttctttaaagcatttttacttcatatactcctgcttcaccttatgatccaccacatgccgcttcgccagctctttcgtcacatcctctacactgatgcctgcgtctgccatcagaaccatcgcatgatagcaaagatctgccagctcgtaaattgtctctgccttgtccttcttcgctgctgcgatgataacctccgtacactcctcgccgacttttttgaggatcttgtccagacctttatcaaacagatacgtcgtgtagcttccttccttcggattcgtcttacgtcccagaatcaggtcgtaaagtccctcataggaaaacggcgtgatctcctcattctggtaaaccggctcaaaaaagcagctctccgcgcccgtatggcacgccggaccttccttgactacctcgacaatcagcgtatccttatcacagtccgcataaatactggaaatatgctgcacattcccgctcgtctcgccctttctccaaagctcctgacggctgcggctgtaaaaacaggtcttccgctcccgaagactgatctccagactctccttattcatccacgccatcatcagaaccttcttgctataatgatcctgcacgatcgccggaatcagacctttcttattaaacttcaattcatccactttaaacgacgcctctacgcctgcaatctcgttgatattctcactcatatttttatcctgccttaccacataaaattttaattacatcgtaactgttcagtatcttcacagtcacgcgcaaaatccattaaaaattgcctacagcaatgggatttttgcctgatagcccatgttttcgtacggtcagcgcaacgccgacgctctcctttatgatccacaggagaacaggcatccaaaaactgtagaaaacatcgcatacgccggtgcttagtgaggtcttttcgaacttagcaccgccctcaaacttctcactcccttcgcaatttaggatgatttagatcaaccgcatctccaccccattctccgccagatactgtttcaattccttaatattcacttctttccgatggaaaatgcttgctgccagtcccgcgtcgatctgcggatactggaagagctctaagaagtcttctttctttcccgcgccgccggatgcaatgatcggcacatcgacgcgctttgcaatctctaaaagcatcggaatatcaaatccctgcttcacgccgtcggtatcgatactgttgactaccagctcgcctgcgccgcgtttgacaccggattctgcccattccagcgcatcgataccggtatcgacccggccgccctgcttaaatacgtgaaattcatttcccacgcgtttcacatccatcgaaagcaccacgcactgatcgccgtagcggtgggccgcctcggtgatgagttccggatttttgatcgcgccgctgttgacactgactttgtccgcgccgcattttaatacccggtcaaaatcatccagcgtgctgatgccgccgccgaccgtcagcgggatgaaagcccgttttgccgcttccgtcaggatgtccgtaaagatttttcttccttctacacttgccgtaatatcataaaataccagctcatccgcgccgctctggttgtaaaattccgccatctcgaccggatccgccacatcctggattccctcgaaattgacgcctttcacgacacgcccgttctttacatccagacacggaataatacgttttgaaatcatgccgttccctcctgatttctttttctgattatttattcgaacgattcgaatgattttttcgccgctttttatacgatgcttctcctaaacggaatatttcagtgcttccttcaaatcaatcgcacccagatacagcgcttttcctaaaattgcaccatacacctcatttttcaaaatatcaatctccttgaggctgctgattccaccggacgccacgatatccagcccttcaatctgcgataattctttataaagctccaggttcgttccctgcatcttcccatcgcgggaaatatcggtgtaaatcaccgttttcactccggtatcgcgcaggcggcggcagaaatctacgccgcgcacttcgctcgtctccagccagccgtgggttgccacaaagccgtccttggcatcgacaccgaccgcaatcttatctccgtatttgcggaccatttcctcgacaaatgggtaatttgtgactgccaccgtgccgagaatcacgcgtccggctccgagtgacaggtatttatcgatggatgcctcgttgcggaggccgccgccgacttccacaaaaagtcccgttgtcttgattaatttctctattgtatcaaaatttgccagcgccgcatctttcgcgccgtccagatcgactacatgcagattttttgcgccctgcgctttaaatcccagcgccacctcttccggtcggtcgctgaatactgtcatctggttataatcgccctgcaccagtcgcacggccttgccgccccgcaaatcaatcgccggaaataactccatgttcttgtcctctccatcaccgtctgttttcctcgcaatccacgattttctgttttccattcacgcgcttattctcgcgctttttgccaagccccaacagaccgttttctttctcaaacctataatcttatatctccgcaaatgccttcagaatccgcagtcccacttctccgctcttctccggatggaactggcagcccatgacatttccattggccgcagacgcggtcaccggaataccgtattctgacgttgccagcaggctttcttcacagtcctttccgtaaaagctgtggacaaagtagacgtaatcgccctctttgctgtacttgaacagcgggtgcttcttccctttttcggtcagatgcaggctgttccagcccatatgcggcacttttaagtttgccggaatgtcttccctcaaatctgccatcacacccggaatcagtcccagaccccgatgcttgccgtattcatagcttttatcaaagagaagctgcattccaaggcagattcccatgatcggcttgcccgccctggcttcttctaagagcggttccgccatgccggatccccgcagcttcgcaatcgcatctccatacgcgccgacgcccggtaaaataatgtgatccgcttttttcagatcttccggatcccggctgactttattttccaatcccagatagttcagagaagaactgagggaaaataaatttccgacgccgtaatcaataatcgttatcattcgcgacctccctattatctaatgtggtaactgttcagtaccttcacagtcacgcgcgaaaatcacagaactccctttgtcgaaggaatctcatttttatatttttcatcgatcgacaccgcctcaccaagtgcccggcccagtcccttaaacatcgcctcgatgatatggtggctgttttctccgtgaaacatcttgaaatgcagcgtcatccggctgttggaggacagtgcagtcataaattcctttacaagctcggtatcaaaatcgcccactttttcggtcgggatgtccacatccatgaccagataggagcgtccgcttaaatcgagggccgtcatcaccagtgtttcatccatcggaagcaggaagcttccatagcgacggattccctttttgtcgcccagcgcctctaaaattgcctgtcccagggcaattccgatgtcctctgtcgtatgatggtaatcgacctgcgtatctccgtcacatttcaatgtgaggtcaaaccgtccatgtctggcaaagagttccagcatatggtttaaaaatccgcagcccgtatcgacctgatattttcccgttccatctaaatcaatcgacaggctgattttcgtctctgcggtattccgttccagagatactttccgttctgctgccatgctaccttcctttcctcgctgcttccaccagtttttccgtctccttcacaaatgtctccatttcctcttccgatccaatggaaatgcggacgtaatccttgatccgctcgctgtcccagcgtcttaccaggattcctgcctcgcgcagtccgtcaaaatagacttttcccggcatatcgccgctcttggcaaaaatgaagttggtcttcgaatccagcacagtaaatccaagtgcccggagcgcctcggtcgttttttcacgcgttttgcagatgcgcccggtacattctttcgtgtagtcccagtcgcgcatcgccgccgcgccagccagaatcgacaggcggttgacgttatacgggttaaaactgtatttgatccggttcatatccgcgataagttccgggtttgcgatcgcaaatccgacgcgcgcgccggctaagctgcgggatttggaaaaggtctggataatcaccagattttcgtatttcggaagcagtgatacacaggattctccgccgaaatccacatatgcctcatccaccatcacgacgcggtccggattggatgccgccacttcctcaatcgcagagagcggcaggttcatccccgtcggggcgttcggattggcaatgatcacgttatttccgcaatttttatatggctcaatatttaaggtaaaatcttcctccagcggaactaccctgaacggaatgccatagagaccgcacagcgccggatagaagccataggtcagatccgcaaactgcagcggtgcttccgaatcgcagaaggcccggaatgcaaatcccaggatctcatcggagccattgcctgcgatgacctgattggttccgactctgtagtgagcggcgatcgcctcgatcagcacgcgctcctccggatccgagtagagacgaaggttcgccagttccggcggcataatctgagccactttttccgccatttttccagcttctgtcgcacctgcatcacatccacagtcagccttttctgccctgcctgctgcccccgcagtgccacaaccagccgcaatttcctcataccccgccagaatcgcctccgcaaccttcgggctcggtggatacgggcattcattggtgttcagcttgataaatttccgtccctgtggctgctcgcccggtgtgtacggaagaagtgattcgcttgctttgctcaaaaaacggctcatatctgcctacgcctcctttttgtcctctgcggctgcttcgtttgctgcctgtttctctttctctgctttttccttcttttcctgttctttcttcttctggtgttcttccaccgcgcccttcagcttttccgccatctcggtgatctgcttgtttttaaactcaaagctgctcttgttggcgatgaaacgggcgctgatcggcaggaactcttccagcactttcaggtgattttcacggatcgtgctgcccgactctacaatatccacgatgacgtccgaaagtcccagaatcggcgccagctcaatgcttccgtttaatttaataatgtcaatatcgcgtcccagcttcgcgtaatgctctttcgcaatattcgtaaatttcgttgccacgcgcaccggtcggtctttgtcctcgacgtaatcctcttttccagccacgcacatccggcattttccaagtcccagatcgagaagctcgtatacatccgggttgctctccatcagaatgtcttttccgacgattccgacgtctgccgcatggtgctcgacgtagattgccacatcactcggctttacgagcaggtagcggacacccgtctgtgggttctcaaacaccagttttctattttcgtcgtaaatactcttgcagtcatatccgaccgacgccagaagctcatacacctgatcgcccagtcttccctttggcagtgctatgtttaacatctcgcgccctcctttccattctcctgaaaggcattttcccggtcctcttccagggaaagacgtccgtcataccggtacagatagcagtaacgcagatcctccggcacagctttctccacccgcacgcgcagtccctgacggcgcagactttcaaccgcctggcacaggcgcactacatcgacatccggctcatagagtaccagcgcatcgacatcgtagcggatgctcttttccggcaggcgctccagctctttcaaatagatggcaaatccgatcgcatcggctttctttcctaattttgccatcataccgtcgtactggccgccggaaagaacctggcgtgccagaccatctaagaatccctggaaaataataccgttataatattcaatgtcattgatcatcgagaaatccagccgcaccttgtcaagctgtccgcccagtcccatcgcctccagaacctcatacaggcgggataaaagtgcaaccgcctccttcattttcggcgtatccgcgatcgcacctgcctctgccagcacccgcccaaactctccgtacagcccggaaaccttcatcaatttctctgtatcgccctccggcagtgccagatccgcgcacaatttttccaatccgctgcggtttttcgtccgaatcagccctaaaatgatatctttctgatcggcattgaccggaagctcttccatcagtcccaccacgaaatccatgttggaaatcttgagcacatagtccgtctcaaaatccgccagactcttgagcgccagcgccagcacctccgcgatcacgcagtcatccacgccgcccatgcactccagtcccatctggctgatctctttgtaagtgtggctttccttgctctcacgatacacactctccagataatagaccttctcgcacgtatttttatctgccttggtgttcttcgcgatgctcagcgtcacgtccggcttgagagccatcaagcgtccgtccagatccgtaaatgtcggcacattttcccccagcaggaaacttttattcgctgcatacaaactatattcctcaaaccgccccatccggtacttgcggtatccatagctctcataaagacctctcaggcgaagcgtcgccgcctccgccctccgaaggctctgaatctctaaattcatgctctatctcctctcaactgccgccgcaaccgccccggctcaacaaaatccgccggacaatcacccgctcgtctatatcctgccgttatagctcccatcacttttgtttatcttgctatcatggtagcgtactaaagtgttttctatatactatcattccttcttaaaaaaagcaactacttttttagaatactcacactttaattaaaagaaaaactcggggcgtgaaaaatgtgcgccccgagtttttccacctcgactctattcttttataaccttctccaaaatcggccccagaatctccgtccaaggcgtatacgcatccttttcctccagatgcgtcagcgccatccagttcagtcctcccggtgtcatttctctggcaaggtcttccagatccccgtcccacgtcgctgccttgcgggacagcgccccagtaaattcggtgatgtatgcccgtgcggatggctcatccagcccgtttctctcacaccactggataatgacggtcagaagcatatagtaagcgctcatcaggcccgtcgtgctcctaaggatcgcgatctgcttcggcgtatcgaccggaaccggcttgccgacgtgactcatcagatcgactacctccgggatatccgggtaaatcaccaccggtccgaagcggttcgccgcgaaggtcagaggcacaacatccgccagaatctctctcggtccaaacatttcctcaatgcgctttaagctcagcgttgcaaccagattgataaacttcttctccggtccgatatgaagcggttttaagatatcttccgccgccttcggaaggagcgccgcaaagacccagtccgaccggtccacaacttcctggttatccgccgcgaccgacacgatctccgggtatttctcatgcagcatctgcgcccgttctttatttctcggcgatacaacgatctgcagattctccattccgctctcgcagaatccagtcacgacggacgtcgtaatgattcccgttccaataaatcccagtttcataaacttctaccctctctttctcctctccgtttacccgaaatttttccagacgattccgagcgaacttttctgatagttactcccccgattttattcacatacacagtatacaaccaaaaacacatattttccagcatcctactcatatctcggcgcacttttccggtttttcatcgtaattcctccctcaaccttcgcaccccactttgatccggcgccttattttatcgttcatatcctccttgccattttctttgaaattgtccacttccgcaaataaagcgattgaaataagccatcttgcccaatctgcacaagcaatctcctcatctttattcaatcttaatacgtcgtaaatctcccttatccgctcttaaaatctccagctatataatatgaccatcacagaaataaggagctgcctttatgccggacgagattattcgacgaaagcgccgtctttcgtcttttcaaattatcacattgggttttgccggggtcattctactcggagcgctactgctgatgctgccgatctccacgactggagagaatgtaactccattcaatgaaacgctgtttactgcgacctctgccgtctgcgtgacagggcttgtagtacaggatacaggctgctactggtcaacctttgggcaggcggttattctggcactgatccaaattggtggtcttggtgtcgtaaccgtagcagcatcgtttgcgctgttgtccgggcgaaagatttctctgatgcagcgcagcaccatgcaggatgcaatttcagcaccaaaggtcggcggaatcgtccgtctgacacgcttcatcctgcgagggacgtttctgattgagctgctgggagcgcttgccgtgctgccggtattctgccgggactacggatggcgtggcatctggatggcggtatttcattccatatccgctttttgcaatgccgggtttgacattcttgggacagaaagcaaccgctatccatctcttaccggctacgcggacagcccgataatcaatatcacgattatgctgctgatcgtgatcggaggtattggatttctgacgtgggatgacatctttgaaaacaagtggcggtttcatcgctaccgaatgcagagcaaggtgattctggtcacgacaggttttttaatttttctgcctgctatgtttttcttcttttcagacttttccgcgcttcccgccggaaaccggctgctggcatccttttttcagtctgtcacgccgaggacagcgggcttcaacacggtaaatctttccacgatgtccggtgcatcacagggcgtaatgatccttttgatgctgatcggcggttctccaggttctacagcaggcggtatgaaaacaacgacactggcggttctgcttgccaatgccactgcaaccttccgccagcgcgatagtgcccgatttttcggacgcagagtcgattgcagcgccgtcaagaccgccgcgaccattctgacaatgtacttgatgctgttctttggcggtgctgtctttatcagcgcatatgagaatcttccgctgtctgcctgcctgtatgaaacggcatcggcggtcgggacggtgggattgacacttggtattacaccgcagctgcacattccatcgcaaatggtgttgatcacgctcatgtatctgggcagagtcggcggtcttacccttatttatgcgacattttccagcaaaaaagtggggaatgcaaagctgccgcaggaaaaaatcacgattggataaggagtcttttcacatgaaaaacattctattgattggcacaggccgcttcggacggcatattgcagtacagctttctcagctggggcatcaggtcatggcggtcgatacaaacgaggaacgaatcaatgatgtgctgccatatgtcaccaatgcacaaattggcgacagtacaaacgcggagtttcttcgctctcttggcatcggaaattttgatgtctgcatcgtaaccatcagcggtaactttcagaactcgctggaaaccacctcgctgctgaaagagctgggggcgaagtgcgtggtgtcgcgtgccgagcgtgatgtgcaggcaaagtttctgcttcgcaacggtgccgaccaggtagtctacccggaaaaacaggtggcaaaatgggcagcgatccgatacactgccgaccatattttcgactacatagagatcgacgagcagcacgccatttttgaagtagaagttccggccgggtggatcggcaaaagtgttggtgaactggatattcgcagaaagtatggcattaacattctcggcatcaaacattcaggaaaaatcgacgcttccattacgccggatacggtgctgtccggggaaataacgattttagcgttgggcgaatacaaagcgctgcaaaagtgcttccgaatctgaatggacggtgagggtatatggaagatagcgttttgatcgctgggacggcgctaatgttcctgttcggctgggttttgatgaaacggctggatcgctttctggacgaaaatcagaagcgcatcaaagaatcgtctgaacaacagcaggctgaaccgtgcgtgcatctggtcggaaatatttctcctgacgaacttgaggaaacattttctcagtttcgcaatagtcatgcccatgtagaaatcgtgatctatgattcagagcaaatttcttttccggacaacaaatccaattgggcgcagtagaaaccttcacattttggtgctataattgctataatattgtttaagaggggtggtgaaaatgtgcagaataaaggaagcgaaatgccaaaagagcatattcttgtgtgcctgtcctcgtctccatccaatgaacgcattgtacgaatggcagggaaaatggcacaggcattttgcgccagtcttaccgcactttacgtgcagacccccggagacgctgatatgaacgcggaagataccgtccgtttgcaggcgaatatgcgtctggggcagcagcttggcgcagaaattgtcacaacgcatggtgaagatgtggcgacacagatcgcggaatatgtgcggctctctgatgtgaccaaaattgtgattggacgaagcggcatacagcggcggcatttctggagcgaatcgacgctgacagaacagctcattacgcttgcaccggaggtagatatttatattattccggatgtggaagcctataagaactgccgcagaaatcagccgcttactatccgcccggcgtttccgaccgcccgggaactacttctgaccatcggaattctggcagttacgacggtcatcggatggatttttctgcggctcagctttgcaaatgccaatatcatcatggtttacctgctgggtgtgcttctgacttccacttttaccagcggatatacctgcggtgtgctgtccgcttttttgagtgtcctcctgttcaattattttatgacggagccccggctgtctttggcagcctatggcagcaaatacccaataacctttgccgtcatgttcgcggctgcacttttgacaagtacacttgcggccaagctcaaagcccacgcacagctatccgcacgggacgcttatcgcacgaagctcctttttgatatgaacagacagctccaaaaagcggaaacgccggaggaggtctatcggatgaccgcgacgcagatacaaaagctcatgcagcgagacgttctgatttacccggcacagggcaacgctctgctggatgggaacatttatccggctgacggaagtagtccatacagcatcccagataccgaccgggaacagaacgtggttcaatgggtctggcaaaaccgcaagcgcgccggagcaacgacgcaaaactttccaaaagcaaaacggctgtatcttgccatccgtaccgggcagcagatttacggtgttgtcgggattccgatggaaaagcaaacgcagcctgacgcatttacatccagcgttctgttctccatcctcggcgagtgctctctggcgctggataacctgcgaaatgccagagaaaaggaagaagctgccgttcttgcaaagaacgaacagcttcgcgccaatcttttgcgttcgatttctcatgatctcaggacaccactgacctcgatttccggcaacgcagatacgctgctgcacagctatgacgtgttggatgagcagacacggaaacagatttttacggacatttatgacgatgcacaatggctgacgggactggttgagaacttgctttccattacgaaaattgtagacggcagcgtaaagctgcacctttctgatcaggtcgtggatgacatcatatcggaagcactcaggcatattgaccgaagagcggcagaacatcacatcgcagtagattgcggagacgtactgttgctggcacggatggacgcaggactcatcatgcaggtgctcatcaatctggtgaataacgcagtcaaatatactccagttggctcgaacatccggatcacggcaatcccgcgagaaaatatggctgaaatatgtgtcagcgataacggtcccggtattccgaatgaactgaaggaacgtgtttttgaaatgttctttactggggggaatccaattggcgacagccgccgaagtcttggacttggacttacgctctgtcaaactattgtccatgcacatcatggtgaaatgacgttgaaagacaattcgccgcatggctgcatcttttcctttacaataccacttagtgaggtgaacttaaatgaataagccgctcatcctcgttgtagaagatgataccccggtgcgaaatttaataacgatgacactaaaaactcacgaatataggtatctttcggcgcaaaacggcgcaagtgccgtgatggaagcgctgtctcacaacccggacattgtactgcttgatctggggctgccggatatggacggcgtggaagtcatccaaaaaatccggtcgtggtcgaatatgccgatcattgtgatcagcgccagaacagaggattccgataaaatcggggcgctggatgctggggcggatgattatctaacgaagcctttttccgtggacgaactgttggcacgactgcgggtgacgcagcggagactgtcgatgatgaaaacagactccgtgcaggattctccgatttttacgaatggtgcgctgaaaatcgactatgcggcaggctgcgcatatcttgacggcacagagctacacctgacacccatcgaatacaagctgctgtgcctgctctccaaaaatgttggtaaggttctgacacacacctatatcacgcagcagatttggggcagcagttgggaaaacgatatcgcttctctgcgggtgttcatggcaaccttgcgcaaaaagctggaacgcggaaaagacgggcagcaatacatacaaacacacatcggaatcggctatcggatgctccgcatcgagtaagtaattcctgaacggaacattcatgactgaatggagtagatttcttgtggtcattccattcagccacaaatgcgctgaccatcgttgaaatagcgaggacttgaaagtcctcgctattagcatacatcgtctcatatattatatctgtttttccatcttcgtttttgctgctttccctactttctagcacattccccatcaagccccaaaaggatttttaatccatgatccagctgtggcagaatgtattccagacactcctgcaccgccttcggactgcccggcaggttgacgatcagcgtgcgtttgcggatcccgcttgccgctcggcttaacatcgtccgctttgtaaattgtaagctgtatgcccgcatcgcctccgggatacccggaaccatccgttccgcgaccgccagcgtcgcctccggcatcacgtcgcgcggagaaaatcccgttccgcccgttgttaagagcagatcggcctttccctcatcgcagatctccttcatcacctcttccaacatcgcctggtcatccggcagcaccttctgccagaccacctcataaccagcctctctcaccatttctgcgattaccggaccactcacgtcctcccgttttcccgcgtacccagagtcactggatgtaataattgctgctctcattggtttcccacctctctttgatctctttcctacgcttcttccagaatctccagattatctccctctttgatcacgccgccgtgcagcaccttcgtaaatacgccctcgcgcggcatgatgcaatcgcccattgcctggaagatcgcgcatccatggtggcattcttttccgatctgtgtcaattccagcacgacgtcgttgcatttaaattttgtcccgatcgggagcgtcttgaaatcgattccttccacgaccagattttcaccaaacgcgccgtcctcgaccttcgccccccgcgcgcggaattcctgaatcctgtcatatgaaagaaggctgacctgacggtgccatttgcccgcatgggcgtcaccctcgattccatagtcctcgataagacagacctgatggacatttttcttctgaacacctttgatttcactggtacacgttgcgattacttttcccatgattgtttccccttttctatccataaattttccgatttcatatttcatatacgatatttcacttgtaacattccgccggctcacactttcaccgcagaaaccataatcataatcctcacaaacaccctgcttatccgcctatctgggacattccccggtgttcccgatccgtaaattccgtctttttctcaaaactatgtcccttcggcttttccgcaagcgcctgtccgatcgcccggcgcaggtcttcatcggtaccgccgccgcgcagaatggtctttaattccaccccattgtcatactggagacaggtttttaagaatccttctgaggtcagccgtatccgattgcattcggaacagaatttatggctgaccgcgctgataaaaccgatccgcccctgaaagccagggactgcgaaataatggcacgggccatttcctgccacgtccccgcacggggtaaagattccaaatgcctcttccagcgcatgcttcaacgcatcttctttcacaaaggcaaactgcgttcccatgccgatcggcatcatttcgatgaaacgcacgtgcacgttatggtttttcgccagttccgccacctctaaaagcttttgctcctcgatcccaagcaccggcacacaatttatcttgatctgcatcctgcctttctggatcgccgtccgaaggccgcgtctgaccgcttcgatctcatcccggcgtgtgagctgccggtacaccgacgcatccagcgtatccaggctgatcgtgactgaatcaacccccgcctccgccagcgcatcgtacatttcttctaataaaacaccgttcgtcgtgatcgtcaggctcttgattcccggaatctgttttaacgctgctgctaactccggcagtctccggcgcaccagcggttcgcctccggtcagcttgattttctgaatgccgttctctgccagaatctggcagaccctctcgatctcaccaaaccgcaggatctcttcatgtgaaatgctgcagacgccttcctccggcatacagtacacacagcgcaggttgcatcggtcggtcacggagatccggacgtagtcgatcgttctgccgtatccgtctatcatcgcacaaattccccgctctttcctcccgattttgcatcgagatgtatctctccgatctccatccgcttgtcgatcgccttgcacatatcataaatggtcagaagcgccacgctgacaccggtcagcgcctccatctcgacgccggtctttccttccagcttcgcagtacaaagtgccttgatcgtcagctctttttcattcacctcaaaatccacgctgcatttcgtgatgagaagtgtgtggcacatcgggatcaggtgtgcggtctgcttcaccgccatgattcccgccacacgcgccacccccagcacatcgcccttggcaaccgttccctccagaaccgccttcatgacagcttcattgacgtgaatcttgccggatgccgtcgccgtccggctggtaatcttcttttccgttacatctaccatgatcgcatttcccttttcatcaaaatgcgttaatttctcttccatctgtatcctccttttcctcttcttccggctccagaaagattttctcaaacgctgcttctgctgccgcctgcactgctgcttccatccggcggaatttttctaaaaacacctttccctccggcgtcagcacagaaaatccgcccttgcttccgcccgtctggcgctctaaaaactggattcccagctgcgcctccgcgatcttgagcattttccagcccttgctgtaggaaatatcccggatctgacaggcaccgagcattgaaccactctcagcaactgcctccagaaaatccgccgtcagcgcgctgaagcattcttcctcgcggctcagcgaaatcgacgcctgaaatgccagctccccgcgcttctgcctgtctttttcgtaggcaagcagcgattcgtagtccattttcgtattggtgtccagtaaaacacccggatcttcaacctcgatctcccggacgccttcgccccacgcatccattgcgccgcggagtccttttccaccccggtacgttaagatatgtccaaacacttccttcgacagcatgaccgggtgtcctttttttccctgacagaccggtactgccatgcttccgggcgcctgcgccatcttctcgattgtgtccgccgtgatcatcggcacgtcggcagggaacaacagcacccgatcggcttttttctggatatggcgcagtcccatgcagattgagccgtacatctgcgatgtctcataccgcttgtttcggatacagaccgcaccacggtgtgaaatatgacgttccagcacatccgcctgatacccggtcacgacgacgatcggcgagatccccgcctgccggatcgtgtcgatctcccgctgtatcatcgtggtctgccccatccggagcatcggctttaattcttccatgtgcgccgaccgccctgccgccaggatgatcgcgcctgttttcccgtctgccatacatatccccttttctatcattctaaccttcttttaaaagcatgatatctcccggtgcgattcccagccggacgcggtcgccgcgctgataccggtttagtgaatcactctgcttatagtctaccttccaccagatcacctcgcgttccggtgcattttctttgtcacccgctgcctctgcgttttccaccggacgcagcaaaatatcccactcaaatggctggcagagtgtgtccccccactcgcacgtaaattcattcgcactgccgcgcgccggataaaactgatgcgcccggatgccgatataggcatgctccgcggcaactgcttcttcggtctgaaacgtgagtccccagtctagcgcctccacctcatattcgccgatccgccggatccggctgaagtttttacagcctgtcaggcgtgccgcagtgacattttccggtttctgaaaaatcgcccgcgtctctcccttcatcgccacctgtccgcggtttaagatgatgctcttctcgcagaaccgatagacctcgtcccggctgtggctgaccatcagcacatcgcccgtgtacccgcggagtacctcgcgcacctggaactgcagttgttccttcagataataatcaagtgccgaaaatggttcatccagcatgatcacatccggctcatagacgagaatgcgcgccagcgccacacgctgctgctgtccgccggaaagctgggacggataccttttttcaagcccttctaatttaaagagacggatcatgcgggcagccgcctcctgtttttcctccttgctgcccgaaagccccgccgcaatgttggtttctacggtcatattcggaaacaatgcataattttggaataaataaccgattttccgcttctgcggcggcaggttgatgcgcttttccgaatcaaagagcaccctgccatttaacacgatccgcccttcgtccggcgtctcaattccggcgatacacttgagcgtcatgctcttgccgcttccggaggcgccgagaatgcccatgacgccgccatcggtgttaagcgatacgtccagcgaaaagccggaaaatctctttttgattgccgcctgcaggctcatcccgcgcctcccttctgtgcatccgcttccctgtccgcaaacagttccaccgaaacctttgcatcctgaccgcccgcttccacactgttatccttctttttatgattgctgcttccgcgcatatcccgccgcgacagcacattcatcagcacgacgaccaggaaggaaatcaccacgatgatccacacatactggtatgccatcgacatttttccagccgccacctgtgaatagatggcaagcggcagtgtctgcgtctttccggcgatattgcccgccagcatcgcggtcgcaccgaactcgcccagtcctctcgcaaaggcaaggatcgcgccgctgaggacgcccggcatcgccgacggcagaatcaccctccagaaaatgcggctctcggaaaatcccagcgtccgagccgcatagataagcgtcacatcgacctgttcaaacgcgccgcgcgctgcccggtacataagcggaaatgagatcgccaccgccgcgatcaccgttgccgcccatgaaaatacaatcttgacgccaaacaattccagaaacagctgtccgagcggtcgttttacaccgaaaatcatcagcaggaagaagcctgctaccgtcggcggcaggaccatcggaagcgtcaggatgccgtccagcaccattttcactttctcagagcgtgccgataccaccagccgcgccatccagactcccagaaaaaacgtaataatgatcgacagcgttgctgttttcatcgatatccatatcggagaccagtccatctttcttccccctttcctatgaaatgtactctcggagtcttctcgactgagataaaaactgccgcagaacacctggttttcagcggaccctgcattctgcggcggattttattccctacgttgttcactgtctgtccttcgccgtcctgttttctgttcacacagtcggctgcatatcccagacagccatcgctcccggcttatttatttgctgtgaagccatactccgcaaagaaggagagcgcatcatcagttcccagataatctacaaacttctgtgctgcatctttctttgtgcttgcgcttacaacgccaaccggatagataaccttcgatacgcttccttccggtgcatatccgataacctttacctggtcaaactggtcgctggtggttgcatcggtcaggtacacgatacctgcatcagcgcttccggctgctacccagcttaaaacctcggttacgttggtaccaaagcttgtcttagcctctacatcatcccacatacccaggttctcaaaggcttccttggagtactgtccaaccggaacactctctggatcgccgagtgcaatcttctctgcctttgtaatatcctcaaaaccggtaattcccagtgtggaatccttcggaacgatcagggcgatcttattttccagaagctctacgacagaatctgcatcaaccagtccctcgtcctccagcgcgttcatctgcttcatcgctgcggagaagaatacgtctgcatctgcgccctcttcaatctgggtctgcagctttcctgaactgtcaaaggtaaagctcagcttgatgtccggattctctttctcaaatgccggctgaatcttgtcttccataacgtactgaaggctggctgctgccgctaccagaatctcctgctggtcgccggctgcctctgcttctgcttcggtctcttctgtctcaactgcctccgtttccggtgctgctgtctcagccggtttgctggatgaacatgcggtcagggatgctgccgccatcgctgctgctattacaagtgcccacgtttttctcatatcttggttcctccctcatttcacgcacatgtttccggcatcctcctcgtttcgattccttacgccatagcaatgtggtttttacccttccgttatttttgaaaaattataatgatatttgctaatcaaatagtagcacgtggcactttttttgtcaatctttacaataattcttatttaatgctcgtcgtcgttatgtgcatcaaaaaataacgcggcttttttctgcattttccctttattcttatgaattttccagtttttctttccaagcccttccgtctattttcgtgaaattgttatgatgatttttcatgtattttatttttatctttttatttttcatttatttgaaattttttatccaaatacgccggtgcttcggtttccttaccggtcacacggttcccgatccgtggcaaagtcttccaccagcacatccataatgccgccgcagaccattccttcatcttccgctgcctcgccggtcagatctacatgaactactttgtacctgctgcttccgatcagagaacgtgcctcgcccagcacggccgcctcgctgcagccgccgccgatgctgccgagaatccgtccgtcccggtagacaatcatcttcgcgcctgccccgcgcggggaggatccctttgattcaatcaccgtgaccactgctttcgactcatccggctcctctgccaggcgtttcagcacatcaaaatccagatcggaacggtttttcacacgtttgtcttcccgatccatgcgctttacctgtatgatctccgccagaatcgagatcgcgatctcctccggtgtcacaccgccgatctttaaaccgatcgggctctttaaacggctcatccgctctggatcgtaaccttcttccagaagctcctgtttcacgataccgacgcggcgtctcgaaccaatcatgccgagatacgccggttcttttccttttccaatcatccgcaggcagtccgcatcgtggcggtgtccgcgcgtaacgatacagatatagtcgctctcctgaatcttgagttctttgatcgcatgcccaaagtcatcacagatcaccttctctgccatcgggaatcgtcccggattcgcgaaggaaaggcggtcgtccaccacagttaccaggaatccgacgcgcgcgccaaattctgccaccggaagagccacatggccgcctccgagaataatcaggcgctctttcgggaaaaatggttccgccacattccaactgcttccggcgcgcccacagaccggctgcccctgtgtcagggcttcttttccaatctccgacgcctctgcgccttctttcagttcacagcgcatatctgctagatttccctcttctcccacaaagcttctctcgagcgccagacacggcgtcccttccagttttttcagaatctccccatacagattcatatcacgcacttcctctcttttatactgcatgagccatccatttctcatttcgcagttgtgccatcgcggttgctgcctcatcgcctctctctggctcgattatttaccaaaaccgcagttcgggaaaatacaggttggacaatttaagcacagaccacctgcgcccattttcgccagatccgcttttgtcactggcacatctgccatcacacgcggcagcaccagatcaaagatggtcctcttcgcatacatcacgcagcccggaagtcccatgatcggctttccgtccttcgtatatgccagcaagaacatcgctcccgggagtaccggcgcgccgtaggagacaacctccgccccggtctgcttgatcgcgctcggtgtcgtatcatccggatcgacgctcatgccaccggtacagacaacaaaatcggcaccctgatccagccattcccggattgcctccgtgattttatccggattgtcccctataatcttctgtcccagaacttccacaccaaattcctgaagcttgtcccggatgaccgggccaaatttatcctcaatccgtccataaaatacttcatttccggtcgtcacaatgcccgctttcttatttttatacggaatcagctttaacagcggctctgaacccgctgcctttttcgcctcctccattttttctttttcaattaccagcgggatcacacgggttccggctaacttatcacccttttttaccggaaaattcgtccggcgggtcgcgatcatcatctccggcaggctgttgacctttaagaggcgttcttcatcaacctgaaacagaccgtccgtctccgcaatcagctcaatcttgccttccttcggatcggttgcacgcatatactcattctggcagatgccgcgcagaatgtccgccgcctcgtcctcatgatattttgtatcgtccttttcccagacataaatatgatcttttccgatggaaagcagcaccgggatgtcctcctcgcgcacgatatgtcccttacggaatacggcgtccttcgtcacgtccggaataatctgcgtcatgtcatggcagagtacctgtccgactgcctcggttgttttcattaatttcatatgattttcctcttttcctttttacagtaatgcctccgcacgctttgccagctgataccgccgttccacgccctccagcgcctccgggttatccttaaatttctcccgttttgccgcaaaccgttcttcgatcgttacacgccgttctccctgtacctgcttgtccgccagatacacgatcaggctttcattcagatatcccagcttttcttccggcagatccatatgatccgcaacgatatccgcgatcccggtatgtcccagaagccgcagccatcccgcccctgtctccggatgttcggggtatgctttagcgatgtcgtgaagaagcgccgccgcgtagattttatatttatcgattggcgggcttttgtatgtcatctccacacacctttccgccctatactttagaactctatctgccaattccacggccagctccgcaaccacccggctatggcgcaccgccgcctccggcgtgtggaaccatgcaagcagacgctcgcactcctctttgtccgggacaggacgttttctctcccagtcacgcaatttctgaaactcttcctgcgtatccgcatcaaacgcgcagcctggatccggcacatccaggaaaatccggcggattcccggctgttcacaggcgcctttaagtcccatcgtcccgtcatgctgcagcagtttttcgatcacatctgcacggatcagaagcggatgccccggtgttttctcatactccgggagatagacatccccatcgccttccgcaaaccggtatttttcatattccagcgtaaatggcgtaaacagtggcacatccaccgggaaaaagaaaatgccatccagcgtctcttttcctgccgttttccgcttttccttataataggaaagccccaggcagacggaatcaaacattttcgtctccgcatacgccggattgtggatgaaatggattcccggtcccgcagccgccgcgcgtatatcttccgcccggcgtccggtaatgatcgtgatttcatgtacgccgcacgcccgcagcgtctgtatctcacgttccaggaccgtctgggcgccgagcttcatgagtggtttgaaatcccccatccgcgaggatcgccccgccgccgagatcaaggcgtcaaatacataatcctttctttcatacacctgtccgtagccaaagggaatctgcagaagttctgtctttttccgcttctcccagccactgatcagtgtccgaaaccaacccgcgtgtccgattaccagaatatcgccccggctcttcatccggagttcattccaggttgtcctggcgcgccctgcacaatctgcaaaactctctccctgcggcggtcggaaatcgtacatatctgcccctcgtgccacatactccgctggaaactgttcccggatttcatcgaaggaatgaccatcccattcccccatgtcaatctccgccagaccatctacgacctcaatcggaatacttctgtcaatcacttcctgcaggatcgcggctgactcccggcagcgctttaacgggctggtataaatcttttcaattctgcgtcccgcaaatgtctcccccagcgcccgaatctgtgtccgcccttcctctgaaagcggcagatccgtccgcccgatgcaatatttccgttcatctggaaattccggcttcccatgccggatcaaataaatcgtccgcattctgtcctttcctagtgctcgtgttcctcttcttccccacactcgcagctgaaatcatggctgtgtccaaatggtcccggtccgccgatgtagtcgcggatcagctccagtttataacggttcatatagctatatgccttctgaaccgtatgcccgcttcccagataacgggtcacgcccgcctttaccagtatctcaaacggttctttctcgatcggtccgcagatgactgcctcacagtcatgttctaccaccttcttcgcaaataccagattgtccggatcctgttttccatagacatggaaaatctggttcttgtccgcgtcaataatcatcaaaaacggactctccttaaaagtcgccggcaccagtccgtcgatctcctctgtctctgatgcaattgctatgttcattttttctccttgttcttgtcaaattttgctgatttttttcaaaatttctcaattatttttaattttatgatactgcaatcaaaactcatcgtcaagtttttcatgatattgaattttgccactcatttttcatttttcctcgatgattagccgcctttttcccgaaccgatatagggggaaatttctttttctatcacagaaacggtcaggcagttcccaaagtattccgttaatgctgctttgacatttttcactctgcttcctaccgtatctgcataacccgctttcttcataacagccaccgtcagatgcttctgcgccgcattgtaagatgcctgaaaatcttccacctcatccagggcaaataaaagctcatctaataggtgcatggaaagcaccttgccgccggacagccggacgctgtcatccagccgtccctcaaccttatcaagtctaggctttaaacatccgcaggcacacggttctgcaatcatccgccccagatcgccggtccgatagcgcacaagcggcattccccgccgccgaagcgttgtcagaaccagctcgccgtattgcccttccggaaccggctgtcccgtctccggatccagaatctcaatcaaaaggtcccggtcccgcatatggtaacccccgcgcgccccacactgtacgccgccgccgtaaccagtttccgtcataccccagtgcgtaaagacccggcagttccaggttctttccaaaaaacgctgcacgctgaccggcacataatcagcacttaagagcactgttttcgggccaagtcccggcgcatgggctgccagcgcatacatctggcttgggacaccgatcaggcagtctgccccctcgccgtcccgcgctgccgcttccatatcgtgaatcagcccgtgaaccttcgtctccacccggatgcgccccaatccttcttttaaaagtcctccaatcgaaaaaaatcccggtccttccatataaaccgtgacccgatcgcctggctttaccatgtactgcatccctgtttcaaagaaatccgccgtctgcatcagatcgtcttcggtaaaaaacaggcgcttcggtgcccctgtactgccggaggttttcagcgtgatgatacgcgcgatctccttggctggaacacataaaaatgtttccggctccgctttcagttcctccggggttgtgaggggaagtgtccggaaatccgcccatgaaaacgaatccggcgcgagccgtacatcggaacctgccatttccccaagctgtccccagacggatgtaaatttcttctgataaaatggacttttctcctttacatacgaaagtgtccgccataacccggacggctgcgccgctgcaataaaataaccgcagcccgcttcttttaaaatcttccgttccgcccccagcgccgcgcagacggattccagatttccatcaaagatctgctgcccgatccactccgccagcgttccagacacatcctgcatatttacaagcgcaaaacccgcatccgccatccggtcacagattgttttagcggactccagccgtcccagcatcccgtctaagaaaagctcttttttccgggcatacatatcgctcatcaaaagccatccctccggctttaacacccggtacgcctcccggagcgccgccgccggttccgcagctttggaacaactgcattccatcagaatgatatctgccgtctgatctggatatggcagtttctccgcacatccagtctctatccagccaggttcatgcacatccggattcttatccaggccggaaatctgccagcccgggcaatgctcagaaagccagcgcatcgtgccgccagctccgcagccgatgtcgatgacgcgaaacggcactgcaggatctatagactccgtatctgccgctcccgcctctggtatctcaattcccgcaaactggaacatctgcctcgtcagcgcaaatccaccggggcggcagagactgcactcatttgtatccattttttgcacctctcctttctgcgcctctattatctgcctctttccatcggagacaagtagtacgcacagaacggaatcttcttcccgtctttatacacatgcaggctgcactggcgcagacgctcgatatcgagattgccggcatcctgaaacgccatggatgtgatcgtgaagccgtggcttttggcacgctttaagaagtcctccatatttgttatgtcaaccgactcttcttcacagcagcagaattctgattcgggctgagttccgccacaaccgcagctttctggttctggctgggttccgccacagcagcagctttctggttctggctgggttccgccacagcagcag

SEQ ID NO: 10992 - DNA, 4798 bp, Unknown
  gut microbiota DNA sequence
gtatgcccttttctgttttttatcaatttacatccagattttctttcctccatccccatcgcctgtacacaaaaattttcgccagaaaatattacatttccgaaaaccaaatccgtcatttttccgattttaaattttttttattttccctctactcaaatagacttttttgtaggataatagaactaattgtgattctttgcggtctgctgtgctgcgttcatttcacacaaagagcatcgacataaacaactgcgaatggcagtctgtgccggacatggactgtgacctggcggcgcaatcatccatacaaacatatgattttcatcccaccagatggaaaccggcatctgcccccaccgcgataccggtattctgtgcgggacgaaactaagaacggaggattagatgaaaatcggttttgacaacaacaaatacctgaaaatgcagtcggaacatatccgtgagcgtatcaaccagttcggtgataagctctacctcgaatttggcggaaaactgttcgatgactaccacgcatcccgggttcttccgggctttgcacctgacagcaagctgcggatgcttctgcagttagcggatcaggcggagatcgtcatcgtcatcagtgctgcggatatcgagaaaaacaaagtacgttccgacctcggcattacttacgacgtagacgtactccgtctgattcagtcctttaccgacaagggactctatgttggaagcgttgtaatcacccactattccgggcagaacactgcggatgtcttcaaacacaagctcgaatccatgggcatcaaggtttaccgccactacaccatcgacggttatccgggcaatgttccgctgatcgtcagcgatgaaggttatggtaaaaatgattacattgaaaccaaacgtccactcgttgttgtcaccgcgccgggaccgggaagcggaaaaatggcaacctgcctttcccagctctaccacgagaacaaacgcggcgtcaaggctggatatgccaaatttgagaccttcccgatctggaatatcccgttaaagcacccggtcaacctggcatacgaggcagcgaccgctgacttaaacgatgtcaacatgatcgatccgttccatctggaggcttatggtgtgacaacggtcaactacaaccgtgacatcgagattttcccggttctgagcgctattttcgagggaatctacggcgagaacccgtacaaatccccgactgatatgggcgtcaatatggcaggaaactgcatcattgacgacgaagcctgctgcgaggcatcccgtcaggaaatcctgcgccgctactatcaggcattaaaccgcgttgtcaaagaggatgtcggcaaagaggaagtttataagatcgaacttctgatgaagcaggcaaaactgaccaccgatatgcgcaaggttgttccggctgccctgaaacgcgccgaagaaaccggtgctccggctgctgccatcgaacttccggacggaaccatcgccaccggaaagacaaccaacctgctcggcgcttccgctgccctgcttctgaatgctgtcaaggtacttggcaatattccgcacgatgagcacctgatctccccgatcgcgatcgagccgatccagaagctgaaagtcgagtacctcggaagccgcaacccgcgtctccacaccgatgaagttctgatcgcgctgtccatgtgcgccgctaccaacaaacacgcacagatcgccctggaacagctcgaaaaactgcgcggctgccaggttcacacctccgtcatgctgtcggaggttgatatcaagaccttcaaacgtctcggcatcgaactgacctccgagccggtatatgagcacaaccgcctgtaccagtaattgatataatcctatataaataacggctgtatctcagcaaaacagaactcatagatttttcaatatatggattcacattgctgaaatacagccgttctatttattgtataaatatttcttttatgctatacatcacttttatttccggtcgaacgagcttccaccgcgcatctcatcctcatttggactctctgctgctacagcttctgccgattccggtgtttcgtccgccggtgcttcatccgccggttttccttccagcttctgctggttctgtgagttttccgcgttcgtttcttccgcagtctttatcggctgaacctcatcgcctgtcttcgcagcctccggcatctcaatccggctctcgccttcctgtttcttttcctccagctccgggattccctttacctcatggaaaatcttcatgaattctttaccggtgatcgtctctttctcaatcaggaacgccgcaatcttatcaagcgcctcgcggttttcactcagcaggcgtttcgcctcctcataagaaaccttcaaaatatgcatgacttccttgtcaatctctgccgccgtcatatcactgcaattcaggacagttctcccgttcaggtactgattttcctggctttccagacccatcagaccgaacttcttggacataccgtactgggttaccatcgcacgcgcgatccgggttgctttttcaatatcatttgacgcacctgtcgttaccgtatcaaaaacgatctcctcagccgcacgtccgcctaaaaatccgaccagcatcgcgcggatttccttctcggtatttaagtacttctcttcctcaggcacctgcatgacatagccaagcgcacccatggtacgcggcacaatcgtgatcttctgtaccggctccgagtccttctgcagggcgctgaccagcgcatgacccacctcatgatacgaaacaatctggcgctcttcctggctcaggatgcggtctttcttctctttgccaaccagaaccagctcaactgcctcaaataaatccttctgggaaacggctttcctgccattcttaacggctgtgatcgccgcctcgttcatcatattggcaagatccgcacctacagcgccagatgtcgccagcgcgatctcctcgaaatcaaccgtctcatccagttttacatccttggaatgtacctttaaaatctgcacacgcccctttaaatccggcttatccacgataattcggcggtcaaaacgtcccggacgaagcagcgccggatccagaatctccgggcggttcgtcgccgccatgactaaaagacccttggaggaatcaaatccatccatctccgaaaggagctggtttaacgtctgctcacgttcatcgttgccgcccagacgggaatcacggcttttaccgatcgcatccacctcatcgatgaaaatgatacacggagccgactgctgcgcctgcttgaacaggtcacgcacacgggatgcgccgacgccgacaaacatttccacaaaatctgaaccggacagagagaaaaacggaaccttcgcctctccagctactgccttggcaagaagtgttttaccggttcctggcggtccgactaacaacgcacccttcggcagtttcgcaccaatcttcgtatattttcccgggttatgcaggaaatcaacaatctccgtcagagactccttcgcctcatcctcgcctgccacatccttgaacgtaacgccggtctctttctgtacatatactttggcattgctcttgccgacacccatgatgccgcctccgccgcccatgcgcttcatcatcatattgaaaatgacgaacatcgctgcaatcggaagcacccactcaagcagaagcatgataatactgcctgtcgcgtccacttctgcctgttcataggtcgtaacaccagcttcatccagcttcttctccaaatccggatcgttgatcggaatcgtatagtactccattcctaccagatttccgtatttgccctggctgccgccatatttcttcgaatcttccttcggcgtgatctgaatctttccattgccaatcacaaccgattctacctcgtgatccttaagcatctgattaaactcgctgtacggcatcttgtgcgtgcggctgctctgccagaggttgtgcatcatcgccacgcagagaagcgtaaacagcatcgtcatgatcagcactgcataattctgaccgcggggattttttccatttttattctggtttcccttattatccatacactttctccattctgtgtcactgtacatccggaatctgccacatcaggttactcaaaagctcctctaaatctgccgcatctgcttctcatccggcttcatgcccgcttttcttccccgtcagcgcacaaatttctgcgtactcttatccattatagtggcagattgcctataaatcaagaagtgaaaatattaaaaacttgtgaactccttataaaatataggtgttttctctgcatatatgaaatgccatcaaaatcatccgctgtgtatctcttcccgatacagttacctcgtcacagttattcgaaaaattgctttttaaaaagtccccatttacatttgtgtgtctgatgtatcaacagtataatgatacatttcacgaattgcgtatgcaattagaaaatcaagtagtccaaattccataaaatgaaattttagggcaaattacagacattggcttggctgtagtatttttaaacaacgtgtgttagactactgttatacaaatcgggatttgtggagagatttcctgaactttccttatttttcaaggcttacagcctcttagatagtgaaatgatatgtattttcccttatttttgcccttatgcggaatccgcaagggaaataagggaaa

SEQ ID NO: 10993 - DNA, 52138 bp, Unknown
  gut microbiota DNA sequence
tgatatataatttagatacaatattatataatatataatattaaacaagaaaaaatattatattttgaattagtgaatcttaggagggataagatggtttttaatacaggagctgcgcttctggatgcgatcgtcctttcagttgtatcaaaatctgcagaaggaacatatgggtataagatcacgcaggatgtccgtcaggcaatcgaaatatcggagtccacgctttatccggtgttgcggcggcttcagaaggatgactgcctggaaacatatgaccgggcgatcgacggcagaaaccgacggtattacaaaataacggaggcgggacggattcagctgaatctttaccggggtgagtggaacgtgtatgcaggaaaaatttcagagatactgaaagagggataaggagaggcagatcatgaaaaaagaagcatttttagagaggctggaagcgctcttgcaggatattccggaagaagaaaaacgggatgcgattgactattaccgcgattatctggaggaagcgggaccggagaaggaagaagaggtacttgcagaatttcagagtccggagcatattgccgaggtaatccggacggagctgcagagtgaatggagtggcggcgaatttacagaccgggggtacaatgacagccgatttgaagaaaagcggacgactttatccagaagcggtggggcagaacagggagaacgagaaaaagaagcaggatttcaggctggaaccgaggatgccccattccgggaatttcgggatgaggaaacgggagaaaatgcggcatccaatgagaatcaaagaagccgtctgagcgagatgctgcattgcttaaaagaaaaaataaccggttccaagattggaatggttgtggcagttctggtagtgcttgcagttcttccatttatcttttcgctggtaacgggaactgtgggaagtgtttttgggctggcagtcgcactggcagcgatattggtggtgctgggactgatgacggtgctggtgtttgttggcggaattatgctgtttgttctgggtacggcgagtctgtttgaacattttgcgatgggactgatgttcatcggattgggtatcgcggcagagggcagctgtctgcttctgatatgcggctgtatcctgttttacggtgtatttctgccgtgggcagtcaagggaatcattcagctttgccgtcaggcggcaggttatctgtcagccagggcgtaggaggataggaaaatgaaaaaatggatgaaaaaaatggcaatcattggcgctgtcctctttgtgggtggaatcggtgtgacatcgatcggggctgccattggaggcgcagctgccggactggattttctgatcgatcaggaaaaaaaatttcaggataaatataattggggtgattctgaggaaatatgggatgatacggagcagctgccggaagagatcgacgagccggatgagatggaagagcagctggacagagaaaaacaatgcgaatagttttccagaaaatggacatactctgagtacacaaggtggaaaggagtattttttatggatgaaaataaggtggattttgagaaaatgaccccggcagagcggctgaaatatgaggtggcggaagaaattgggctggcagacaaggtacggcagtatggctggagaagcctgactgccaaggagagcgggcggattggcggtctgatgacgaagaaaaggcgggagatgaaacaggataagaaaggctgatagatatttgcttgaaaacaccaaaagcccttgaaaataaaggaaaaatccaatattttcaagggctttcaaatctgccgactgcgggacttgaacccgcacggtgttgccaccaatggattttgagtccacctcgtctgccattccgacaagccggctgtctatcgacgctttttatcttaccaaaattggagacagattgcaactgtttttttgtttgttttgaaattaagaagcgaagcattcgcaggggcttgcgtgtttcattaaaataaggtatgattaggttcaaatgggtttatgaacgcgtcatgcgtgaatgataattcatatggaatgacagactggaaaaggaggtggcgtctgtgacctgtcgggaagcggagcgtcttgtgacgccgtatatccaggataaactgagcggggatgagctggaagcgtttctggagcatctggaacattgccgcaactgtcaggaagaattggaaatttattttatggtggatgtcggactgaaacagctggacaccggatcgggtacttttgatatcatgggcgcactgcagaagcggatcgctgagtcatatgcccgtgtgcgccggatgtggcgcttccggaaaatggagtatgcggtcaatacgctgggcgtgatggcggtattggtgacggtgatgctgcaggtcaggatttggctggcaccatagaaaaaagcaacaagtgatagaacaggagacggaaacagatgggcaaattagtgctgatagatggtcatagtatactcaaccgggcattttacggggtgccggagttgacaaattcgaagggactccacaccaatgcagtgtacggatttttaaatatcatgttccgggtgatcgaagatgagggggcagactatctggcagtggcatttgacttgaaagagccgacattccgtcacaaaatgtatgcggcatacaagggaacgagaaaaccgatgccgcaggagctgcatgagcaggttccggtgatgaaggaagtgctgacagcgatgggcgtgccgattcttaccaaggcggggtatgaggcagacgatattctgggaacgatcgcgaaacgctgtgcggcggagggcgtggaggtttctatcgtatcaggagatcgtgacctgctgcagcttgcagatacgcacattaagattcggatgccgcgtacttcgaaaggtacgacggagatacgcgactattacccggaggatgtgaaggcggagtatcaggtgacgccgatcgaatttattgatgtaaaggcgctgatgggcgatacttcggataatattccgggcgtgccatcgatcggtgaaaagacggcaaccagcctgattaccacctacggaagcattgagaatgcgtatgcacacattgatgaggtaaagccgccgcgcgcacagaaagcgcttcgggagcattatgacatggcgcagatgagcaaggatctggcaacgatccgcatcaattgcgagattggtttttcgctggaggaggcgaagctggattcgctttatacgccggaggcatatcagtatatgaagcagctggaatttaagtccattctgcagaaatttggtgaggacgcctttgcgtcatcagaaatggaaaaatctttccgtctggtaaatgattttggcgaggcacaggtgatttttgaccgtgcacagcgcacggaggagatcggcgcgcagctggtgattgaaaaaggagaggttgtggcactggcactctgcctggacgggacatcgatctatgcgatcccggcggttgggttcctgaccggacagtatctggcggaggagctggaacgcctgatggaggtggttccgtctgtgacggttctggatctcaagatccagcttccatttcttaaaaatcacagccgccggatcgtggacggcatccggaatgcagaaggaaaccgtgcggttatggacgcaggcgtggcggcgtatctgttaaatccgctcaaggatacctatggatatgatgacctggcgcgcgattacctggatatgaccgtgccgtcacaggtcgatttgcttggaaaaacggcgctgtcggatgcatttgagacaatgccggagaaagcgttgaattgtgtctgctacatggcatatacggcgtggaaatcgcgggaaatcctgctggggcagcttcgaagacatggaatgatgcatctcttttatgagatagagatgccggttatttacagcctctatcatatggaagaggaaggtattcaggtgcgccgggaggaattgaaagcctacggcgagcgcctccagacgcaggtagagaaactggagcaggagatttacgccgagacgggctgtgaatttaatattaattccccgaagcagctgggtgaggttttatttgaaaaaatgtccctgccgggcggcaaaaagacgaagactggctattcgacggcggcggatgtgctggaaaaactggcgccggagtatccggttgtgcggaaagtattagactatcgccaggtggcgaaactcaaatcgacctatgcggatgggctgggtgcatttatccgggaggacggacgaatccacggaacctttaaccagacgatcacagcgacaggacgtatcagcagtacagagccgaacctgcagaacattccggtgcgtatggagctgggacgcgagatccggaagctgtttgtaccgcgcgagggctgtgtgctggttgacgctgattattcccagattgagctgcgtgtgctggcgcatatgtcgaatgacaagaacctcatccaggcataccgacaggcggaggacatccacgcgatcacggcgtcgcaggtattccatgtgccgcttgaggaagtgacaccgcagcttcgccgcaatgcaaaagcagtcaatttcggtatcgtatatggtatcagcgcgtttgggctgggcgaagatctcggtatttcccgcaaggaagcaaccgagtacattgagcgctactttgaaacctacccggatgtcaaacgttttctcgatggtctggtaaaaacgggcaggaaatacggcgaggtcaagactatgtatgggcgtgtgagaccgattccggagctgaaatccggcaattttatgcagcgttcgttcggtgagcgtgtggcgatgaattccccgattcagggaactgcagccgacattatcaagattgcgatgatccgcgtcgatcaacgcctgcgccgcgaaggactgcgttcccgcattgtcctccaagtgcacgatgaactcctggttgaaacctggaaagaagagctggaacaggtgcagtcgattctggcgacggagatgaaacgtgcggcgcagctgcaggtggagctggaaatcgatatgaagacgggaaattcgtggtttgaaacgaaataatggaaaggtacagataaacatgaagataatcagtattaccggaggcgttggttccggtaagagtgaggtcctgcgtgtgctgcaggaggaatttgacgcggaaattattaaggcagatgaagtggctcaccagctcatggagccgggtaagaaaggctatcagcatgtggtagaggcgttgggtgattcctttttaaataaggacggcagcattgaccgcaaaaagctggcggcgcttattttccagaataaagaggcggtggagacgatgaacgccatcatccacccgatggcgtgggaggagatccgctatgcgatcaaccattccgacaaggagatcatcgttgtggaggcagctctctatgatgacgaccataatgcgatgtttgatgaaatctggtatgtatacacatcggtggaaaaccgcatcaagcgtctgatggcaagccgcggctacagcgaggaaaaatgccggggcatcatggcaaatcaggcatccgaggacgattaccggagttttgcgacgcgtgtgttggacaacaacggcgggattgaggatattcggaagcagatagcgtcatttttaggaaaagaggattaggatacatatgcggatggttagtattgccagcggcagcagcgggaattgtatttatataggaagcgacaacacccacgttctggtggatgcggggatcagcaacaagcgtattgagatggggttaaatgacctggggctgaatgcgcgggaactggatggaattctcatcacgcatgaacattccgaccacatcaaagggctcggcgtgctggcgcgcaaatatggcacacctatttacagcacaaaagagacattagaggaaattcaggattccaagagtcttggcgagattccggaagatctgatgcacccgattacgccggatgttgattttatggtaggagatctggaagtcaaaccgttccggatcgaccatgatgcagcgaatcctgttgcctaccgggttcagaatgaaaaaagatcggtggcggtggcgacggatatggggcattattcccagtacatcattgaccatctgcaggggctggatgcgattttgctggaagccaaccacgatgtcaaaatgctggaggcaggaccgtatccgtattacctgaagcgtcgtatcttaggcgattacggacacctttccaatgaaaatgcggggcggcttttaagttccattctgcatgacaatttgaagcacattttcctggggcatctgagtaaggaaaataattacgaagagctggcatatgagacggtgcgtctggagatcacagagggagatacgccgtataaggcgaatgatttcccgatcacagtggcaaaacgcgatgcagtgtcgcagattgtgacggtgtagaagacgtaaaagtattaaaattggttatacaaagtctgaaaataagccagaagatatatttggggttatggcttggaggcatggacaaacgtgtggggttgacagaaatatcgttactgtacacgcatacgtgtccagtaacggaatatcattttaggtgtaaaagtcagcagccggatggcagttgagtttttatagaaattagtaagtcataaaaacatttccgccataggacggagagcacacaggaggatgaaacctatgagtaagattattattactatcgttggacaggaccgcgtcggtatcgttgcaaaaacgtgtaattatctggctgaccacaacatgaacattcttgacatcacgcagacgatcctgcaggaatatttcaacatgatgatgatcgtggatatttccggttccaagacatcctttgatgatatggcgcatgagctggacaagctgggacaggagatcggcgtaaagattctctgtcagagagaagagatttttaccagtatgcacagaatctaagcaaatattttcagaaaggacgtaaaaccaatgattaacatgcaggaagttctggaaactaataacatgatcgcgcatgaaaaactggatgtgcggacgatcacgatgggtatcagcctcttagactgtgtggacagtgatctggcgaagatgaatgagaagatctacaataagattacaacttatgcgaaagatcttgtatcgaccggcgatgccatcggacgtgaatttggggttccgatcgtcaataaacgtatctcggttactccgatcgcgttggtagggggaagcgcctgcaagaagagcgaggattttgtagagattgcgaaaacacttgataaggcagcgaaagaagtgggcgtcaactttatcggcggctattccgcattggtttccaagggaatgacaccggcggaagagcttctgatccgctcgatcccgcaggcacttgcctgcaccgaccgtgtgtgcagctccatcaatgtcggttctaccaagacaggtcttaacatggatgcggtccgtctgatgggcgagatggttgtggcaaccgcagaggcaacgaaggacaatgattctctcggctgtgcgaagctggttgtattctgcaacgcgccggatgataacccgttcatggcaggtgcattccatggcgtgactgaggcggatgcgatcatcaacgtcggcgtcagcggtccgggagttgtaaagacggctctggaaaaggtacgtggcgagaactttgaggtgctgtgtgagacgatcaagaagacggcgttcaagatcacccgtgttggacagctggtagcacaggaggcatccaaacgtctgggcgttccgtttggcatcattgatctgtcgctggcaccgactccggcagtcggagacagtgtggcggagattctggaagagatcggcttagagcgcagtggtgcaccgggtacaacagcagcgctggcaatgttaaatgatcaggttaagaagggcggcatcatggcgtcctcctatgtgggcggactcagcggtgcgtttattccggtcagcgaggatcagggcatgatcgatgcagtttctgagggtgcgcttacgattgagaagctggaagcaatgacctgtgtctgctctgtaggtcttgatatgattgcgatcccaggcgatacgaaagcgaccacgatcgccggtatcatcgcggacgaggcggcaatcggcatgatcaaccagaagacaacggcagtccgcctgattccggtcatcggaaaaacagtgggcgatacggcagagttcggcggtctgcttggctatgcgccgatcattccggtcaaccgtttctcctgcgacaactttgtcaaacgtaccggacgtatcccggcaccagtacacagctttaagaactaataggagtttcatatggataaatcacaggaactgagagaggtgcttctgcggtatctcgatgccgatctggagcgaatcattttcagcaacccgagaacccgtgaatcctatctgaaattaactgtgcgtcctctgcttctgcggggggcgcttgcttttcagacggaagaatttacggaaaaacaggcatttcagaaaaatcagaacgcagaaaagaccgccgagtacctgctcggagaactggaaaaccgttaccgcaatgcggagatcgcgtcgcttcacgggattgtcaatattctgatcagtaagaaggggacagtgacgatcaaagagaagaaggtgggggttaaaagggcagagaatcggacagtatcggtggcagcaggtgatgtgcagaaagctggaaagcagatgccggcgaagagccatgcagatgtgaaagaaaattcgctcgaaaaatcgggtcagagtcagtcaagtcacgaaaacggaaagatgcagagaagtgctaaaatacagggaaatggtaaactgcagagcaatgcgaaacagcagaaaaatgccggaacaggactgtcggctggcatggatgccgcagcgttttcagaacgtctggcttcgttatcccataaccgtactaaaaaatacgtccttcaggaaggcgtcccagtcccatttctggtagatctcggtgtcatgacggcagaaggcaaagttgtgaaatcccgctacgacaaatttcgccagatcaaccgtttcctggaatttattgaggatgtacttccgaatctcgatccgaaccggacgaatacgatcattgatttcggatgcgggaaatcatatctgacgtttgcgatgtattactatctgcatgtgctgaaaaaatattcgatccgtgtcatcggtctggatctgaaaaaagatgtcattgcgctctgcaaccgcctgagcaagaagtttgaatttgagaacctgaccttcctgcacggcgacatcgccggatatgagggcgtcgatcaggtcgatatggtcgtgacgctgcacgcctgtgatacagcgaccgattatgcgctggcaaaagcggtcaaatggggcgcaaaagtcattctttccgttccaagctgtcagcatgagattaacaagcagattcagaacgatcttctgtcgccggttttacagtacggccttctgaaagagcgtatgtcggcgcttctgaccgacggaatccgtgggcagctcctcgaaatgtccggctaccggacgcagattctcgaattcatcgacatggaacacacaccgaaaaacatcatgatccgtgcgatccgccagggcaagaaagcagacggggcggcattagaggcaatgatgaaggaattgcatgtgaagccgacgttgtatgggttgttggtgggggatgagtagaaaaactgtggcaggtatagttgtatactgaagcttattttttgaatgaacgttcaaaaagtgagttattaggaacaactatacctgtttttgttttgtgtatattcagcagttggaacagttcttagaaaattgtgatattgcagattttggaagcttttagaataaagaattgaaatgatagatcaaatgcgaaatatcagaaattaaatttgatatttatcatataagattgttcacatcgcattttcatgatatgataaaaggaagaaagagtatttgttaaaaaaaatgatagaacaagaggtgacattatggcggttagttataaaaagctgtggaaaatgctaattgataaagatatgaggaagaaagacttacgtgcattgactggatttagtacaacaacaatgtccagattgggcaaggatgagaatgtgagtacggaaattttatcaaaaatatgttctgctttaagttgtgatgttggagacatcatggaatttgttcctgataaaaaagaggaacagtaaggaggtacggtagtatggatcattcttatccttatattgcgtctctgaccagagaaccgttccttttctacgagatgcgttctaccgcaaagctaatggcagaaggaaattcagatgatgcgattgtgaaagaaattgtagagcagaatcttttccagtacccaacggaaaaatctatcacacgcatggcgaaagcctgtatcaaacggcttcatgctctggaagatgattctctggtttctgcgattgcgtcacagccaacagatgtagcaaaacagatttgtctgtatgcgttgatgaagcagagccgactggtctgggaatttatgctgaccgtcattggtgagaagtacagattaagggacacgtcttttggtaagatagatttgaatacattttttatgcgcttgcaggagcagaatgataccgtggcttcctggtgcgatactacaataacaaagttaaaacagatcattgccagagtgcttgttgaaacagaatatctcgacaatctcaaggcagatcatttgaatccagtatggctacatcctgttttggagaatgccatcagaagcaatggcgacacagcgatactgccagcgtttaattgcttttcttaggaggtagccaatgagtgacataaaagaacgcctggacaaagttcgggtattgattcaggaaccggagttcctggaaggcaaaggactcagcaatgaggtgaatatcagaatcttctgctatgaaccggagaatgaaatggttgtccgccattttgtgaatcagttggaaaccgatcagtccttagattgccatttgatcgtttgtaatttatataaaacatttctctctatctgcgatgatatggacatcacagatgcgattcccgatatggaggaagctgacgggagtgtttatcttctggagcagcttaactccgcaatcggtaatggagagtttattgataaaatccagtatgagccacatgaaccgggtgatgtgctgatgctgacaggtgtgggcgaggtgttcccgtttatgagaatccatacgttactggaagccttgcaaccgtatttttcggatgttccgattttggttatgtatccgggtgagtttgatggtcgtcatgtaaaactgttcaatcggttgacaccaaatgattattaccgggcattcaatgtcatagattaagggggataaagccatgatgattcgagatatgtttgcggatgatattaaccgcaaaatcaatggtgtaattaaagtagatcaggctgctgatgatgtaatcgagcaagagttaaatgaatatgtcattaccagagaattgaagaaacactttattacattcttcaattattacggtgatgctttcgaccagccgacagccgatatgggtgtttggatttccggtttctttggaagtggtaaatctcacttcttgaaaatgctttcctaccttttggaaaataaagaggtaaaaggcattcgcagtgtggagcgtttccgtaaaaagtttgaggatgacccggcaacttttatgctgatcgaccgtgccacgaagggtcagacggaaaccattcttttcaacattgatattgaaggcttcagcaataaagacaagactgctgtacttcgtgtttttgcaaagatgttctacaaccatctgggattttacggtgaaaatcttaaagttgccatgatggagcgttatattgaccagcagggtaagacagaggagttccgcagagtttttgaagaaaagaaaggcaagccatggcttgaaatgcgccgtgcctttgctttcaatggaaagttcatcatcccgacactgatggaagttttagatatgagtgaggacgatgccaagacgtggttcaatgataaaaccgcaacagaaatttctattgcacagcttgtggaagatatgaaagcctatgtagatactaaacctgcaaacttccgtctgctgtttatgattgacgaggttggacagtatgttggtacggataccgatatgcttttgaacctccagtctctgaccgaaaaaatcggaagtgagtgcgaaggtaagatttgggtgatctgcactgggcaggaagccattgatgaaatcatcaaagttcgtgcggatgagttctcccgtattcaggctcgtttcaaaacaagactgagtttatcttcttcctctgtggatgaagtcatccagaaacgtattctgaaaaagaaagcggaagcagtcgaagagctggaagatgtttatgagcagaatgattcagtccttcgcaatttgttcagctttagcggttccgttttggatatcaaaggctactccggtccgagggaatttacagagaacttcccgtttgtgccgtatcagttcatcatcatgcagaaggtatttgctgaaatccgcaagcacggaaattccggcaagcacctgtccggtggtgagcgttccatgctgtccggtttccaggaagctgcacagaaaattcaggagaaggacgagtatgcacttgttccattcttccgtttttatgataccgtacatactttcctggacggttctatccgtagagtgattgagcgttgccagaaagctgctgacaatggcgatggaatcgaacagcaggatgtggatgtactgaaacttttgtacttgattcgatatctagatgatattccttccaatctggacaatatcgttatcctcatggcagacgatattcgtgtagataagattatcatgcgtgaagctgtccgtggaagccttgaccgtctgatgagccagaattatatcggcagaactggcgatacctacaatttcctgacggatgaggaacaggacattcagcgtgaaatcagagataccaatgtggataccgtttctattgtggagcgtattgccaagatgatttatggtgatatttttaaaaccagtaaatttcgctatggaaacaatgattttgcatttgacaagatggtagatggtattacggttggtgtggcaacaggcggcatgtgtctacgtttcttgaccgttgctattgatgctattgaaaaaacagattatcgtctgatggcagaatccaagggcaacgaagcaatcgttgttctggctgatacgccttattatgaatctctggaatctgccatgaagattcgcaagtatgtaatgcagagaaatgtaagctcattaccagatacagtacagaaaattattgaaaatcagcagagtgaagctggaaaatatgagctgagtgctatgactgaattgcaaaatgccatcgaaggggcacagttctatgtagatggcgagcatctggaaatcaaagccggaaatgccaagagcaaaattgaccagtctcttgaatatctggttgctcatgtatatagcaagctcgacctgattacagataatgcaggcagtgacgcagatattattgcgattctgacaggtgcagtaacggcacttccgggcatggaaccgaaccgtgatgctgcttctgctatggaagaatatctggaaatgcaggatgcgaaaaagctaccgacttctatggcagatgtgcagagcaaatacagtgcgattccgtatggctggaaagaaatcgacattgctgcggttgcggcacagctgatttattcccagaaagtaaccatcaagtatgcaggcaataccattcagccggatgacccgaaactgccggatatgcttcgtaaaaagagtgagattggcaagacttccatcagcaagcgtaaaaccatttccgctacgatgatgcgtgatgtgaaatcaatgctccgggattatttcgatgttatggatgtaccggacgatgaagatggtctgattcgctttgtgactgagaaattcagtgaacagcgtgattactatgcttctctggatgcccgttatgacggacataaatacccggatcgtgcattgatgcaggaagccattcatctgatggatgatgtactttctcagaagaaagacaatattgccctgattgagcgtgtgctgaaaaaagaggatgctcttttcgataacaaagaagccatgagcaacggcattgaaaacttcttcaagactcaggtaacagtattcgaccaggcggtgcagtttgaaaaatctctgcatgatgacattgaccgtattgcagaaaatgaggaagcacacaaggcactgaatactattcgtctgattacgatggttcagactggaaacgagttcaactatacccggattcgtgaactgaatccgttgatggatacggttcgtaccgcccatgacaagatgctggaagaaaaacgtgccgaggttctggaaacggttcgtcagtgtatggaagcgacccacactgccgcaaacggcgattccaaggcatcccatctgattgaaaaatcagatcggtatttcagccagtgcaaggagaaaatcgcagaattaaagagccttgcccttttggatgccatgttcctgccgatgtgccagtataaggatgataccgtcagcaatattgagtctgttctggctccgcctgcaccgaagccgccagtacagccgacacagccggggaaagaagctgctccggcaaagaaaaaggttgtccgtgcctataaccgacaggttgtattccaggcaaagaccttacagacggatgcggatattgatgattatgtagagaagattcgttctcagctgaaacagttgctgaagcattgcgacgaaatcaagctgaattaaggaggagttatgaaaagtacgatagaacatccaaaagtatttatttcttatgcatggggaactgaagactatagattgaaagttcgttcttttgcaacagacttaatagaaaatggtattgatgttttgttagatcaatggtctttgaaagaaggaaatgatacatatgcatttatggagcagagtgtgacagatccaacaataacaaatgtattaatactactggatccgatatatgagaaaaaagcaaatgaaagacatggtggggtaggaacagaaacacagattatttcaccggaaatttacaacaaagttaaacaggagaaatttttacctgtaatttttgaacggagagaaaacggagaaattccaaaacctcagtatttaaaaacgatgttacattttgatttatctcaggaagaaaagtatgatttagaatatcagagattagtgaaacgcttatacggaatagaaataatagaaaaaccagaattaggtaaaaaaccatcatggctggaagaaagctctattatttcaacaaaaacgcgtacaggatatgaatgtttaaaacaacagaaatcagataatgttaagaaagacgaatatagaaattttctatttgctgtaaaagagaaaatagtaaattttagtaaggatgaactggaaaatggcgtatcagcagatgagtatatagaattatattctaatacaaaattatatcgggatgattttttgcatttattaaaatattcactttatgttccagaggcatataaaattatagcatcgcttatggaagaaatatgtgtggaaataaaggaaaaaggtggatgtgaaggcgaagtcgtaaaaaccttgctgcacgagatattcatttatgtagtggcattttatttgaaaaataaaaattctgatgccgtatcgtatattttgtcaaagacatattttgtaggtagatatggatataatgaagctcagagttttgatgccttttattataataatgagaatttagacagagctgtctcacaaaaagatggtaaaaattattattctgggacagctagttattggattaataatatcaatgtagaagtatgtaacaagaatgaatttgtttttgctgatatcttttgtcataatgcatctatgtttattgaaaattacactagaaagtggttttggtttccaataacatatatatatgataaagcggaatatggaagtagtcttttcaggcaatttgcaatgcgtttgaaatcaaaggagcatttacaagaagctgttaaaataatgggattttcagatacagatgcatttaaaaagaaatatattgaaatcgaaagcaaaattaaagaaggaaagattggagaatatcgatataacagtgcgtttgaatcagcaccagttatatgtcaatatgttaaatcggaagaattagggatcagaaattaatagaaaagtttggtaaaggaaaattagtagaaaataaatggataagaatgcgattaaaaaatttgctgtctgggcaagaacagagctaattgcccgtgtttccctgaaaggtgtggaatacggtatcacagaggacaacattgaggatgccaatgcggacagcgttggcggcaaagtcctcactgccgatgaaaagaaacagcgtcaggctctcattgccgagattaacgataaaggctataagcaggtcatggaggaggttgcctacacttggtttaaccgcttctctgctctgcgatttatggaagtcaacggttatcttccttcccatgtgcgagtattcacggacgaggaaaacaactttaagccgcagattataaccgaagctattcatctggatttggatggactcaatatggaaaaggtctatgagctaaaagatgctgaaaagactgaagaactgtataaatatttgctgatcgtgcagtgcaacgctctgaataagattctgccgggaatgttccagaagattgcggattacaccgagcttcttctgccggataatctgctccgtgaaggtagtgtgattcagcagatgatcgagctgataccagaggaggactggaaggatgctgtccagatcatcggctggctgtatgaagcatataacatcgaaaagaatgaattggtttacaatggcaatatgtcaaaatcaagaatctccaaggatctattgccagcagcaacaacgatttttacaccagattggtctgttcgttatatggtagagaacagccttggtcgtttatggctggagggacacccggatgtgaaagagcagcttctgccgacagaggaagaacagtctgcttatgctgccggaaatcgtgacctggaagatgccaaatggcactactatctggaagaagctgagcaggaaccggaagtgcagacacagcttgccgagattcgtaaggaatacgccgcactgacaccggatcagctgaaagtcattgacccttgctctggctctggtcatattcttgcatatatgtttgatgtgctgataaagatttatgaatcctatggctataccacccgtgaagcagtggcaagcattgtggaaaataatctttatggtctggatatagatgaccgtgcggcacagctggcttactttgcggtaatgatgaaagcccgtcagtatgatcgtcgttttttcagccgcggcattcagccccatgtatatgctattgtggagagtaatcatgtagataaattcgctatgtactatttctgcaatggtgatatgaagctcacagctactatggataccatcatcaaagagctgcatgatgcaaaggaatatggttctattttgaacataacaccgcaggattggtctgcattgtatgatcgttttactgagattacggaagatatcaatatgtcccgtgagacggcactcagagaattactgccgttggtgcaggtggcggaagcattggcacagaagtatgatgtggttgtgacgaatccgccgtatttaggtagttcgagatttagtcctaaattagattcatttgtaaaagagcattatccagatgtaaaaacagatctttcaatggtaatgtttaaacattctttgagagatttatgcaaagataaaggatatgtttcctttattacaacaacttcatggatgtttttatcgagttttgaaaaattacgagagtatgtgattgatgggtatacttttggttcgttggttgattttggaacagaattatttgaaggtaaggtagggcataatccgatcgtggcatgggtgaattgcaagtcaaacattaaagcaaatatgacagcaatacgattagtggactattgttattcaaagcgtgatgaaaaagaagcagagttctttaattctcaaaatctctatgtttcaaatcagaataaatttaaaatgataccaggaagtcctattgcatattggtgggagaatttcaaaattttttcattgccgcaagttcaagatttctatgaatccgcagggagaaataaaacacataacaatgaattatatacaagaaattggtgggaaatatgtgatatggacagatggcagccgtatgcaaatggaggtcctttcagaagatgggaaggaaattcgcttgatgttgttgattggtctattgccgctaaagagttttatgcaagtcatggaggtttatataatcagaagtattgtggaaagagaggtatttgttggaatttaattacatcttacaaaaatggctttagaataaaatataagaattatcattatagctctgccgcacccactattattgcaaaaaaagaaaattttgatttttggatgcttgcatttttgaatgggattgtagcttctacaattttaaacatgtataatcctacacttaatacaactgttggagatattcttagtttaccagtccagttcaagaaaagagaacaaattgaacctattgcagagaaaaacgtagaactttcacaaactgactgggattcttttgaaacctcatgggactttcagcaccatccactgcttcgtaaagtttctaccattgcggaagcctttgaacaatggaaaacggaatgtgatgaccgttttaatcagctgaaaactaatgaggaagaactgaaccgtattttcattgacatttatggcttgcaggacgagctgacaccggaagttgaggataaggatgtcactgtccgcaaggctgaccttggcagagatattcgttctttcatttcctatgcggttggctgtatgtttggtcgctactctctggatgtggacggtcttgcctatgcaggtggcgaatgggatgccagcaagtatgcttcttttgctgcggataaggataacattatcccgatttgcgacgatgaatacttcgaggatgatatggttggtctgtttgtagagttcgtgaaaaccgtttacggtgcagatactctggatgaaaacctgaagtttattgccgacgctctgggtggcaaaggtcagccgaaggatgtgattcggaattacttcctgagcgacttctactccgaccactgcaagatttatcaaaaacgcccgatttactggctgtttgacagtggtaaaaagaatggctttaaggctctgatttatatgcaccgctatcagccggacaccattgcccgtatccgtaccgactatgtgcatgaacagcaggctcgttatcgcaccgccattgccgatttggaacagcgtattgccaatgcttccactggcgagcgtgtgaagctgaataaaaagctgaccaccttacaggcacaggataccgaaatcagaacctacgaggaaaagattcatcaccttgccgaccagatgatttccattgacttggacgatggcgtgaagaagaattatgcaattttccaggatgttttggctaaaataaagtaaggagggatagttatcgaaccgaaacaaaagaaatctgttctcttggggaatggagtaaacatacagtttggtggaaaagcctattcaaatagattcattttgtcaagaattatctttaacgcacagtgcgataagtatgatagtctttttgaaggtacgctgtcgggaagtgaaattgaacagatatttcgaggacttcttcctactgtaaatgctgtgcttgatggaaaatatgataaagtcaatgctgacgatgtagtgaaaagagctgtaatggagttcaaggcacaaaacgcagaacgcagcaaatttgagcattattatgaaattccattagaagattggtttttgttacttcgattattcttcatggataatccagatttgagtgatatgtggaaagcatcaaaacaaggatttgaatggatgattctggatgctatctataatgctggtaaaattcaagaaatttatcaaaaaatgaaaaagcctgtcaaacatttttttaaatcgtttgattcgatatttacattgaattatgataataatattgaaaagttgactaataaaacaatttaccatttgcatggggattattctgtccttgcagattctgaaaatcctgaaacagttcagggatttttgaacaagcaaaacggaaaaattgttatgaatccagattatctgcaatgttattgtaatgcgctacttaattttagtggacagaataaatataaagaagctcaggataaagtgaaaggaattgaggcacttcaaagactaaagcaattacatgattcggatgtagagaaatttgagataatgagagcaggtgtagaatcagaaaaagctcaaattatagatacttatatcaaacatccagaactgaaaattgctacggattatcattttggggaacttgaaaaactttcaggtgaattgcatattatagggctttcaccacagaatgacagtcatatatttgcttgtatagaaaaaagctcattagataaggtggttttctattcgtatggtgagccgccaaagaaattgccattgactaaaccatatgaatttgcagatattaagcagttatggaagtcattggatgcgaatcagccacaatataattgtggtagaaaatatccggattctgatgaagctaaaaagttttttgaactttttaatgcattatcccttgatccgatcacaaaagaagaaattgagaaagaagcaaattcaattcctgaatatatggcgttgccattatgcaaagaagctatgaatttgattaaggttcagacaacaccaaaaagtgaagaagaacttatgaaacagtttagaatggttagtagaatagctttaagagagggaatttatccgtctgctttttatttgattttaatagacaatttttcaaaattatcgtaaaaggagggcttgcatatgataacggatgaaagaatcaaaaattccagtgagctggagtttgctgtattttgtattgaaaatgtagcagcaaagctgggtgtggatgcagagcgtgtctatcaggcatttactgaacagagtgatattttgcacggttacatcgtgccggaatatgaagtgctgcatacccagagtcgggaatatatcgttgatgacctccttgatgtgatgaaagaaaggggtgtggaagtatgattctctatcatggttctttcttagagattgcaaagccggatttggttcattcccgtcccaatgtagatttcgggcgtggcttctatgtcacgccgctgtatgaacaggcggcgaagtggtgcggcaagttcaaacgccgtgggaaagatggcattatctctcggtatgaatacgatgaaagccgggaatctgaactgaaaacgctgaaatttgattcttattccgaagaatggctggatttcattctgaactgccgcagcggaaaagattcgacagattacgaccttgttgtgggcggtgttgccaatgataaggtgttcaataccgtggagctgttttttgacggactgattgataaaacggaagctatcaaccgcctgcgttatgaaaagccgaacctgcaaatatgtttccgcacagagaaagcactatctatgttgcattttgaagggagtgaagcactatgacagcgaacccgattttgcttcagaaaaaatatagccgtgttattgaatgctttgctaaacagcagggactttcgctggatgcggcattggatttcttttatcattcccaggtttatcagctgatccgtgatggtgtttctgatatgcactgcatgagcgatgcgtatctggcagaggaactggaacaggaatatgccgagaaaaccgccggataagtgccgttaaaccgccggatactacaaaaagtgccgggaaagtgccgacaaaatgccggataccaaggaaggaaagaaagtgacttatggatacagacaaagtaatacaagacttaaaccgcaggtttgctgcacttctgccggagttttatcagcgtcgtatcatcttctggtacgatgaagataaggaatttgaggataaactggacgaagtggttctggaaaatgcaaagataattgctctgaccggaaacaatgccttttctgtgaagaaactgctttcagtggacgatctgaccacaaactatctggtttacagtccattagcatataaccgcccggatgataactggcttctggatgtggagctttatagtgaggagttccgggcagacctgatttctatttggatggatgagatgggtcttacatcgaatccggccatgcggaagcaggtcaagaattatcgtgcttatttcaatgcgaaagaccgccgattgaaagtcagcacacagaataaagttccggcaacgcctgcacagctgcacatggctgtcatggcggcaatttgtggattaaaagacgcacagccgaatatgattttccgtagcgtgttccgtgctggattggatttgaagaacaatactgtttatcaggattttgtaaaatatcatgttgacggtgcattttggacaatggttcgccagggctgcggatttgtggaggaagaaccagacctcggacggctggcaattcatttgcttttgaccgccgctacccgtaccatgcggcaggaatatctcgccggactggatagctttatttccatgccgcatcaggcatattgctatgattttatttccgagtggctgcacagcgaggatattcagcagttatatgatgtggcacggtatgttgaagatgaagcccgtctgcatcagcgttttgaaaagctgatggtggacgatctggcaggaaccgagtgtttcccgtgcatcaacgaagtgattttgacaaagctgatgacagagatcagcgaccatatcattgatgtagatatgattacttccaccgttgaaaagcgaagaacctgtgcgtggtatgagccgtttgagaatttctatgacggtatcctgcaagtggcgaatatgcagagctttttcaaggaacactctgtcggattccatactgccgaagcaaaaggcatctggaaagaatatacggaaagctactatcagatggatacctattaccgtttgtttcatctgagtttccaaaagagtctggagacttccaatattctgctggatgatttgtttaagcacgttgttgataaagtggaaggactctatactcactggttcttgggtgaattgggtaataactggtcagatgtgtgtgcggatgaactggcaacctgcggtaaggttttggaagtgccgcagcaggaagaattttaccgttctcgcattaagacttcgaataccaaggtatttgtgattatttcagatgctatgcgatatgaagtggcggcaactatggcagatcaacttcagagagaaacgcagagtaaggtttccatcagtagtatgcagagtatcttcccgtctatcacaaagtttggtatggcagcgttattgccacataaagaactgacagtagaagttcggaacgatattttgacggttctggcagatggtcagtctacggcaagcacttaccgggatgaagtcctgaaatcagaagatccggcgagtgtggctttgaaatacaatgacatcattgccatgaaacgagcagaacgaagtgcgctggtaaagggcatggatgtggtttacatttatcacgatactattgatgaagccagccatacttctgacaccgctgttttttctgcctgtgataaggcaatttcagagttaaaaaaccttgtgcgtattattgtgaatgaatttggcggtacgaatattctgattacggctgaccacggattcctttatacatatagtccgctgactgaggatgacaaggtagataagaccagctttaacggcatggatgtggaatatggcagacgctatgcaatcatgcaaaaaggcgcacaaccgaactatctgttgcctgtgaagttcctgggcggcaaaacggaatttgatggatttgcaccgagggaaagtatccgtatcaagatgaatggcggcggcatgaactttgtccatggcggtatcagcttacaggaaatggttgttccggtgatcgagtaccattatctccgcaatgattctatggaatacaagcgtaataaacagaaatatgataccaagccggtaacagtcaatttgctgtctgcaaaccgtaaaattagcaatatgattttctcattgaacttttatcagaaggattcagtcagtgcaaaccgtgaagcggctacctatcatgtttactttacggacgaaaatggcaagcagatcagtgatgttcagaagattattgcagataaaaccagcgacaacggtgcagagagaactttccgttgccagtttaatctgaagtctctgaaatacagcaatactgctacttactatctggtaattgcagatgaacagagcttgcagatgccgcagcgtgagccgttccagattgacatcgcctttgcggtggatgagttcgatttctttagttaataccgcaggaggatagaaagatgggcaatttacagagggtgaaagcacccgtgaagaaataaagaataagctccgtcagaactttgacggtaagattgttcggaaagacctgacaaagaaaatcaaggaaggggaaaatgtcccggtgtatgtccttgagttcctgctgggtcagtattgcagctcagatgatgaaacggtcattgaaaaaggcgtacagaacgtgaagcgtattcttgctgataattttgtacgcccggatgaatcgcagaagattctgtctcagctgcgaaagaaaggcagtcacactatcattgatatggtgactgtccgactggatatgaaaaaggactgcttttttgcggagttttccaatttgggcgttggcaatgtaccgattgccgacgaatacccggagaaatttgaccgcctgctctgcggaggtatctggtgtatcgttcagctggattacgaggttgagggcgacaataactttggcattgaggatattgacggaaatccgcttcgttccaaacacaaaaagatatttctccgatcagtatccgtaagctgacaccgatccagatgccgcacattgatattgatgaactgaagcagggacgaaaggcttttacgaaagatgaatggctggatattcttcttcgttctatcggcatggagccagatgaatttacatatcgtgagaaatggctgctcctaacccgtatgattccattagttgaaaacaactttaatctttgtgagctgggaccgagaagtaccggtaaatctcatctttacaaagaaatttcaccgaacagtattttgatttccggtgggcagacgacggttgcaaacctgttttacaatatgggacgcaaaacggtcggactggtcggcttatgggactgtgtagcttttgatgaagtggcaggtatcaagtttaaagataaagatggcattcagattatgaaggattacatggcatccggctcttttgcccgtggcaaagaagaaaagtctgctattgcgtcgatggtatttgtgggaaatatcaatcagagtgtggatgtgctgttgaaaacgtccagcctgtttgcacctttcccgcaggaaatgggaacagatacagcatttcttgatcgtatgcactgctatcttctaggatgggagataccgaagttcagaccggaacattttaccgatgattacggttttatcagtgattatctggctgaatttatccgggaacttcgcaaagaacagtatggtgatgcacttgaccactacttccgcctgggaagaaatctgaatcagcgtgatacgattgcagtccgccgtatggtagacggttatctgaagcttatgtacccgaatggtgagtttaccaaagaggaactggaagaagtcattcagattgcattggaaatgcgccgccgtgtaaaagaacagctgaaaaagctgggcggcatggagttttacgatgtgaacttctcctatattgacctggaggatatgtcagaacattatgtttccgtaccggaacagggtggcggtaaactgataccggatggaatgtgcaatccgggacaggtttataccgtatccagaggaaaaagcggcatgattggcgtgttccgtctggaaagtcagatgcttccgggcaatggcaagattgaacggacaggcttaggcagtgattccaagtgcaaggaagctgtgaacacggcgttcaattatctgaaagccaacggcaaccggatcagcggttctatcagcacttcgaccaaggattacatcatcaattatcaggatttgcagggtatcggtatgacagacaaattggcacttccaacattgattgcactttgttcgattgcccttggaaagcctgttgtcagcaacttggcagtgttgggagatataacaattagtggcacaatgataaaggtggatgaacttgccaatacgcttcaagtgtgcctggacagtggtgcaaagaaggtactgattccgagtacctcatttgttgatttcgcaagtgttccggctgatctgatgagcgcatttcagctgattccgtatcagagtgcggaggatgcggtgtttaaggcgttgggggtagaatgattgaagaaagacgtaattgtacttatagattcacgaaaagaaatagaaaagatgttccatccgtttgatggaggtatgggaacatcttttgaacggatcggtgatgtgcctaaatttcagaattggctatgaaaagttaaagttataacttataaaacctcttcgcaaattccaaaaacaccccgccttcctctgccatatacttaaccggcgaatacaccagatagagtttccggagaaaggcagcttccccaagcggaaagagaagcagtttcccctgccgtgcatctgcctgcacagttgcttttgagagaatggagatgcccattcccagcatgatacattgcttgagggcggcggcatcgtccatcacggcaataacatttaaatcatcgagtgaaagccctttattttttaggaaatgaagggtttcctgctttgtgccggaattatcttcccggagcagaaacggttcttttaagagggtatccagcggtgatggcatagtctggtaagcctgataatgtggcgtggcgggggcggcgatcacaagctcatcggaggcaaaggggagaaattcgcaggaggtgtccgaggtagtagttccgaccagaccgatgtcgcagatgccgtcatccaccttatgtacaacgtccaggctgtctgagcaggaggcatagacacggatatcagaatgaactgcgtgataagcgcttaaaagttccggcagaaaataaagggacggaacggaggatgcgccgatccgaagctgcggtttcgtctcgttggcgagttccacgattgctttctgctgcagggtcagaatctccgtggcataggaatataattttgtcccggcaggagtcagggagagcgatttggtggtgcgctttaaaagctgggtgtgaaattcctcctccagactgcggatgtgggcgctgacagtcggctgtgagatgtacagcttctgggcggcaagcgaaaaactctgatatttgacggtgtacacgaaagcttctaattggcggatgtccatatatttaaaatcctttctatagataaaatcaatttttaatgattctgtgataaaatccaaaattaaaatgaatagtagacaggtgaaaacaatctctaaagaagagtgtagctttatttattgaaaatatcaataagtttatagcaaatatcaatataaacgattttaccataaaaatacaggatgttatacttgtctgcggaaagtatggatagatccatgaaatgtacgcgcttgaaatttttcttgtttgattttgtgagatgatttttttgccagatgcactcaaatttctgatatgtattgatgaaatgcgagtgtggtgcgtgaaatcacccacaatgacgagtgtgagaaaaactttaagagtacatgaaataaaaaaggaggcaggtatgaaagtatttgacaagacatggaagctggcagtggcaggcgcgcttgtgggtgtgctggcagcattgctggcgtattttggaaatccggccaatatggcgatctgtattgcgtgcttcgtacgtgatacggcgggcgcgctgaaacttcactcagcagcaccggttcagtatttccgtccggagattgtaggatttgcagtgggagcatttgcgatctcactggcgacgaatgagtataaggcgacggcaggctcttcaccgatgatccgctttgttctgggtgcgatcatggtaatcggcgcgctggtattcttagggtgtccgctgcgtatggttctgcgtatggcagccggtgacctgaatgcgtatgtagcgctggttggatttgcaggcggtattgcaactggttcgttcttcctgaaaaagggattttcgctaggcagagcgtatgagacgcagaaatcaagcggatatgtgcttccggtgctccttctggcgctttttatcattggagcagtaacaggcgtatacgcagccagcacggaaggaccgggaagcaagcacgcaccggttctgatttccctagttgcggctctcctgattggtgcattggcacagaagagccgtatgtgttttgcaggtagcatccgtgatgtgattctgatgaaaaactttgatctgctcagcattatcggcgcactgtttgcagtcatgctgatttttaaccttgcaactggcaatttccatttgagcttttccggtcagccgatcgcgcactcccagcatctctggaatattctgggtatgtatgccgttggatttgcagccgttctggctggcggatgcccgctgcgtcagatcattctggcaggacagggctcctcggacagtgcggtaacctttctgggaatgctgtttggggcggcacttgcacacaattttaacctggttggtgcggcagcaaaagcggtaaccgagacagaggcagccgttttgggtggtccggcgatgccgggcaaaattgccgtaattgtatgtattgccctgttattcgtgattgcagcggcaaatatgaaacgtagaaagaaataaagaaaagaggaaacggaaaatgtcagattttgttgaggtagatgtgcggggactctcctgtccggaaccggttttgatggtgatggatgcgatggatgaacatccgggaaaacagatccgtgtgcttggcgatgaggcacacacccggacgaatattgagcgcacgttggagtatcatggaaaagaggggcacaccgaggtgctggaaaacggctgtttcaccattacctttgaagcgtgatgctgctctggaatattaaataggtggaaatgatgaggcagaaacgggaatatcggatttttacctttcacacgacggctgcggcgatggagatggaggcattctgccgggaacagggaatcagagggcgcctggtgcctgtcccacgcgaactctcagcaggctgtggaattgcctggcggatggaaccggcggaatatgaacggtttcagggagtgattgcggagagccaaattgagatcgagcagagctgtgtggttatgaattaaataaaatgttatgttagagcaggcatcatagaaaaagtatataggaaaaagcggcggtatcggcagtggcgagacattcaaaaaagaatggagcgctgactgtgtgatactgctgctttttggcgtgtaaatcgaggtcagaatgaggtcattgaggtcagaaatcaaatcatgacctcgatgacctcatttgtgacctcgatgatcccaatattttgaaatattattcttccgccttcgcctcctccagcagccgtgcaatctccccccgcaccagcgagaatgcaacctcattccgtccgctgtttgtaacgacatctgcataggcgcggggcggttcaacaaagagagcatgcatcggtttgacggtagtcagatactggtcgatgatgttttcgatatcgcgtccgcgctctttcgtgtcacgtaagattcggcggaggatgcgctcgtcggcgtcggcatcgacgaaaatgcggatgtcgagcagattgcggagtgcttcgtcatagagaacgagaatgccctccaacaggataaccgggcgcggctcgatgtgaatggtcgcttcggcgcggttgtggttggcgtagttgtaggttggacagtcgattgcctcccagtttttcagtttgttgagatgctcaagaagcagctccgtctcaaatgcatccgggtggtcgtagttcagctttttgcgctgttcaaatggcatatcgtcgtgggcgcggtagtagttgtcgtggtaaagcacggtcacctgattaccaaatgcgtctttcagacggtttgtaaaagtggattttcctgaaccagttcctccggcaattccgatgataataggtgattttctattcactgtggtttcctccatttgtaagttttatctcagtcgagaagagtcccacctctttaggtggcgagtaatagcaaatttgtctcagtgggaggtgggtctccgactgagataaacgctccgcggggatgcgcagtgattctgtatggaatatgtcagcttcgctgaccagaatcacgcgccaagtctcacggacgttcgacttgaaaactggttcatttttatacaaaaaccagtccttctgtatattcattttgaaatacgccgctgcgcttcatccgcaccgtctggtataaatgcgaggcgtacacctcctgctccagcagcgcgagcgccgacggggagaggttctgggcggcatctgccattttagtgatgagggggatgctgctttttttatgcagacaggagagcagagggctgctctgcctgcgaaaaccgagaatccgtgcatagagtgcatagccctcgtccttccaccgggaaatatcttcctcgcgcataccgagtaccagatgcagaagcgcacggctgacacgcgtgtaggtaagctggcgcgtctttaatgcctgaatccgttcttcaaaagagagaggaaagtaaggtggttttgcaaggcgggcggcaagctccggggagagatctgcgatgcgggatatagcctgcgtattggtatcaacagacagagtgctggaaggcataacgacgtttgtggcagcaatggaacctttcgctgaagatttctgcatctgtaaaacagccatatttaaaagttctgaaaagtcatccgtaaaaacgggaagtgcacctgcgtatgcgggatgcgtcacggctggcagatgaggtattaaaatattaaataaaatctcactttttgaatcagaacccggttcctgttttagtgaagctggactatctgctgacagattttcatagctcttccgaactatcccgcgaattgccgaagcggatggaaactttgcttcagacagtgcatcctcatgatatccgcttccctcccgcgaaatcgtataaaattccatcgggctgtgcagatcttccgccgcccgcagatattcaatcccaaggatattattaggggagtttaaaatggaagaccatatatgagagttcgacacatctgtatttgcgtgaaaatcttctacattttcaactcttgtcccgcccgcctgtgtttctcccagcgccttcgcccgtgcctgcggataagtcagtcccgctttcaaccctttccgcagccgttcctgaaattccgccgattcatgattcagcgcataagcagcctgcttaaggatttcaatctgcccgcattcactgccgaacacaacggcatccacaccgatcgacgacagaagcgcaaccccataggcggcaaattcatgcgccgaggcggtggagaaggcggccggtatctcaagtaccaggtcagcaccggcgagaagggcggttttcgtgcggaggtatttatcaaagatggcgggttcgccgcgctggacgaagctgccgctcatcaggacgacacagtagtccgcgccggtcagttcccttgcctgctgcatatgatacagatgtccggcatggaacgggttatattcggtaattaaaccaacgattttcataaatttcaatcctgttttttgcatttttgcgaggaattttgtagcagccttttataataaaagtaagaataaaagactgttgctgttgcggcagaaaaatctgtaaaaaatagcagccattttctgcttcatttacattatatagtggaagtgcgggagcgtaaaggaaaaattatagtgcatcttgttaaaaatttaattaatcaaaaatttgaaaatcgctcttgtatacaataaacaactggtatataatgttagcagtaatagacacacacttatgaaaggggttttataaccatggcatttattgacaagattaaggaaagagcaaaagcagacaagaaaaccatcgttcttccagagtcaatggacaagagaacatacgaggcagctgagaaaattctgaaagagggtatcgcaaatctgatcatcatcggtactccggaagagattgagaaaaacggcaaaggcttcgacatttccggtgccaccatcgttgacccgtacaatgatccgaataagcagaaatacatcgacaagttcgttgaattaagaggcaaaaaaggtgttactccggaagtcgcaaaagagcagatggagaaagactatatgtactatgcttgcctgatgtgcaagtgcggcgatgctgacggcgctgtatctggtgcatgccattctaccggcaacaccattcgtccggctctgcagcttctgaagaccaaaccgggtatcagctctgtatctggcttcttcctgatggaagttccggattgcgagttcggtgagaacggtctgttcgtattcgctgactgtgcagtaaacactgacttcgattccaacaagctggctgagatcgctggtctgtccgcagagagcttcaagatgctggttggcgcagagccgaaggtagctatgctgtcctattcttctatgggttccgctaaacatgatgatgttaccaaggtagcagatgcagttaagattgctcatgagaagttcccggaactgaaactggatggcgagcttcagcttgatgcagcactggttccgtctgtaggcgaggctaaggcaccgggcagcaccgtagctggacatgctaacaccttagtattcccgtccctggaagcaggcaacattggttacaaactggttcagagacttgcaaaagctggcgcttatggtccggttcttcagggtctgtccatgccggtaaacgatctgtccagaggatgcttcgcagacgatatcgtaggcgtagtagctatcacagctgtacaggctcagcaggcataattaataccaattggaatcaaatggatggagaactggcaccgcgtcagagaatcttaaatccgttaattaagaattaaaagtgataattacagttcagcccggtattcatacataatcctgcagttcacaacagggcagtgcagacgtttttgcagatgcttccgtgtgaaccgcatatagagagaatacctgcggctgaattgtgatgttataaagaaaggaatctattaccatgaatattttagttattaactgcggaagttcttccttaaagtatcagttaatcaactctgagacagagggcgttctggctaagggtctttgcgagagaatcggcatcgatggtatgctgacttaccagccggagggcggcgaaaaagagaaatctgagatcgctatgccgacccatacagaggctatcaacgcagttctggcagccctgactaacgagaagagcggcgttatcaagagcctgtctgaggtaggtgcagttggacatcgtgtcgtacacggcggcgagaaatttacttcttcctgcttaatcaacgacgagtctatgaaagcgatcgaagagtgcaacgatctggcaccgcttcacaacccggcaaacctgatcggtatccgtgcctgccaggaacttatgccaggcgtaccgatggtagctgtatttgataccgcttttcatcagaccatgccggatgttgcttacacctacggtattccgtatgaatactatgagaaatacaaagttagacgttacggcttccatggtacttcccacagctacgtatctaagagaaccgctgagatcgttggaaaaccgtatgatcagatgaagatcatcgtttgccacctgggtaatggcgccagcatctccgctgtaaactgcggcaaatctgtagacaccagcatgggtctgactccactggaaggtctggttatgggtacacgttctggtgacctcgatccggctatcatcgatttcgtaggtaaaaaagaaggtctgtccctggatgagatgaacgaagtcctgaataagaaatccggtatgctcggtatctctggcgtatccagcgatggtcgtgatctggaagcagcagctgagactggcaacaagagagcacagctggccctggacgtattcgattaccgcgtaatcaaatatatcggtgcatacgcagcagctatgaacggtgtagatgcaatcgcatttaccgctggtatcggcgagaacaacatcaagatgagaaaagatgtttgcagcagcctgacctacttaggcgttaaactggatgaggagaagaacaacgtaagaggtgaggagagaatcatctctgctgacgactccaaggttcaggttctcctggttccgaccaacgaagagctggctatcgcccgcgagactcttgcactggtaaaataattaaatatgaattaaaatttgcaaaaatatgtaaaattaatcattgacaaacgcgctcgacctttgtataatatcaaagtgcgtattaggagattagtatgctgattcatttatcggaactttttaactgcgagggtagaaagaaagtctatacagtcgagactgcgctggactctgttgattttgacggagagacgtttcagattgagaaggctgagccttttgaactggaactgacggctaagacacggcataagtatacgatgagtggtcatgcgacgctgacggtgggaggtcactgtgcgcgttgtctggagccagtatctttcgactgcgaactggattttggacgagagtttgaggtgcaggacggtcaggaggagagtttagatgatgaaccctttatgaaggggtacaatctggatgtagaccagttggtttgcaacgaactgctactgagcttgcctatgaaagtcctgtgcagagaagactgcaaggggatttgcaatagatgtggtacaaatcttaatcttcggacttgtacctgtgacactaggtcgctcgatccaaggatgtcggttatccaggagatattcaatgaatttaaggaggtgtaaccatgtctatctgtcctaagaacaaatcttccaaagcaagaagagacagccgcagagctaactggaaaatgagtgctccgaacttagtaaagtgcagcaagtgcggtgctctgatgatgcctcacagagtgtgcaaagcttgcggaagctacaacaagaaagaaatcgttaaagtagaagactaagctacaagtgttgaaaaataaggggttaagcgatttttgcttaacccatttttcgcattttagcccatttttagcccatttcaagagggtgtttaacaggtgtttttgggtagattttagcaactataacttatggcttataaaatgtggtcaaaaacaggagagattattaatttgcaataatctctccattttttatatttcgtgaatattatcaaatctgtgatttttattagtaaaaatgtaaaaaatggggatagaagagcattaagctcaactatccctataagaatgttatttaacaaagtattttatgtactgttatttgttatttaacttttactagcaaaagtcatatatgtgcctcctgtaaatgaaaatatatttctaattacaggggccgctttcgctacttctgaaaaagatcaatagcgagagcggtcgcatattttgacatttttgtcaagtatcaatttaaaaatatgttagactcctataggggatttaacgctaaagcttaacttactgacattggttcatgggtaggcacttttggaaccgaaagtgccgtaagaaaacgtggtggcagcaggaatttgccgtatttaaatgcgaagccacggcaaattcagttactggacacgtatgtgtgtacagtaactgagatactatgtagatggcggtgttgtatgcaaaaaggtgtacaataccgctattttttgttaatatagagaagaaggaaaaaagagggataatgtttataaaaatcacgttaggaggttttacatatgaaaaagggaaaatatttacttttgaccgtcacagccgccgcgcttctggcggcgatcccatttcaggcatttgcgtcgagggatacggagaaccgcagcccggttggctcgatcggcttaaatgtttcgtcctcgatccatgtcggtgatgagagttcagatgtggatgtttcgctcgatttcggtgactgcgatatttccaatgttgatgtgatcaatgagccgtccggcaaatgggtggacaaggataagccaaagctggaggttactctggaggcggacgatgattattattttaaatccggttatgcgaaaaagaatgtaaccctgagcggtgacagtgcgacggttacttctatcaagcgcaagggcgatgaggaactccgggtcgtgatcaccctgaaagctttaaaaggaacctccagtgattacagcctggatgttgatgaggcagagtgggatcagatggatggcgttgcagagtggaacggcagtgaggatgcgaaatactatgagctgcgcgtttaccgggatgagaaatttttaagtacggtaaaaccgggaaaagaaacgaaatacaatcttggacgttatcttacgcaggcgggaacctacacgtttgatgtgcgcgcggtttacagcgattcacggcacggcgaatggcagacatcggattccttcacaatcacggcggagcaggcgcaggaaattcagaagacgcttgtcttcaaggaagcaggcagcggtccggcagccggtgcgtgggaacaggatgcgcttggctataaataccgcaattccgatggaagctatgtgaccaataactggcagcagatcggcggtgtgtggtatttcttcgatgaaaatgcatattgcaagacgaatacctgggtgttctggaatggaaaatggtattatctggatgtaaacggcgcgatgttagttaatacgacgacgccggacggcaagcaggtcggggaagatggggcgcttctgtaaaatttttaagaaacaattttgatgaaaatccgtcagggaagatggagacagaattgtaaaatagatgtgagaagagacaggttgcacggaatatgcggtctgtctcttttacatttaaaaacagagaaaaataaagagaatatttgcaaacagaacgatggtagaatgaaaacacatacatgaaaagagtgctgaaggacaagctggcagttatttctgatggaataaaaaaattaacaaaaagtatacttgcatattgtgaaataagtagtaagatagaggtggtatctcatgactgcctattttttaacaatctaggggaaggggcggtctgagaagagactgcaaggggttctaagccagtatggaggatggcagaaaaaggactgacaaaggaggggcacagagatggcagcacaaattttggctgtgattatttttattgtaatgtttggacttatcatctgggatcacattgagaggcatatcgtatcgctcggatgcgggcttctgacgctggtgctggtgtttggcgtctgtatgcacagtgaggcggcagcggcggagacactgagcctgcagagcttcatggttccgaacttctggtttcagaccgaggcggcggcagagtcctcgagcggcatcaactgggcgacgattctttttattgccggtatgatgctgatggtggagggcatggagcgcgcgggatttttccggtggctgtgcctgacaatcgccaaggcggtacattataagacgatcccgatttttatttcatttatgctgatgtcggcgtttctggcgatgtttatcgacagtattaccgttattctttttttggcagcggtcacggtagagctggcgcatcttctgcattttgatccgattccgatgatcatttcagagatcttctgttcgaatctgggcggctctgcgacgatgtgcggcgatccgccgaatatcatcatcggaacctcgctcggatattcatttaaagattttattttaaatacaggtatgatggcgggtgtttcgctgatttttatcgtgctgtttttctatttttcctttaggaaagaattaaaggcgagtgaaaagcatgacgaagcggttacatatccatccccacaggaggcgatcgcggatcggaaacggtttgcggtcagcgtggtgatctttgcggcggcgatcgtgatgctggtgacgcatgcacagacgggactgacagttgcgacgattggcgtatttatcggtgctttttcgctgctggcatccggcggtgaggcgctcagcatgattaagaagcttgactataagacgctgctattcttcattggtctttttgtcgtggtcggcggcatggagcagacgggcgtcctaaattctttagcagggatcattgacgcagtcagtggaaataatgtaaaatgggtagtagcgattgtgctgtggctgtcggcgcttgcgagtgcatttgtggacaatatcccatttgcggcgacgatgatcccggttatccggagtctggcgcaggcaggtggcatggatctctcggttctggcgtgggcgctttcgatgggtacggatattggcggctgcggaactccgatcggagcctcggcaaacgtagttggtatctcagtggcagcgaaaaacggacattttatcggctgggggaaatattgccggtatgcagctccggcgacggtgctggtaatcctgatttccatggtttgtatatatgtgagatacttttaagggggcttttatatggaggagaggaaaaacagagtgatcatctcggtcagcagacagtttggcagcggtggacacaagatagcggaagcgctggcagagcattttgaacttccgatttatgatcataggatgctggacagtattgccaaggaaaagggtgtggatcctcgtgtgctggaaaaatacgacgagaagccgctaaaccgttttctggcgcgcaatgtcagcggattttcaagctctctggagaacaatctggcgcagatgcagttcagttacctgaaagacaaggccgattcaggggaatcgtttgtggtagttggacgatgtgcggagacggttttaaaggaatatgacggactgatcacgatctttgtgctgggcgatgaggaaacacgggtgaagagaatcgagcagctgcacggactttcagaggacgaggcgaaacgtctggtaaagacgaaggactggcggcggaaatcctaccacaactgttacagccgcggacgctggggagattccagaaattatgacctttcgatcaacagcagccggctgggaattgagggaacgacgaagatgctggaggagtatgtgcaggcgcggatggacgcgatgcagaaataaaataatagagatatcgaaggaaaagagaaaggggaacgtgtgcctaggcggcgcacgtccccctttccctttttctgccgaggtgttatactgttactgttcccaggtgggcacttttggaaccgaaagtgccgtaagaaaacgtggtggcagtaggaatttgccgtatttaaatgcgaagccacggcaaattccgttactgggcacgtatgcgtgaacagaaacgttatactaaaaaatatggaattagatagaaaaatcgtatttgctatctgttcgatcttgttttatagtatataagatatttaataggagtttgatgatatatgacagagttaaaaaaagaaaaaaagaccggtctcgttctggagggcggcgggatgcgcggtatttacacagcgggcgtcctggatgtgtttttggatcatgatatttcatttgacggcgtgatcggcgtctcggcgggggcagtgcatggggcttcgtttgtgtcggggcagaaggagcggagcatccgctattataaaaaatactgcaatgacaagcgttttatgagctttaaaaactggctgcggacgggaaatctggtggacgagcagttctgcttccatgatataccggaacggctggatccgtatgattacgaggcatttgaccggggaaatacacggttttatgtggcatgcagcaatgtggagacagggaaagcagagtatctggagatcaaagatatgttcaaagatgtcgaatatttccgtgcgacggcatcccttccgtatgtgtcccatatggtcgaggttggtggaatgaagcttctggacggcggctgcacggacagcattccgttgcgtgcgttcgctaagatggggtataaaaaatgcgtcgttgtgctgacccgtccggcgggctaccgtaagaaaccaggcaatttctggctgccggaggcggcatatcacaaatatccggcgttcgtgagggcgcttcgcagccgctattatttctataataagacagtggaatggatcgatcgcctcgaacaagagggaaaaatttttgttatccgtccgagcgtggcgcttccaatcggcaggaccgaacatagtgttgaaaaattgcaggagacgtatgatatcggcaggaaggatgctgccaatcagatgcatgcaatggaaaattggttcaaatcttattgatttatagattgatctctagtatagtaaagattgatgtaatgtggctgtggacaataaaaagcgggacagctgcagcgtgacgatgaaagagcgattcgttcggaccacatatgccgcagtggcggaagacaggtttggtatgtgtatcgctataaatatagaaggagaagaggcaatggttaagatagcagtagatgccatggggggcgacaacgcaccgggtgagatcgtggcaggtgccgtgatggcagcccagtcgagggaagatattcagattttcctgatcggcaaggaagaagtcgtatcagaagaattaaaaaagcatacatataagaaagaacagatcgaggttgtcaatgcgactgaggtcatcgagacggaggaaccgccggtcaatgcgatccgcacgaagaaagattcgtccatcgtggtcggcatgaatatggtccgcaggggtgaggcggatgcattctgttccgcgggcagctccggcgcgattctggtcggcggacaggtgatcgtcggcagaatcaagggcgttgaacgtccgccactggctccattgattccgacagaaaagggcgtgtccctgctgatcgactgcggcgccaatgtcgatgcaagaccgtcccatctggtacagtttgcaaagatgggatccatctacatggaacacgtggttggaatcaagaatccgcgtgtggcgatcgtcaacatcggtgcggaggaagagaagggcaatgctctggtgaaagagacattcccgctcttaaaagaatgtaaggacatcaatttcatcggcagcatcgaggcacgcgagattccgcacggcggcgcggatgtcatcgtttccgaggcatttgtcggaaatgtcatcctgaaactctatgaaggtgtcggtgcaaccctgatttctatggtaaaacagggcatgatgacgagcctgcgctcaaagatcggcgcattgcttgtaaaaccggcgttaaagacgacgctcaaagcattcgatgcgagccagtacggcggcgcaccgcttctgggattgaaggggctggttgtcaagacgcacggaaattccaagcgcatcgaggtgtgcaattcgattcttcagtgtgtgacctttaaagagcaggcgattaatgaaaagatcaaggaaagtctgtgaaactttcgtgaaattataaaatgtagcgaaaaaacgatatgtttttaatcaatctagaattctaaatattttaaaataagttcatagaaaggaagaaaattatggaatttgaaaaattacagaacattatcgcggaggtactgaatgttgaagcagatgaaattacgttaaatacgacgtttgtggatgatctgggcgcagattcgctggatatttttcagattatcatgggaatcgaggaggcgtttgatatcgaaattccgactgaggaggcagaaaagattgtatctgtgggcgacgcagtagagcagatcaagaacgcactgaactaattcaatgtttgttaaaaagttatagagaagtctgtcaggcaaaggggctgggcgggctgccgaagggcaggatcgcgacagctcctttccaaaaagaacggatgtttgactctggctcacagacacaaatagcaatgattgccggaatcagtcagcagcaggacaggctggaaagagagaaatatatggagtatacattaaataaattggaaaaacggattggctattcgtttcaggacaagaagcttctggaacatgcgatgatacacagttcgtatgccaatgagcaccatcttggaaaactgggatgcaacgagcgtcttgaatttttaggcgacgcggtgctggaagtggtatcgagtgatttcctgttccgcacgtttccggagatgccggagggcgatatgacaaagacacgtgcgagtctggtctgcgagccgacccttgcattctgcgcacaggagatcgatctgggtggatttttgctgcttggaaaaggcgaggatgcgaccggcggacgggggcgcgattcggtggtgtcggatgcgatggaggcactgatcggtgcgatttatctggacggtggttttgctaatgcaaaagagtttattcatcgatttattctcaacgatatggaacacaaaaagctcttttatgatagcaagactatcttgcaggagattgtgcagggacatacggacgagacacttacatacgttcttctgaaagaagaaggaccggatcacaacaagagcttcgaagtgtccgcgatgctggacggtcaggagatcgggcgcggcatcggacggacgaaaaaatcagcggaacagcgtgcggcgtaccgtgggatcctcactatcagaaaaccgcaggagtaggtatgtatttaaagagtattgaaatacagggttttaagtcatttgccaataaaattctgtttgagttccacaacggaatcacgggcatcgtcggaccgaacggcagcggcaagagcaatgtcgccgatgcagtgcgctgggtgctcggtgagcagagaagcaggcagctgcgcggcggcacgatgcaggacgttatttttgctggtacggagcttcgaaaaccgcagggatttgcctacgtggcgatcacactggataatgccgatcacaaacttccgattgagtacgacgaagtcacggtttcaagacgtctttaccgttctggtgagagtgaatataagattaatggaacgagctgccgtctaaaagatatcaacgagctcttttacgatacgggtatcggtaaagagggatattccatcatcggacaggggcagattgatcagattttaagcgggcggccggaggaacggcgcgagctgtttgacgaggcggctggaatcgtgaaattcaagcggcgcaaggcgatcgcacagaagaagctggaagatgaaaaacagaacctgatccgcgtgacggatattttgtccgagctggaaaaacaggtaggaccgttggaacggcagtcggaggaggcgaaggagtatctgcgtctgcgggaagagctgcgctgcctggacgccaacctgtttttggcagaatcggaggaattgaagcgccagatccgggaagtggagcagaaggagatgattctgaccggcgatcaggagagtgtgcgggcggaatcggagacactgaaatcggagtacgaattgctcggaaccgagctggatgcgctggatgcggcgattgccgcggatcgtgaggcgtgcagccgggaagacctggaacgccaggagaagaccggacggatcggagttctcagagagcagatccggacggagcagatgaacgaagaacatatccgcagccggatggcgtcgatcgacggcgaaatgcatcagaaagaggaagaacaggcggaatatgagtctgaaaaacaggcactaaatgcatcggtgcagacgatcgaggcaaaacagcaggaagcggaggcagcagtccgttcgatggacgaggcggtcagccggacggaaaccttgatcgagaaggcaaaagccgagatcatggacgctctgaaccagaaagcggaacttgccgcccgccgtcagcgctatgagacgatgctggagcaggcggatgtgcgccgggcggaagtgacgcagaagcttttgaaattcaagagcgatgagtcggttcaggaagagcagaaaaaagaagaagaagccaaattagggaaggtgcgggaatgtctggaagcgttttcggcgcaggaaaaagagctgcaggagcagacgcgcacggaggaagaacaggaacgccgcctgaaccagaaactttcgagccttcagcaggattaccacacgagccggacgaggctggaatcaatgcggaatctggcggagcgctacgagggctacggcggcagtatccgccgcgtgatggaagtcaggaactgcgttccgggtattcatggcgttgtggcggatttgatcagcacgacgaagaaatatgagacggcgatcgagacggcacttggcggcagcatccagaacattgtgacggattccgaggagacggcgaaacgcctgattgaacatctgaaaaagaaccggtatggccgtgcaacgtttctgccgctgaccagcatggaacgccgccagagttttggacagccgggggcgctgaaagaaatgggtgttcttggactggcaagcgaactggtctctgcggatgagaaatacagcgggctggtgtcctatctgctgggacgcgtggtcgtggtggatcagatcgatcatgcgattgcgctggcaaagaaataccgctattctctccggatcgtgacgctggacggcgagcttttaagccctggcggttcgatgaccggtggtgcattcaagaacagcagcaatctgctgggacgacgccgtgagatcgaagaactggaagctgcctgcaaaaaggcattggaacaggtggaagcggtacagaaggagctggcagagacggggcgcaggctgacggaagcgaagagaacactggcatccgtccaggagaggcgccagcagatgcagatccagcagaatacgttggaactgacgatctgccagttagaggcgagacggcaggagattgcagattcctcgcaggatctgtcttcagaaaatcaggaactcgaactgcaggtaggcgatctgcgcggggcgctgcgggagctgcagaacgaagagacgaagcttgaaacgctaagcaatgagaagaaccagtacgtggaagagcagcagacgggtcttgagacggcgaaaaagcagcgtggggaagcggcggcagccctttcggagatacagcttgggcattcccaggcggagcagaagggcgcgtttatcgaggaaaatctgcgccgagtattgcaggagcaggaacgtctccgggcagagaaagagaaactttccggcggtcacgcggacagcagcgagatgatcgctgccagagagcgcgagattgcagcgctggaagccgagatacaggcatccggggacaagcggacgcagatggaactggtaatccagaacaagcagcgtgagaaggaagaaaaggcggggcggcagaaaactttctttgataaaaaggaagagctgaacgaacgtctccagcttttagaccgagagaacttccgtctccagaatcagagagaacgcctgaatgagcgcctggagtcgcaggtcgattatatgtggagtgagtatgagcttacgtattcgcgcgcggaagagctgcggaaggaagagctgacctcgattccagaaatgaagcggtcgattaatgagaaaaagatggagatccgcgcccttgggaatgtcaatgtcaacgcgatcgaggactacaaggagatatccggccgatacgaatttatgaaaaaccagcatgaagatctggtagcggcacaggcggcgctggaaaaaattatcgaggagctcgatgaaggaatgcggcgtcagttccgggaaaaatttggtgagatccgccgcgagtttgataaagtatttaaggaattatttggaggcggaacgggtacgctggagctgtcgcaggaagaagatattctggaggcaggcatccagattatttcacagccgccgggcaaaaaactgcagaatatgatgcagctctccggtggggagaaagcattgacggcgatcgcactgctttttgcaattcagaacttaaaaccgtcaccattctgcctgcttgatgagattgaggcggcactcgacgattccaacgtagaccggtttgccgggtacctgcataagctgacgcgctacacgcagtttatcgtcatcacccaccgaagaggtacgatggtgtcggcagaccgcctgtacggtatcacgatgcaggaaaaaggtgtgtccacgctggtatcggtcagcctgatcgaggcgcagatggagcgggaagaggaaaaagcagaattataattgcaaaaaagagctcagaaatagaaaaggaggcgcagccatgggagaaaagaaaaagggctttttcagccgtctggtagaagggctgacgaagacgagagattccatcgtaagcggaattgattccgtattcagcggtttttccgcgatcgatgatgatttctatgaggagatcgaagagacgcttatcatgggcgatctaggtatccagacgacgatggcgatcgtcgaggatctccggaaaaaggtaaaagaaaaccacatcaaggatccggcagagtgcaaggatcttctgattgccagcatcaaggaacagatggatctgggcgaaaatgcctacgaatttgaaaaccgcaagtcggttgtgctggtgatcggcgtcaacggcgtcgggaagacgacctcggtcggcaagctggcgggtcagttaaaggatcagggcaagaaggtcattctggcggcggcggatacattccgtgcggcagcgattgagcagctgacggagtgggcaggacgcgcgggcgttgagctgatcgcccagcaggaaggttctgatccggcagctgttatctacgatgcgatcgcggcggcaaaatcaagaaatgccgatgtgctgatctgcgacacggcaggtcgtctgcacaacaagaaaaacctgatggaagagttaaagaagatcaaccggatcatcgacaaagaatatccggacgcctaccgtgagacattggttgtccttgacggaaccaccggtcagaacgcgcttgcacaggcaaaacagtttatggaggtggcggatatcaccggcatcatcctgacgaagctggatggcacggcaaagggcggtatcgcggttgcgatccagtccgagcttggtattccggttaaatacgtcggaatcggcgaaaagatcgacgatttacagaaattcgatgcgaatgatttcgtcaatgcactgtttaagagaaatgaagcattgacagagaatgaataaagctaaaaatagctgagcatgccacggctgaaactggtttggcggagaacaaatctgcttaagccgtagattcagataaacaggacacacccggcagactgtctggtcagagaaccggcaaaagcagggcgcattctgagaaatacggataaatggaggaaagacaatgagtgagacaataaaggaagagacagcagaggcagtacaggctgagccgcagggactgacgctggagaaattcgaagaagcaactgaggttgtcagcaaggttatttccgagacaaaactggtttacagtgaatatttttcgaatttgaccggcaataaagtatatttaaaaccggaaaatatgcagtatacaggtgcttacaaggtaagaggtgcattttataagatcagcaccctgagcgatgaggagaaacagcgcggtctgatcaccgcatcggctggaaaccatgcacagggcgttgcatacgcggcaaaactggctggctgcaaggcaacggttgttatgccgacgaccacgccgctcatgaaggtaaaccgtaccagaagctatggcgcagaggtggttcttcacggcgatgtattcgatgaggcgctggcatatgcaaatgaactggcagcggagcacggatatacctttatccatccgttcaacgatctggacgtagccaccggtcagggaaccatcgcgatggagatcatcaaagagcttccgaccgttgattatattctggttccgattggcggcggcggactctgtaccggtgttgcaacgctggcaaaactgctgaatccgaagatcaaagtgatcggtgtagaaccggcaggcgcaaattgtatgcaggaatccctgaaagaaggaaaagtagtgactcttccgagcgtcaacacaatcgcggatggtactgcagttaaacgcccgggcgatctgctgttcccgtacatccagatcaatgtggatgatatcatcaccatcgaggactccgagctgatcgtggcattccttgatatggtagaaaaccacaagatgatcgttgagaactccggtcttctgactgtggctgctctgaaacacctgaatgtgaagaagaaaaaagtcgtatccatcctgagcggcggcaacatggacgtgatcacaatggcatccatcgtacagcatggcctgatccagagagaccgcgtatttaccgtatcggtactgctgccggataagccaggcgaacttgcaaaagtcgcaaccctgatggcagaagaacagggcaatgtcatcaaattggagcataaccagtttgtcagcatcaaccgcaacgcagcagtggagctgcggatcaccgttgaggcgtttggtacggatcacaagaataagatagtggaagcgctcaaggaagcaggctaccgtccgaagctggtaaaatccaaaaatatctatgatgtctaaggtggaaatgaaaagcagtgtagatagagcagacaggggagaattgaaatgaagcgggagaaatatgagccggtgttaaaaaatatttcctattttataaaatgggcggaaggcgcgattgtgattggaattgtgagcggctgcatcggcacggcatttggaaaatgcgtcctatgggtgtcggcattctttcagagccacccgtggatggtctttctgctgccgctcagcggtcttctggttctgggcgtttaccatgtgctgggagaggataataaccggggcaccaatatggtgattgaatcgatctattcgaacacagagatcagttttgcgactgccccggcagtctttgcaggaacgcttctgacgcatttgggcggcggttctgccggacgcgagggcgcggcgctgcagatgggaggaagcatcggaacccagatcggaaaatggctgaaatttgatgagaaagataagaagattgctgtcatgtgcggcatgagcggtgtatttgccgccttgtttggcacaccgatggcggcggcgatcttttcaatggaggttatcagcatcggcgttatgtactatgcagcgctggttccgtgtgtcttttctgcctttacggcagcggcgctggcgaggttctggggactgatgccggagcggtttgcgattggtgcggttccggcgtggagtattgaaacagcgatcgtggctgtcggtctggcggctggctgcgcgctggtgtcggagcttttctgcatcacgcttcacacaacggaacatctctacaaaaaatatcttccatcgccggtctggcggattctatccggcgcggcgattgtgattgttttgacgcttctgaccggttcgacccgctacaacggaagcggcgtctccctgattgaaaaatgtttcgagggcgagggacttccatgggatttcctgatgaaaattctctttacgacggttacgctggaggcaggcttcaagggaggcgagatcgtgccgaccctgacgatcggcgcggcgtttggcagtttctttgcgtttctctttggacagccggtcggtcttatgaccgcctgcggtatgctgggactcttcgtgggagttacaaactgcccgatctcaacgcttctgctgggctttgagctttttggctatgaggcgatgccgtttttcgtgctggtgattgcagtcagctttagtttctctggttattacagcctgtatgcgagtcagaaatttatctactcgaagacgaggacggagtttattaaccggaagacgaataaataggtggaaaatgctcaccataattttgattttttacttttgaataccacaaaaagggttccaatttatctttggaaccctaaaatgtcatgctttaaagaaattcatgaatctacgtgctctatcatgatttattcatgaaaatcctgcggtttctcatcacggaaatcgagcagggcgcgcggtgcaacctgcagaacacctgcaatatcaaagagactctctaaggaaagactcgttttcatgttcggtgcctcgatgttagatatatgagtccggcttaaatcggtcgcctctgctaaagccatctggctcatgccgcggagtttgcggtaataagcgatgttgagacctatctgacggtaatatttttcataacggtttgtctgctgcttgttaatttgtttttgatcgattgctgtcatatttttcaagtgcctccccgatccgaaagaatcatgcgttattgttatttcagagataataaataattacaactgatataactattgtagctggaaattgatttttatcaaacaatataatgattcaaatttgcaatgttataaaatgcatatccaataaaataatgcacatacatggattgcacccaggaaggttgttaaataatgcacagaaaaagattgcagaggataagtgcagataaataatgagaagct

SEQ ID NO: 10994 - DNA, 3836 bp, Unknown
  gut microbiota DNA sequence
tttgacgtataaaacaaataaaacaaaataattcataagtatgaaatgaggcaggtcaggggagagatccctgcgtcctgcctctctttcattccaatgtatttccggattttttgtccggtaactgtccgcgtggctgattttccggagaatattctgaaaagcaggaggagataaatggaacagcagaatataaccgctgttaagggcatcggtgaaaagacggcaaagctatttcaaaaaataggcgtgggaacggtggaagaactgctccattattatccgcgtgcttatgatgagtttaaggaaccgcagccgatcgcggaactgaaggaagatacgatcgcggcagtcggcggaatcctggcaaaaacggcggatgtggtgcggtatggagcgcgcctgcaggttacgacggctggattgcgggacagcggaggcacactggcgctggcatggtacaatatgccctatctgcgcgggacgctcaaggcgggggaacgctttattttccgtggccgtgtggtaaaaaaacggggaagacttacgatggagcagccggagatctaccgcccggaacagtatgcgaaagtcgtgtcgtctatgcagccggtttacggacagacgaagggacttggcaataagacgatcgcaaaggcagtcacggaagccctcacgatgcgccagatggaacgggaatatctgccggctggtctgcgggaaaagtacggattggcggaaatcaactatgcgctggagcacatccattttccggcaaaccgggaagaactgatgttttcccggaaacgtcttgtgtttgatgaatttttcatgttcctgatgtcagtgcgcctgctcaaagacaaaaaagaagataaaaagagcgcatatccatttacgttttctggggaaatggcgtcggtggaagagcgcctcccatatgctctgaccggggcacagaaaaaggtaatccgggaggtgtacgccgatttgtccggcgggcatatcatgacccgattgattcagggcgacgttggttcgggtaagacgattgtggcgattctggcgttgctgcaggcggcggcaaatggatatcagggggcgctgatggtgccgacggaggtactggcgcgccagcattacgagtcgatgaccgaattgtttgcgtcgctgggaatcacatatcgtccggtgcttctgaccggttcgatgacagcaaaggaaaaacggcttgccagagagtcgattgaaaatcatgaggcagatatcgtgattggaacccacgcgctgattcaggaaaaagtggtgtacgacaatctggcattggtaatcacggatgaacagcaccgttttggagtggcgcagcgggaaatgctgagcaaaaaaggcggcgagccgcatgtgcttgtcatgagtgcgacgccgatcccgcggacgctggcgattattttatatggggatcttgatatttccatcatcgatgaacttccggcaaaccggcagccgatcaagaactgtgtcgtgaaccgtgaatttcgcccgaatgcctaccgtttcatcgaaaatgaagtccgcgccggccgtcaggcatacgtcatctgcccgatggtcgagccgagcgagatgctggaggcagagaacgtcatcgattataccgaagagctgcgccgcgccctgtccccgtcgatccgggtggaatatctgcacggaaagatgaagggaaaagaaaaaaatgcgatcatggaagcatttgcggcaaatgagattcatgtgctggtatccaccacggtcatcgaggtcggaatcaatgtcccgaatgctaccgttatgatgatcgaaaatgccgagcgtttcggtctggcgcagctccatcagctccgcggccgtgtcggtcgaggaaaagatcagtcctactgcatcatggtcaacgcctccggcgaggaagacgccggaaagcggctggatattctcaataagtcaaatgacggcttctacatcgcctccgaagacttaaaactgcgcggtcccggcgacctatttggcgtccgccagagcggtgatctcgaattccatttagcagatatatttgcagatgcagatatattgaaggcagtttcggatgaagtgaagaaattaatggataaagatccgctgttggaggcggaggagaatcaggagctgaaacggaagatgaatgggtatttagagagaggatgggagaaggtgaatttgtgatggggatggattgaattgcaaatcgcggtttgagtagattaattagaaaaagctcctgcatacacagaatgaacattcatctgtgtatgcaggagttttttgaaatttccagccgtttatcagccgtcaattctcattacatctgtccctcgttataccgcttaatcagcttctggatcttcgccgtcggtgtcagtgcgttctccagagatacgttatggttcagggagttgatgattgcagcgataaatttgctcatatcagcttctacataccagtcacgtttaagaagttccggcgtgtggtagtttaagttggtggttacaacgcagtcgaggtaaccttttgcgaaaaattcgtcgaatttctcaagtccgttggtgaacagaccgaaagtagcgcatacaacgacgcgttttgccttgcgctctttgagggcgcggcaggtgtccagcatgctctcgccggaggagatcatgtcatcgatgatgagaacggtctttccttcaacggaagaacctaagaactcatgggcaacgatcgggttacgtccattgacaacacgggagtaatcgcggcgtttgtagaacatacccatgtcaacacccaggttgtttgccagatatacggcgcgggacatagcgccctcgtccgggctgataaccatcaggttgtccttgtcgatctttaaggttttgtcatggttcagtaatgccttgataaactggtaggtcggcatgaaattatcaaaaccgcttaacggaatggagttctgtacacgcgggtcatgtgcatcgaaggtaatgatgttgcttacgcccatctgaatcagctcttcgagcatcatcgcgcagtcaagggattcacgaccgctgcgcttgtgctggcgtccttcatataagaacggcatgataacattgacacgatgtgcggtagcaatggatgcgccgatgatacgttttaaatcctgataatggtcgtccggggacatatgattggtaaatccgctcattttgtaggtcaggctgtagttggttacatcgaccatggcgtaaatatcggtaccacggacagactcattgacgatgccttttgcttcaccgcttccgaaacgcgggcacgcgcagtcaagcatgtaggaatcagcatcatagccgcggtactgtaaattttcctgacgttttttcaggacttcaatatcgttgcggcggaaattgataatgtgggagttgactttctcagccagatcccggcagctctccagtgcggcaattttaagcggcgcaaccggaagcgtgtcattaaacacgtagtcattcgacatgattatacctccaaacagtgtaggtccttcgatgcatgcgggcagagcgtacaagtttgtctgccatttgcaggacataatacaactattttataccattttacgataagaaacgtcaatagcaaatgagaaaattacaaaaaaaatcaaatatttggcgtgcttccccaaaaatccgcatctgcgaatcagaagcacaactttacaaaaaagctgattactgttaatataatactggattcttagggtttaaaaatatttgaaatgaggattttat

SEQ ID NO: 10995 - DNA, 51165 bp, Unknown
  gut microbiota DNA sequence
aaaaaggtcatctgataaaatcggtcgatccgggctcgattgcggaggaaatggagctggagccgggggacgtccttctgacgatcgatggagatgagatagaggatatttttgattatgaatataagataaacagtgaggagattacgctgctggtccgcaagaagaacggcgaggagtgggaactggatatcgtaaatgagtatcaggatctggggattacctttgaaaatggtctgatgagcgattatcgttcctgcaggaataagtgcatcttctgtttcatcgaccagatgccgccgggcatgcgtgagacactgtattttaaggacgatgattccagactttcgttcctgcagggcaactatatcacgctgacgaatatgaaggataaggatattgagcggattatccggtttaagctggcgccgatcaatatttcagtgcagacgacaaatccggagctgcgctgcaagatgcttcataaccgttttgccggtgaggcactccagaaaatcgaccgcctgtatgaggcggatatcccgatgaatggtcagatcgttttatgccggggcgtcaatgacggggcggagttagaccgttcgattcgtgatctgacgaaatacattccggcgatgcagagtgtttcggtcgtgccggtcggtctctcgaagtaccgcgatggtctgtatccgcttgagccgtttacaccggagcagttgggcgataccattgatttgatagagaaatggcagaagaagatctatgcggaacacggtattcacttcattcacgccagcgatgagttttacatgggcgccgggcgcccgcttccggaagcggatcgctatgatggctatatccagctggaaaatggggtcggcatgattcgcctgatggaagaggagatagccgaggcgctggagcagctgcatccgggagaggctggcgaggtgtgtccggaggagatttcgattgcaacgggacggctggctgctccgtatattgagcagtatgtagagcgcgtgtgccgccagttcccggggaaaaaggtacatgtatatgcgatccgcaatgacttctttggtgagcggatcacggtggcggggctgatcacggcaaaggatctgattgcacagttaaaggaacagccgcttggcagccgcctgctgcttccaagcgccatgttccgaagcggcgaagagacatttctggatgatctgacccgcacggatgtacaaaatgctttacaagttccggtggatattgtaaaatcaagcggacgtgattttgtggaagcaattctggctcctgtgaaggaggaaagctccaggcatggcgagtatgagccggatccggaggaatttgtcgctcagatggatgataactggcaggaagaagatctggatggcgtacaggtgtacgcatatgagccggaagacctggacgaggatgctccggacgaaggcgtttgttttgaaagggaagactcagacctggaggatgagaaagaaacgtgatggctggaaatacagtggaaaacgtgctctcggacacacagaaagaatgcgtctggatgtgaaatgcatcacaatgaatgaaacaagtaactggataataaaaatagcagctgtggatttacaaaccagctgcggagcatgaataaatggaggcataaatatgaaaaagaaaccggtggtggcggtcgttggacgcccaaacgtgggaaaatccacccttttcaacgtccttgcgggcgatatgatttcgattgtaaaagatactccaggtgtaacgcgtgaccgtatttacgcggactgtacctggttagaccattcttttaccctgatcgatactggcggtatcgagccggatacgaaggatattatcctgtcccagatgcgtgagcaggcggagatcgcgatcgcgacggcggatgtgatcctgtttatcgtagatgtgcgtcagggcatgaccgattcggattccaaggtggcggatatgctgcgtaaatcgagaaaaccggttgttctggcggtcaataaagtagacaatccggcgaaatttggcaatgacgtctatgagttctacaacctcggtatcggtgatccggtagcgatctcggcagcctctcgtctgggactgggcgatctgctggatgcagtcgtggcacatttcccggagggaagcggcgacgaggaagaggatgaccgtccgagagtggcgattgtcggaaaaccaaacgtaggtaaatcttctattataaataagcttctgggcgagaaccgcgtcatcgtatcggatatcgccggtacgacccgcgatgcagtcgatacagagattgtccgcaacggtaccgagtatgtctttatcgatacggcaggtctgcgccgcaagagcaagatcaaggaggagctggagcgctacagcatcatccgtaccgtaacggcggttgagagagcggatgtggttctgatggtcatcgacgcgaaagagggagtaaccgagcaggatgcaaagattgccggtatcgcacatgagcgtggaaaaggtattatcatcgtggtaaataaatgggatgcgatcgataagaccgataagactatttatgagtacaccaataagattaagaccgttctgtcctttattccgtatgcggagttcgtgttcgtatccgcactgaccggacagcgtatgaataagctgtttgagatgatcgacatggtgcgcgaaaatcagacactgcgtattgcaaccggcgttctcaatgagatcctggcagaggcagtggcactgcagcagccgccgtctgacaagggcaagcgtttaaagctctactatatgacacaggtagcggtcaaaccgccgacattcgttgtgtttgtcaatgataaggaactgatgcatttttcatatacacggtatctcgagaacaagatccgtgacgcattcggattcaagggaacgtccttaaaattcctgatccgcgagagaaaggggaaggatcaataatggaacgtctcatctgtattgtgatcggctatatctttggtctgatccagtccggctatctgtatggaagggtgaatcatatggatatccgccagtacggcagcggaaatgccggttctacgaacgtcctgcgtgtgatgggaaagaaagcgggcgcgatcgtatttttaggggactttttcaaggcggtgtttgcaatggcagtctgccgtctgctgtttaagggaaatgcggacgtggatcttcttgcgttgtatgcgggtctgggagtcacactcggtcacaatttcccgttttacctgaaattcaagggcggcaagggaattgcctgcatggcgggcatcatgacagcgatggatctgcggattacgctgacctgtttcgtgattttctccgtgacggtgttcctgacccgctatgtatcgcttggttcgattcttgtgtcgatcaccttttttgcagagcttgtgatctttgagagcatgggttcctaccgggtaagcacgccgaaccgcatccagttctatgcactgggcgcgatcctgatgtgcatggcgatctggcgccatcggagcaatattgggcgtctgttgtccggcacagaaaacaaactgggcgcgaagaaatcatgagagaagtttaacaacactttacatagttgccataaggtaattgttcacaggtaggcacttttggaaccgaaagtgccgtaagaaaacgtggtggcagcaggaatttgccgtattgaaatgcgagccacggcaaattccgttactgggcacgtatgcgtgaacagtaacgtcataagtagtgggaatgtataaaaaattccaaataacattgacctgtagagagaagaagagagaaaagcaggtcgggaggtatcaggatggcagcagtaggaattatcggagccggaacctggggcacagccctggcggtgcttctgaacaataatggacacgatgtgacaatctggtcggcatttgatacagagatccaggaaatgagccgcaccagacggcacaaaaatctgccggaggttgtacttccggatccgatccagatgacagcggatctgcgcaccgcgatggcggagaaggatatgctgattatggcggttccgtccgtctatgtccgcagtacggcggcgaagatgaaggaatacctgcgttacggtcagatcgttgtggatgtggcgaaaggaatcgaggagcagagtcttatgacgatgtcacaggtcatcgaggaggaacttccgctggcggaggtagccgtcctttccggaccgagccatgccgaggaggtgagccggggattgccgaccacctgtgtggcagcggcgcaccgcaaaaagactgccgagttcatgcagagtgtgtttatgagcccggtgttccgtgtttacaccagcccggatatgctgggcgtggaaattggcgcggctcttaaaaatgtcattgcgctggcagccggtaccgcggatgggttgggatgcggcgataacacgaaggcggcgctgatcacccgcggaattgcggagatttcccgtctgggtattgcaatgggcggaaaacagcagaccttctacggattatccggcatcggtgatttgatcgtaacctgtgcgagcatgcacagccgcaaccgccgggcgggtatcctgattggaaagggatacacgatggatgaggcgatgaaggaagtgcagatggttgtcgagggcgtttattctgcgaaagccggccttctgctggcacataaatacggctgcgatatgccgattgtttcccaggtcaaccaggtgttgtttgacgggaaatctccgaaagaggcgctggcggatctgatgatgcgtgatccgcggattgaatcgagcgatcttccatggaagggataattcagacggcagtcattattctgaatttgagtgatataattcagaataatagcaatgagatctactatgtttttctggaaaatgcaggtgtccacgtcaggtggacaaaagcttataaaagtgtttgctataacctgtaagaatacttaatataactacgagatctggaaaagagagaatttagcgaaaaaaaacgaaaatccgctaaattccctcttttttaagtggtttttgtattgacaattagaggggtaaaatttataattgcctcattcaaatagttgttgtattccagtgcagcatagaattggaggagaatattatgaaaaaaagagtagttagtcttgggcttgcagctatgatggcgatgtctatgaccgcttgcggcggttctggaaatgcgggcacttctgaatcagcagcagaagacgcacagggcgcagagggagctgacggcgaagtatttaaaatcggcggcatcggaccgatcaccggcgcggctggcgcttacggcgaggctgtaaagaatggtactgagctggcaatcaatgagatcaacgaggctggcggtatcaatggttaccaggtagcgttcaacttccaggatgatgagaatgatccggagaaggcgatcaacgcatacaataccttaaaagactggaacatgcagatgcttcttggcaccgttacttccaagccgtgtatcgcagttgtagcagagacaacagcagataacctgttccagctgactccgtccggatctgctgttgagagtatttccggcgacaacgcattccgcgtatgctattctgacccggatcagggacgtgcatccgctcagtacatcggcgagcacaaactggcaactaagatcgctatcatctacgacagctccagcgaatactccgatggtatccgcgagtccttcgtagcagaggctccgaatcagggtctggaggtagtagccagcgaggcatttacatctgataacaataccgatttctccgtacagcttgataaagcaaaagagtccggcgctgatctggtattcctgccgatctactatcaggaggcatctgttatcctgaaacaggcaaacgataaagatttccacccgcagttcttcggctgtgatggtatggacggtatcctgagcgttgatggctttgatgagtccttagcagaaggtctgatgcttctgactccgttctccgtagacgaggagtccagccaggacttcgtaactgcttatcgtgatgcttacggcatcgacccgcttcagttcgcagcagatgcttacgacggcgtatatgcaattaaggcagctgcagagaaggcagagatcacaccggatatgagcacttccgatatctgcgatgcactgaaaacagctatgactgagatccagatcgatggtctgaccggtacagagatgcactggacggcagaaggcgagccgcagaaagcgccgaaagctgtagagatcaaagacggcaaatatgagatgatgcagtaattaaaaatttaaaaactgcagaaccgttgcggctatatgtatgtagctctgatgggactgttactggatgtccggcggcacagatggctgccgggcatttagtaacagctttctttttaaaacggttcactgcacatgcttgcctgcgacgacgactgggtgtttgctttctgcggactgcgagacggtcatgtttgttctgctaaattcggtcacaggtaaacatgtgcagcgaaatgcgtgtacagggaaatgcgaaaacgtagaaacaaagaggtaggtgtatacatatgagttttctttcttatttaatcaatggcatcagtctgggaagtgtctatgcgatcattgcactgggctacaccatggtttatggcatcgcgcgtatgctgaacttcgcacacggcgatatcatcatggtaggcggtttcacagtgtttacgattgtcacaacgatgggcggttctccggttgtgggtattctggcttcggtggttgtgtgtacagtgctgggcgttacgatcgagcgagttgcatacagaccgttgcgtgacgcgtccccgctggcagttctgatcaccgcgatcggtgtcagttatctgctccagaacgtggcgcttctgatttttggttccaatgcgagacagtttacatcagttattactgtaccggcattaaagctggctggcggcaagctttcgatctccagtgtcacgattgtgacgattttaagctgtatcgtgattatggctgccctgatggcatttatcaataagacgaaaatgggacaggcgatgctggcggtttctgaggatcgcggtgcggcaaccttgatgggtatcaatgtaaaccgcacgatctccgtaacctttgcgattggttccgctctggcggcagtagcaggcgtgctgctctgctcggcgtacccgtccctgtctccgtacaccggttccatgccgggtatcaaggcattcgtggcagcggtatttggcggtatcggttcgatcccgggcgcatttatcggcggtatcctgcttggtatcattgaaaaccttgccaaggcgtatatttcctcccagctttctgacgcgatcgtattctctgtcctgattatcgtgcttctggtccgcccgaccggtattctcggcaagaagatgacggagaaagtataatagagaaaattatacgatggttcatgccggggacttttgaaacggaaagtgccgtgtgaaaacaagatggtgcatgaactgcaataagcaagagaaagtgcaggtgtttaaaatgaacgcatataaaaataaaattcggattcagaatgcgatcacatatgcgattgtaatcggctgttacattctgattcagattatgatggcaggcggccatgtaaacagtcttttaaagggtattctggttccactttgtacctatacgattttggcggtttccttaaacctcacggttggtatcctcggtgagctgagtctgggtcatgccggattcatgtgtgcgggtgcgttttcaggtgcattttttaatcatgccatgaaaaatctgatcgcaagcaaccaggtacgcttcattctggcgctctttgtcggtgcggcggtagcagcggtatttggtatcctcatcggtattccggttctgcgtctgaaaggagactatctggcgattgtaacgctggcattcggtgagatcgttaaaaatattatcaatgttctgtacgtcggcatcgacggaaacggaatccacgtttccatgaaagatgtagcttccttaaagctggcagcggacggtcaggtgatcatcaagggggcacagggtatcacaggtacaccgaagacggcgacctttacgatcggcattatcctggtactcctgaccctgtttattgtattgaatatcatcaattcccggacaggccgtgcgatcatggcgatccgcgacaaccgtattgcggcagagtctgtgggtatcaatatcacgaaatacaaactgatggcatttaccatctctgcttccttagccggtgtggcaggcgttctgtacgcacacaacctggcgacgctggcagcgaccccgaaaagcttcggttataatatgtccattatgatccttgtatttgtggttctgggcggcatcggaaatatccgtggttccatgatcgcggcggttatcttaaccctgcttcctgagatgcttcgaagcctcaataattaccgtatgctgatttacgcggtcgtcctgattgcaatgatgcttttgacctccagcccgaaggcgatcgaggttcgcgagcgcatcttttcatcattccggaaaaagaagacagaaggggaggcgtaaatcatggcaatgctggatgtgaaaaatttaagtatttcttttggcggtctgaaagcggtcgatgatttcagcatcacgatagaaaaaggacagctctacggcctgatcggaccgaacggcgctggtaaaacgactattttcaaccttttgacgggcgtgtacaagccggatggcggacggattctgctggatggaaaggacattaccggtcacaaggcaatccagatcaatcaggcaggcatcgcgagaaccttccagaatatccgtctgttcaaggagctgagcgtgcttgacaatgtaaaggttggtcttcataaccatcataaatattctacgctgagcagcattctgcgtcttccgtcctattacaaggttgagaaagagatggatgagcgcgcgatggagcttttgaaggtgtttgacctcgacaaagagtttgattataaggcatcgaacctcccatacggcaagcagagaaagctggagatcgccagagcgctggcgaccgagccgaagcttctgcttcttgacgagccggcagccggcatgaacccgaatgagacggcagagctgatgaagacgatccgtttcgtgcgcgatcattttgatatgaccgtacttctcattgagcatgatatgaagctggtctccggtatctgcgagcgcctgacggtcttaaacttcggtcatatgctggcagagggaccgaccagcgaggtgctcagcaatccagaagttatcaaagcatatctgggagaatagggggaagtttcgtatgtcaatgctggaagtaaaagatttacaggtatattatggtgtgatacaggcactcaagggaatttcctttgaggtagaacagggcgatgtggtagcgctgatcggtgccaacggagccggaaagacgacgacgcttcacacgatcacgggtctgctgccgtccaaggcaggcaatatcacatttgagggaacggatattacccatgtaccgggctataagctggtatcaatgggaatcgcccacgtgccggaggggcgccgtgtgttcgcttccctgacggttcttcagaacctgaaaatgggtgcgtatacgagaaatgacaagaaggaaattgaagatacgatcgaaatgatttacaagcgtttcccgcgtctgaaagagcgcaagaaccagcttgccggaactttgtccggcggcgagcagcagatgcttgcgatgggacgcgccctcatgagccacccgcgcctgatcgttctcgacgagccgtcgatgggtctgtccccactctatgttaatgagattttcgatattatccaggaaatcaacaaggacggagtgaccgttcttctggtcgagcagaatgcgaaaaaagcgctctccatttccaataaagcatatgtgcttgagacgggcaatatcgttctgagcggtgatgcgaaagaactgatgaataatgagagagtgaagaaggcttatctgagcgaataaaaatgttctgtgagccggagctttccaaatgggaatattcataacccccttatggtctgaatacattgtatcagcagaccaagggggtatttttatggatcattttaatgtatacagcgatatccaggcgcgaaccggcggcgagatctatattggggtggttggtccggttcggacagggaaatcgacctttattaagcgctttatggaacttctcgtccttccggggctggaagatgtccatgcccgcgagcgcgcccgggatgaacttccccagtcttcggcggggaaaacgatcatgacaacggaaccgaaatttatccctaaagaggcggcaaagctctcgcttggggacggtgtggaggtgcgggtccgcctgatcgactgcgtcggtttcatggtggagggcgctgccggtcatattgaaaacgagaaagaacgcatggtgcggacgccgtggtatgaggaggagatcccatttacagcggcagccgagctgggaacgcgcaaggtcatcacggatcattcgacgatcgggcttgtggttacggcggacggcagtttcggggagttgaaacgggagaattatgttccggcggaagagaagaccgtgcaggaactgaaaaaactgggaaagccgtttctggtgcttttaaactcgcagaaaccatattcggaggagacgcgggcgctggcagcccggatgaccgaaaaatatgaggtgcaggtgctcccagtcaactgtgagcagctgcgcgccgaggatatccgggagattctggggcaggtgcttctggaattcccggtcacggagatcgatttttcgattccgaaatggctggagattctgccaaacagccattggcttaaatcggaggtcatacaggcagtccgggggatgatggatcggacggtacatatgcgcgatgtggcgttggcgctgccggaggaaaccggggaagcgatccgtcggatccggattgtatcaatgaaaatggatgatggcagcgttcaggcggtggtcgagctggacgacgggcattattatcagatcctcagcgagtatgtgggaatgccgatcgagggcgagtaccagctgatgcagaccttgaagcggttggcgtcgatgcagagcgagtatgaaaaggcatccgtggcgctcacgcaggcgcgcaagaagggctatggggttgttacgccggaacgcggggagatcgtcctcgatgagccgcaggtggtgcgccacggcaataaatatggagtcaaaatgaaagcgcaggcgccgtccatcaatctcatcaaggcgcagattgagacggagatcgcgccgattgtgggaaatgaacagcaggcagaggatttgatccgatacatccgggagaatgccggaaaaggtgaggaaggcatctgggaaaccaatatttttggaaaatcaatcgcccagatcgtcgatgacgggattcaggcgaagatctcccagctcactgaggactgccaggtgaagctgcaggatacgctgcagaaaatcatcaatgacagcaatggggggatgatctgtattattatataatagaataggtctggctcttgttgggaaaatggtgcgttgtctggaatgggaatgtgggacagataaggtgattttatgaaaattttatcgaaactttatcggggaaattgcaaaattgtcagaaatcagttataatgaggctaatagcaaaaacactttccgcaaggggtatgcggaaacataaacgacagaacagggggctgattttatgaggcttacatttatcggtgcggatcatgaggttacaggcagctgtcattttctggaggcatgcgggctgaatattctgattgactgcggtatggaacaggggatcaacaagtatgaaaatgcagaacttccgattccgtattcggatgtggactatgtgttggtgacgcacgcccatatcgatcatgtgggattgcttccacttatctatgcgaggggattccgcggacagattatggcgacgcgcgcgacctgcgatctgtgtgatatcatgctgaaagattgcgcccatatccaggagtcagaagcggagtggaaaaaccggaaagccatgcgtgccggaaaaccggaggtgacaccgatttacacgatgaacgatgcagaaggggtactgcatcactttgtcccctgcaattacaatgagattatccgtctgaatgataatctggagattcggtttgtcgatgtgggacatctgcttggttcggcttcgatcgagatctggatgaaggaagacgattgttccaagaagattgtattttcaggtgatatcggtaacaaaaacaagccgctcatccgcagcccgcagtacatccgtcaggcggattatgttgtcatggagagtacttacggcggtcggttccacaagaatacaggcgatcacgtggaagaatttgcccgcgtgattcaggagacgctggataagggcggcaatgtcgtgatcccggcatttgcggtcggcagaacgcaggaagtgttgaattacatccgtattatcaaggagaaaaatcttgtaaccgggcacggcgtatttccggtttacttagacagcccgatggcggtggaagcgaccggcgtgttcaaggacaatatgatggattgctacaatgaagagacgaaggagctggtaaaaaagggcatcaatccgatttctttcccgggtctgcatctctcgatcaccagcagcgattccattgcaatcaacttcaacgaggaaccgaaggttatcatctcggcagccggcatgtgtgatgcgggccgtatccgccatcatctgaaacacaacctctggagaccggagtgtacgattttgtttgctggctatcaggcagtcggcacactgggacgcagcattattgagggacgcgaggaagtgaagctgttcggtgagtcgatcgaggtcaaagcacggatcgagaagatcgagggcatcagcggccatgcggacgagaccgggcttttggagtgggttggcagttttatggaaaaaccgtcccaggtcttcgtggtacacggcgatgacacagtgtgcgatgcatttgcagagacggtcaaggaaacttacggcatcaatgcgatggctccgttctccggcagttcctacgacctgaaagagggatgcttcgtgactgttacgaagggtattccgattcagaaaccggcagtgaacgaagcaacgaagaaagcggctggtgtatttgcccgcctgctggcagcctgcgaccgcctgcgccgtgttgttatgcataacgagggcggggcgaacaaagatttagcacgttttgccgaccagatcaactcgctctgcgataagtgggaccgctaagcttcaataatagacataaaggagatttctgacttgaaagtaactatatacacagacggcgccgcccgcggcaatccagatggtccgggcggatttggaaccgtcattcactatgtagatccggcaggaaaactgcacacgaaagagatttccggcggctacaaacgaactacgaacaaccgtatggagctgatggcagctatcgccggtctcgaggcgctcaaccgcccctgcgagatcgaactctattcagattcccagtatctcgtcaacgcttttaaccagcactggatcgagggttggatcaaaaagggctggaaacgcggcaaaaatgaggaggttaagaatgtagatctatggaagcgcctgctcgctgccaaggaaccccatcagatttcgtttttctgggtgaaggggcataatgggcatccggagaatgagagatgtgactttttggctacttcggcggcggatggggacgagctgatggtggatccgggggtatagctcgttacagctcacacatgtgtgcccagtaacaggattttgccgatgcttcgcattctaaatcggcaaaatctgcattcggaactgtattgtacggaattttcagttcagaaaattcctacctgtgagcagttactataacaacccttacgatatgtttacatctttcgatcatctattttcaaaccgtcttaaatgtgctattttaaaattatcaagtgaacaggaatagcaaaggcggttgagagtaatttgaaaaataaaggaatgatcgctgccctcggtctgattctggtgctggggattgtgacgacggcggcaacgcggcgttatatccgggagcaggcgggaagtgagagaagcctgacggtcggaccggaggcgatgtatgaggcggaaccatttgcggcggaagcagcggaaaatggtctggcggaggatgcgccggagccatcttctaaaaaaatggcgcatgtggaaagcgtggggacagaagatagagcctgtatgcaggcggaaggagatgtttctgtccagtctttaggtgaacaaaaggaaaaacgtgcagataatcgggcggctgctaaggcggcagagaagcagagcgcgggcgatgagtcggatcattctgtgaatacaggggcggttgtgtccccggttgaaaatggaattgtatctcctgcgcgaggcgcgtcctccgggacaggtgcaggctcggaccggacagcggaagattaccggaaccggctgggcgagatcgagaatacgattcaaaacctggaaaattcgggaagtgcgaatacgaccgacgcgatgcgggaggcggtcgcgtatgagtaccggctctgggatgccgaattaaatcagatttatcaggcaatcatggcggtgcttccagacgaggagacagacacgctgcgtggtcgggaacgcagatggatccgggaacgtgatacggcggcgaaacaggcggcggagcgctacaagggcggcacgatggaaaatgtcgagtacacggcgtcgctggcaaattcgacgcgggatcgggcgtatgagcttttggatttgtatgaatcgtatcttccggcagagtagtgaaaaaattagaaaatgggacttttgcggcatatagaattgcggtaagggtcccatttttacacactttttgtacactttttgtaccgataaacctcttgcgaaatgtaaattcctatgataggatataaagaatgaggaaaattttacttaaatagaagtaactataggaggaagcaacgtgaaaaaatacggtgtgaacgaacttagaaagatgttcttagacttttttgagagcaagggacatctggcaatgaagagtttctctctggttccgcataatgataacagccttctgcttatcaactctggtatggctccgttaaagccatattttacgggtcaggagattccgccgagaacaagagtatgtacctgtcagaaatgtattcgtaccggcgatatcgagaatatcggtaagactgcccgtcatggtaccttttttgagatgcttggcaacttctccttcggtgattatttcaaagaggaagcgattcactggtcctgggaatttttaaccgaggttgtcggacttgatccggatcgcctctatccgtctgtgttcgagagcgatgacgaggcatttgatatctggaacaaagagatgggtattccggcagagcgtattttccgctttggcagagaggataacttctgggagcatggcgctggtccgtgcggtccgtgttctgagatctactatgaccgtggtgagaaatacggctgcggcaaaccgggatgcacggtaggctgcgagtgtgaccgttacatggaggtatggaacaatgtattctcccagtttaacaacgacggtcacggcaactacaccgagctggagcacaagaacattgataccggaatgggtctggagcgtctggcagtgatcgtacaggatgtagattccctgtttacggttgataccaacaaagctctgttagaccgtgtctgcgagctggcacataccgaatatcagaaagatcatgagaccgatatttctctgcgtattgtagcggatcatatcaagtcttgcaccttcatgatttccgatggcattatgccatccaacgagggacgcggatatgttctgcgccgccttctgcgccgtgcagcacgccatggtaaaaaacttggcatcgagggtgagttcttagcagctctgtcccgcaccgttatcgacctttccaaggatggttatccggaactggaagagaagagcgcgatgattttcaaggttctttctgaggaagaggataagttcaacaggaccattgatcagggtcttgcgatccttgctgatatggaagaagatatgaacaagaagggcgagaaagtgctgtccggcgacaacgcattcaaactctacgatacgtatggattcccgatcgacttaacccgtgagattctcgaggagaagagcctcggtatcgatgaggacggcttcaacgcagcgatgaaacgccagaaagaacaggcgagagcggcgagaaagacgactaactatatgggcgcggatgttacggtataccagtccatcgatccggctattacaactgagtttattggctatgatcgtctgacagcggaatccgagatttccgttctgacgaccgaggatgagattgtagaggcactgactgacggtcagactggtacaattatcaccaaggaaaccccgttctacggaaccatgggtggccaggagggtgacttcggtcagattaccgctccggacggctctgtgtttgaagtaaaagataccattcatttacagggtggcaagatcggtcatgtcggtgttgtagtaaagggtatgttcgaggtgggagaaaaagtaaccatgtcggttgacaaggaaaaccgtgaactgacttcccgcaaccattccgcaacccatctgcttcataaagcgctgcgtaccgtacttggtagccatgtagagcaggctggttccctggtaacccgtgaccgtctgcgtttcgactttactcatttctctgcaatgactccagaggagatagagaaggttgaaaagattgtaaatgatgagattgcagcatctctgccggttgtaaccgatgttatgtccttggatgaggcaaagaagacgggcgcgatggcactgtttggcgagaagtacggcgagaaagtccgtgttgtcaagatgggggatttctccaccgagctttgcggcggtacgcacgtatccaacacaggcacaattgcatccttcaagattctctctgaggctggtattgcagcaggcgtccgccgtatcgaggcgctgacctccaccggtttgatgaaccactacaaagaggtagagaatgagctgcatgaggcggcgaaactggcaaagaccactccggcggcactgagcagcaagattgagtccatgttagaggagatcaagactctgcacgcagagaacgagaagttaaaaagtaagctggcgaacgactctctgggcgatgttatgaaccaggtacaggatgtaaacggcgtgaagctgctggcagttgaggttaaggatgtagacatgaacggtctgcgtaatctgggcgatcagctgaaagagaagctgggcgacggcgttgttctgattgcatctactctggatggcaaggtaagcctgatggcttctgtaactgacggtgcgatgaagaagggtgcacatgctggaaacttaatcaaagcaatcgcaggtcttgtcggcggcggcggtggtggccgtccgaacatggcacaggctggcggaaagaatccgtctggtattgcagcagcccttgaaaaagcggcagaagtagtagcagagcaagtaaaataaaaaaatcataaaaatatgtaaaatgttgttgacgtatcatttttttatgatataatctttttagtgctaaaaaaatacccatacagttgtattaatatgcacttattacacaactggagggaggttaggtgtgagctatgtcaaatgtaatcgttaaagataacgagagtctggacagcgctttacgcagattcaaaagaaactgtgctaaggctggtatccagcaggagattcggaaaagagagcattacgagaaaccgagcgttcgtcgtaaaaagaaatccgaagctgctagaaaacgcaaatacaattaagtaacgcaaaagtcctggttttcatatgaaccaggacttttttgtgcaataggagaaagagaagaaatgcgatgtggcggatgatggagtgaggggcatgagagagaagcaggaaaatgagagacggggaaagggattgaaacaatatattgcggatcggcgcctggcagcagtcagccttgtgctgggtgttttgatggggctgatgattcttctgggaatccgttacagccgcaatgagctgatttaccggacggcgggtcagtttttgggacagttggcgggctgggtggcgtgtatgacggtgatggtctgggcgatttgtgtgagactggatgctttggggcgtggctggcctgagatacgggattttcagttcagaaaatttctgcctgtgaacagttaccagaaacggacgcaagcacggagggggaaagactgcgaagaccagggaagcagccgcgatgtggaaagccagggacgggaatcgaaacagcgcgcagcgaaaaattcggatttggggacatggctgaaatggatgtttctctcctggtgcgtctacctcccggtttttctggcggtttatccgggcatttattcttacgatgcgtccgcgcagctccttcagttttatggaaaactgccgctgacaacccaccatccattaattcacacgctatatctgggactctgcatgaagattgcggggcgtctgttccatacctatcaggcagggatggcgctgtatgcgctgtcgcagtcgttttttatgagtgcggtattttccctgtgtctgtgccggatgaaagcgcggcgggcaccgcgatggctctgcgttgcttcgtggacgttctggatcctgaatccgtatctgacggtcttttcctttgtcacgacgaaggatgtgctctttggcgcatttttcctgctggcatttgatgcggcatgttgtctggcggaggatccggagcatttttggcgggggatgtgccagaagaaagagaatttggataaagaaagagagctggataaagagaaaaatccgaatggaacaggttctcggaaagaagtgggaaagacgggtgattggctgctcttttttgtgagtgtgtttttcatgtgcctgttccgaaatcagggaatctatgtgttcctgttttttgttttggcagtctgcctgtttttacgaaaaaaagtgtatcgcagaaactggtttatcggggcatctctgctggtggcagctttatggtatgttttatccggtccgattccaacggcgttcggcgtgggaaagggcgatgcgagggagatgctgtgcgtgccgatgcagcagctggcgcgcatatatcatgaagtcccggagaaattggcaccggaggaaaaggaatatatcgagacgctgattgatccgcaggcgctcagtgagtatgttcgtgtcaatgcggatccggtgaaaagtgggtttcatacggaagtgatgcaggcagatatgggacgtttcgtgcggacctgggcggaaatcgggaagcgccatccggatatctatctggattcatttctgatgggaaactgggggtactggtatataggagacaatcagtactggatcagctatattttatacgacggggcgtacctggaagatgatttaaatatcctgcatatcacgcggaacagccattttcaggcgctttcggactggctgagggaggcaacgctgacaccggcattccagtcggttccgatgctgtcggtgcttctaaaccaggcatttccgttctggctgatgctgtttgcggcaggatttgcagtctggaagcgccgggcgtatgagatccttccgatgatgcttctgctgggctgctggggaacgcttctgctgggaccggtggtttccctgcggtatgcattgccgttgatttactgtgtgccgcggctgctggaaatgatagtgggtttgacgggaaaacggtaaacggcatagtttctgctttcctacatatattagataataacaatgaaataggcggtaggcgcttgtttggcagacagaaaaaagcgatcgtttcggcgctccatctgccggaggacgtcgttctcggagagatgcttctgtattttaccggcagtcgggcggctgtggtggaaaattacaggagcattctctttttttccgacgaaatgctgcggctgacgggaaagaacacccggcttactatcaaggggaaggggctttcgattgagtattatgaccgcgataatctgcgggtcacggggcagattgtgtctgtcgaatttggggtgctgtgaggaatgagtatggcgaaggtaagacaccttctacatgggatagtgcggcttaacatgcgcggcacctccccggagagattcctgaatctctgtacactggcaggtttaaatgtctggcaggtaaaaaaagagcaggcaaatctgctgttttatatggaaatccgcgattttaagcggtgtgcgccactggcaagaaaagcgggagtccgtctgcatatcgttgaaaagcgtgggctgccggtgtttctctggcggaaccggaaacggaaagggtgggcggtcagcttcgtccttttttttctgttattattgtttctggcacaatttatctgggagatcgactggagcggaaaccggcgttataccgaaagtgagctgaatcattacctccagacgctgcagattgaagagggaattcccaagaagcggatttcctgtgcgaggctggaggaagaactgcgggagtcatttgaagatatcacctgggtgtcggtgcgcctgcatgggacgcgcctttccatccgcctgcgggagagcgaggttccgatccggcaggaagtggagtccggcgaggcgtgcgatctggcggcggcatcagacgcgcggatcacgtcggtagtcgtccggagcggaatcccgcttgtgcaggcgggagatacggtggaaaaggggcagcttctggtgtcgggaacggtgcctatcacagatgatggaggcgaagaaatttcctcttaccgggtgcgggcggatgcggatatatatgggatccgggagcgggtcgggagaaaggagcttccgctctggagggaaatgcggacggaaatgggaaagaaacgatacggaattgctttggaagcaggaacacacacattttactggaaaattccagaattttatgatatgatagaacatacattcgatatggcggagcagtggggctttttcagacgaagcaggcggatgaaacctgcctggacgatccggacggagtaccggaaattgcggctcccgcttgatttttatctgccgctttctgtcgggtggagtgagtaccgggagacgtctgtctgcgaaaaaaggtatacagaaccagagcttgcggcgctgtcagcggcatttcaaaaggagacggaagaaaaattgtgcgaaaaaggtgtacatattatggcaagtgatggtagaatactaataaatggcggagtctgccattttgaggtacggcttcagacggaggagccgattcaagttgtgacacaaggagaacagcaaaggaatgagcataatagagacaatgattgatattccgatggagcatgagcggaatgtatgcggacagtttgacgcgtatctgaaaaagattgagcggacgctgcacgtgacgatgatcacacgcgacggcgcgctgaaaatcatcggtccggagcaggcgatccggcaggcgaagagtgtgttcaacaatctgttagagctttccaggcgcggcaataccattaccgagcagaatgttgattacgccctgtcgctgtccttcacggagaaggacgatcagattctcgagatcgataaggatatcatctgccggacgatcacgggcaagccggtcaaaccgaagacgatgggacagaaacagtacgtggacctgatccgcaagaagatgattgtatttggcatcggtccggcgggtaccggaaaaacgtatctggcgatgtcgatggcgatacaggcatttaagagtggcgaggtaagccggatcatcctgacgcgtccggcgatcgaggcgggggaaaaactgggttttctgccgggcgatctgcagagcaagatcgatccgtacctgcgtccgctttacgatgcgctgtatcagattatgggggcagaaagttacctgcacaattctgagaagggcttgattgaggtggcgccgcttgcgtacatgcgtggtcgtaccctggataatgcgttcatcattctcgatgaggcgcagaatacgaccccggcacagatgaagatgttcctgacacgtatcggctttggttccaaggtgattgtgacgggcgaccagtcgcaaaaggatctgcctgccggagctgcgtccggactggatacggcgattcatgtactcaagaaaattgacgatattggtttctgctatctgaccagcagcgatgtagtccgccatccgctggtacagaagatcgtagaggcatacgatgcgtatgagaaaaaagatgcggatgcgtcccgcgttttccggagaaataattccgggacgcgtgaccggaaagatggaggaagaaagaacagatgacaatccagatcgaatatgaagcagagcgggagtgggagatagattaccggccgatcatcgaggagatcgtggttgcggcactcgattatgaaaaatgcccgtatgaggcggaggtcaatgtagtcctgacaaatgatgaggagattcatcgtattaataaggaattccgaggaatcgaccgggcaaccgacgtcctctcttttccgatgggggattacgatgtgccgtccgattttgaacggttggaagagcagtcagaggactattttaacccggagacgggcgaacttcttctgggcgatatcgtgatctcgatcgataaggtagacgagcaggcggagaaatacggtcattctaaggagcgcgagctggcgttcctggtggcacacagtatgctgcacctgtgcggttacgatcatatggaagatgacgaacgccttgtgatggagaaaaaacaggaggaaatcctggctggcaaagggtatacgcgctaaaagcagggaaaagaaccggagggaaaggggagagcccatctgggaaatgaggcatatggggatgtgatgggggaagtacggaatgaaaaaaagcagttggaaaataagggcactggcactgactctgatggcagtctgctggctgtcaggctgttcggctcacaaagaaatatcggtaacggcagcagagacacaggaggagacacgtgagctgtccttaaatacagagacggaggccgaaacgcagccggaagcagagccggagggacgttacgaaaaagacgggaagatacagagttatctgaccggggaatggacggatgtcgcaaaggcgaaccgccgtccgctcgcaatcatgatgagcaatgacaaggcggcgcttccgcagtatggcatcaaccatgccggagtggtctatgaggcaccggtggaaggcagcatgaaccgctatatggcactgatagaggactatgacgatctggaccggatcggttccgtccggagctgccgcccatactatactttttttgcaagggaatttgaggcggtctatgcacattatgggcagaatacgtttgcacttccgtatctggagcagatggaacatttagatggaatcaaaggcaatggggcatctgcgtatttccggaccaaggatcggaagaccccgcacaatgcctatgcatcgggaccaaagctgcgccaggcgatcgaggcgagcggttatgcggatgcgtacccggagagctatgaggggcattatacttttgcgccggagagtgcgccggtgtgctttgaggatggtatcgcagcggccaaagtagtgccaggttatcagttaagcaatccctggtttgagtatcacccggaggacgggctgtactaccggtatcagtatggcggtccgcatatgggagatgccggacagatagcggttaaaaatattattttccaatactgtttgtggaaatattataaaccgacggaatatctgaatattgatgtctatacaccggcgatggggtattattttacaaatggacacggcattctgattcgttgggaaaaagacggcgcttacggcgtcacaaagtattacgatatggacggtcaggaaatcaagctgaatccgggcaagacctgggtctgcatccttccgaatgaccgtatggataaggcggaattctatggagaacagacggagtagaagaaaacccggaatgcgggaagagacagaaagagagataatcagccggcagcgcacggcaggacgtagagaagaagcagctggaggcagccgggaaagtgcgggcagaagccgtaatcggtcaggaagcagccggaagccggaagcggttccggtgaggaaagaaaattttgtcattcagggtacgatcctggcagttgccggtatcattgtgcgtctgatcggtattctgtaccgcgtcccgatgacgaatatcatcggcgatgagggcatgggatattattcgacggcattcaacgtatataatatcatgctgatcctttcatcgtacagtctgcctctggcggtgtcgaagatggtagcggcccgccttgcgaaagggcagtaccgcaatatgaaccgtgttctgcgggcggcgcttgtctatgcgacggtcgtaggtggtctggcatgctttattacctggaattttgcaggcttttttgcgacgaccttgtttaacacgccgttctgcgtgtatgcactccgcacacttgcgccaacaatctggatcatggcgtatctgggcgtcttgcgcggttatttccagggacatggaacgatgattccgacggcgatctcccagatcctggagcaggtggtcaacgcgattatcagtgtggtggcagccagcgtccttttcaaggtgggactggatacggcgaaagtatatgggaaagatggatatgcacaggcatttggtgcggctggcggtacgatcggtacaggaagcggtgcgtttgcagccctgttatttgtgctggtattgtttttactctaccgtccgacggcaaaacggcggattgccaaggatcggagcggtagtgtggattcctaccgtcagatttcgagaatcttcttctttaccgttattccggttatcgtaagctcgggtgtttacaatattaactcggttattgacaacggtatcatggcgcacggcatggagtcgctgggacgcggcaaagagtttttagccctctggggtatctacaacaacaaatatatgctgctggtacacgtcccgcttgcgatggcgaactcactgtcctcgtcgctgattccttcgctgtccggtgcaatagcgcgtaaggatcgaaaggcggcgattgagaagacagcccttgcgatccggtttgctatgctgattgcgattccgtcggcggtggggctgacggtactttcagcaccggtcaataacctgttattccggggcggaaacaatgcggaagcgatccgtatgatgatgattggcgcttcagccgttatcttcctgtcgctttcaacggttaccaatgcaatcttacagggacttaaccggatgaatgttccggtgcggaacgccctgatttcgttggcattacacgtgattgcgctgtatattatgctgatgatcttcaatatgggtatctacagtatggtatttgcaagtattttatttgcgctctttatgtgcattttaaatgcgatcgcgatccgcaatacactcggttaccgccaggagatggtcaagaccttcctgctgccggcgatcagcgcagcatttatgggcgcggcggcatatggcgtgtaccgtggggttacgctggtgatccacagcaatgtgctgggaacgctgctggcggtgcttgtggcggtcgcggtatatggcgtgcttcttatcaagctgcactgtatcgaggaagatgagatgtattcgatgccgatgggacggaaactcacacgcatctgccggaagctgcatctgatgtagggttagaaatttagttatgattaaaatttagaaaaaagtgaataataaggatacacaacaggaggtatccttattatgagaaaatatcagggaatactgtttgcggcgcttttttgttttgcaatgcttctgcttctggcggcagggctctggtggtatcgtccaaggcgggcggaaccggtaccggggcgcgtgtatgagtcagagcggatgccggagaataatgcggttctgaacccggaaccggaagtggcggagaaacaatccggctattgtctgacggcggaggatgggatgctgcttatctttgacggagcaagcggcgaagtctgtttccagacccatatgccgctctcagaattttccgtggaagaacaggaaaaactgctggaaggagtctggttcgacacaatgacggatgtgtttcactatctggagtctttcagcagttagatgtgattataatacagtcaaaaaacaaagaataaagtccgcgtatgaacggtacgaagcaaacggtcaggaagggaaatagggatgagtcagaataaagtaatcatagtgggagcaggagcagccggaatgacggctgccatttttgctgccagggagggcgcacaggtggttctgctggaacataaagaccgggtcggcaagaagatcctgtctaccggcaatggacgctgtaacctttcaaaccgtttgcaggagccgttctgctaccgcagtggtcagccggattttccatggaaggcgcttggggcgtttacgcttccgatgacactggaatattttgaggatctcggcgttttgacgcgggaacgggacggatatctgtatccatattccgggcaggcaagcgctgttttagatgcactccgtctgggacttgcgcgggagtcggttcaggtggtgacggaatgtgaagttttctcgatcacgccgcgcgaagatgcgaaacaccggtttgaagtgaagacgtcccaggggagcttttcgggcgagacgctgattctggcgtgcggcagcaaggcggcaccgggtacaggttcggatggaagcggatataagctggcgaaacggctgggacaccatatcatcaagccgcttccggcactggttcagcttcgttgcccggaaaagttctttaaacagctcgccggagtacgcgcggatgcctctgtgatactctacagcgatggcagaaagctggcggaggacaagggcgaggtgcagcttacggattatggtatttcggggattccggttttccaggtcagccgctttgcggcgcgcgcgctcgatgagggacaggatgtacgggcggtactcaatttttatccggaatgcccggaaacggagacacgccggatattaaaagagcggagtgagcgcctgaaagaacggcaggtggaggactttttttccggctggatacataaaaaactggcagctctgtttttaaaacaggcaggaatccggccagatcggacggttggcagcctgacagaggcacagattcagacgctgggggatctgctctgccggtttgaggtcagcgtgaacggtacaaattcctttgaacaggcacagatctgctgcggcggcgtcgatgtgcgggaggttgacgcacagacgatggaatcgaagaaggtaaaaggattatattttgccggggagattctggatgtcgatggcatctgcggcggttataatctccagtgggcgtggagcagcggtgcagcagctggaaaatgtgctggaagggagtcagataaatgatacgagtaaatcaggtaaaactgccggtcagccacagtgaggcagatcttcgcaagaaaactgccaaaatgatgggagtatcggcagatcagatacagtcggtggagctggtgcgccagtctctggatgcgcgcaaaaagccagatctgtactatttatatgcattagatgttgcagtggcagggaaagaggcggcgattgtcaaacgtgcgcgcagtgtaaatgtgcagatccgaaaggaagaggcgtaccgcctgcccgatccgggaatagagccgcttcgggaacgaccggtaatcgtgggctttggtccggcaggtatgttttgtggtctgatgttggcgcgtgccggatatcgccctcttattctggaacgggggctggatgcggacagccgtgcaaaggcggttgcacgctattggacagatggaacgctggatccggagtgcaatgtgcagttcggcgagggcggtgccggtacgttttcagatggaaagctgaatacgctggtcaaggatccatctgggcggaataaggaagtgctgaaaatcttggcgcaggcgggcgcggatccgacgattacctatgtgaacaagccgcacgttggaacggatgttctgcggacggtggtaaagaatattcgaagtgagatagagagtctgggcggtgaggtacggtttggctgccgtctggaggactttgagacacagaatggtcatttgtgttccatccgcgtcagtgcccgtaaaggcacgtcggaggcaggacggacggtggaggagattccggcatcggcactggtgctggcgatcgggcatagcgcccgcgatacgtttgcgatgctggcagagaaaccgctcgacatgcaggcaaaggcatttgcggtgggactgcggatccagcacccacagacgcagatcaacttaagccagtacggacgggaagaagccgggaatctgggggctgccagctataagctgacggcacagacctccggaggcaggggcgtgtattctttctgtatgtgtccgggcggctttgttgtggatgcatcctcagagccgggacggctggcaatcaacggcatgagcaaccatgatcgtgccggtgcaaacgcaaacagcgccctgattgtgaccgttacaccggaggattttccacagccgggtacacttggcggcgtgacgttccagcgtcaactggaggaagcggcataccgctgcggcggcggaaaaatcccggtacagctttatggagatttccgggaaaaccggatttcaacgggatttggagcagtgacaccacagtttgaagggcagtttgcatttggaaatctgcgggaggtgctgccggaagcgctttcggcagcgatgttagagggaatggaacattttggacatgtgattcatggctttgaccgtgaggatgcggtttttgccggagtagagagccggacctcctcgccgctgcggattccgcgtgaccacgcgacgatggagagcagcacgatcgcgggcatctacccatgcggcgaaggcgctggatatgcgggcggcattacctcggcggcgatggatgggatgaagacggcagaggcaattatcgcgaagtatgctatcccccaaattaaattgtgagagagaatggttcagcggctttaggctttatagtaaggatgtctgcctgtagctgcgaagaaacaagcattataagaggagaaatgatagatgaaacaggaaagaattgaccgtattaatacgttatatcataagagccaggcagttggattgaccgaagaagagaaaaaagagcaggcagcgcttcggaaggagtacattgagtcaatccgtggaaatatgcgaggacagttaaattcgatactgattaaagagaaagacggttctattacggatctgggtaagaaatacggcggcgttacggatacgaagaattaattgaagggtagaagagatggttattcattcatctggatcgcagatatcaaaacaggagattcgcgcatatgtccttcaaaaacgccggactctgctgccagaagaacaacaacgatgggatgaggcgttgttagaacgtctccaccccctctttccatcagccgggacggcagtgtatgcctatacgagtgtgcgcggtgaggcaagtacggaatatttgattgacgagctgttaaagcgcggctgccgggtagcgctgccgcgggtgtttgggcgtgagatgcgttttttctatgtcacagatcggagccagcttgtggcgggggcatatggcatcccggaaccggcggacggatgtcaggaggcagatgcgccgaaagcgctggtgatcacgcctggcgtggggttttccaaggacggaaaccgcatcggttatggggcggggtattatgaccgcttttttgcggcagaaccggaccatatggcggtggggatctgctatggattccagttgtttccggcatttgaaaccgaaaagcacgataaaaaaatggcatatattgtgacaccggagcagacaattaaagttttgtaatgtctggcgcactcgcgcgaagcagaaacatatcaaaggcatacaggaacagagcagccgtgtggtaaactctgtttttgcttccagatacatgaaccggaatattttgtaagaaactggaaaggattctggcaggaatgggacttgcgaaaatgagcgccatatagtaatattatctaatgtatgaaatattaggattattaggataatgaaagaatagtaaggagcaatacaatttatggatttacatacaaacgattcgtccgaatccgcagcaggcgtgtttgtgtctgacaaatgtcagattccggtgggcggtataccgcagcaggaaccggatcgccagcagtattatatggcactctgccgccagaaggtacaggagatttcggacaaactggggcgtccgctgacctgctttatctcgacgttcgggtgtcagatgaatgcacacgattcagaaaagcttctcggtattctgctggaagcaggatttgtggaaggaaccagtgaggaatcggatttcgtcctctacaatacatgtacagtccgtgaaaatgcgaacctgcgcgtgtatggacgtttagggtatcttcacagtctcaagaaaaagaatccgcacatgatgatcgcactctgcggctgcatgatgcaggagccggaggttgtagagaaattaaagaagagctaccgctttgtggacttgattttcggcacacacaatgtatataaactggcagagctgctggaacagcgctttgagacggggaagatggtcatcgatatctggaaaggaactgataagatcgttgaggatctgccgtcggagcgcaaatatacatttaagtctggcgttaatatcatgtttggctgcaacaatttctgcagctattgcatcgtcccgtatgtgcgcggacgcgagcgcagccgtgcgccggaggacatcatccgtgagattgaagagctggttaagaacggcgtcgtggagatcatgctgttagggcagaatgtcaattcctacggaaagaacctggaatctccaattacctttgcagaacttctgcgccgggtagagcggattgaggggcttaaacggatccgtttcatgacctcccatccgaaggatctgtcggatgagctgatcgaagtgatggcatcttccaagaagatctgccgccatctgcatctgccgcttcagtcgggcagcagcgagatcctaaagaagatgaaccgccattacacgaaggagcagtatctggaactggcagagcgcatccgcaaggcggtaccggatatttccctgacgacggatatcatcgttggatttccgggagagacggaggaagatttcgaggagacactggaggttgtgcggaaagtccgctacgacagtgcatttacctttatttattcgaagcgcaccggaactccggcggcagcgatggaaaatcaggttccagaagaagttgtcaaagaacgtttcgaccgtctgctcgcagaggtacaggcgatttccgcacaggtctgtggacgagatgtccatacggtgcaggaggttctggtggaggaaccggacagtcacgtggagggactggtaaccggacgtatgtccaataacacaatcgttcatttcccaggtggaaaagagctgattggtaaaattgttaaagtatatctgaaggaatccaagggattttactatatgggatccctggtagattaaggaggataaatttatgaaaaagcattataaaggattgacggttctgctgtcagccttcatgctggcaggaagtgcttccgtcgcatatgcaggaccggcagatgacattgcaaacggtacagtcggtatgccaaacaccggttcgtcaacatcggcagagcagttcaaccagggaaccgggcagcaggatgagaacacggcacttcatgtcggcgtcaattatctgtataatgcggaaggcgatatttctgcatttgcgatggatttgaaaaactttgaggggatcggcggcgtgtcctaccgtgcatataccaacacaggcggttatctgtggtggtaccatgacggcatccagaccggtgtggttggttctggaagctgggtagaggcgatccagattcagctttccggtcaggctgagaagatgtacgatgtttactatagcgttacatccagtggtcagggcaagatgggatatgcgaagaacggcgaagtggctggtaccgtggatatcggcgagaagatcctttcgattgaagtcgtattagttccgaagggaagcgcaggtccgcagagtgcagcaccgcgctacaaatcagctgcttccagcagactgagcgtagcagaaaatgcaacggttatgttcaatgaggacggaagcgtatataacggctggctttccgatgactttgtacgttattattttgaaaatggctacgcaaagaccggctggcagtatatcgatggttacaagttctactttgactcctgcggtcgtctggttcaggatgtagacagcctgattggcaagcagtccgattatctcctgaaggtaaataagacactgaactgcctgacggtttatgcaaaagacggcaataacggatatattattccggtgaaagcgatgctgacctccgtcggtgatgatacgccgattggaactttcaagacaccggagaaatatcgctggagactgatggtaaatgatacttacacccagtatgcaacccgtatcacacagggattcctgttccattcgattacatacgcaaccccgaatgagaataaccttctgaccgtcggctataatggtctgggtgtttcccgttctttaggctgtgtacgcctgaactgtagaaactccaagtgggtatatgataactgccatctgggaacgactgtacaggtatacgaggatgccaatgtagcatctccatttgataagccggagctggtaccgatctccgatcagcagacctgggatccgacggatccgaaattcaactaaaataaaacgacagcggtctgtccggcctggcattcagatgagtgaagtgccggaaaacgggcggatcgcgatgaagagaggtaaattgtggcactttcaccaatgatgactcattatctggagacgaaaaaacagtatccggactgtattctgttttatcgtcttggcgatttctatgagatgttttttgaggatgcccagactgtttcgaaagaactggaacttaccctgactggaaaagactgcggactggaggagcgcgcgcctatgtgcggcgttccttatcatgccgtagagggttatttgagccgtctcgtccagaagggctataaggtcgccatcgcagagcagatggaggatccgaaacaggcaaagggacttgtaaagcgggaggtaatccgggtggtgacgccgggaaccctgacaaattcacaggttctggaggaatcaaaaaacaattacctgatgggaattgtatacatagacggtgtattcggcgtttcgacggttgatgtcagcacgggcgactatcttgtgacggaggttcgcaacgagcgcagtctgttagatgaaatttataaattttcgccgtcggagcttatctgcaacgaggctttttacatgtcaggaatcgatttagaggacttgaaagtacggttaaatgccgtgatctcagcacttgaaaatcggttcttttctgatgattcctgccggagaatcctgcgggaacattttcatgtagagcacctggaagcgttgggactggcggactatgagacgggcgcgattgcggcgggcgctgtcctgcagtatctgtatgagacgcagaaaaatacactggaacacctgacgcgcctgactgtctatacgaccggacagtttatgatgctggatacgtccacgcgccggaacctggagcttactgagacgctccgggaaaagcagaagcggggcacacttctctgggtgcttgataagacgaaaacggcgatgggcgcccgtatgctgcggacacttgtggagcagccgctcatcagccgggaggagatcctgcgccgccagaatgcgatcgaagagctgaacatgaactatatcagccgcgaggagctgtgcgaatatctgaatccgatctacgatctcgaacgtctgatcggacgcatcagttaccggacggcaaatccgcgagatctcatcgcgtttggcaattcactggcgatgcttccgtatatcaaacagattttgaaggagttttcaggcgagctgcttaaaaacctggaagccgctctggatccgctggcagatttgaaggaactgattgacaaggcgatcgtggaagagccgccgatcacggtgcgcgagggcggcatcatcaaggaaggctaccatgaggaggcagaccgtctgcgtcatgcaaagacagaaggaaaagactggctggcacagttagagcagagcgagcgcgaaaagacaggcatcaaaaacctgaaagtcaagttcaataaggtatttggctactattttgaggtgactaattcctttaaggatctggtgccggattatttcatccgcaaacagaccctgacaaacgcagagcgctatacgaccgaccggttgaaagagctggaagatatcattctcggcgccgaggacaagctggtttctctggaatatgatctgttctgccaggtgcgcgaccagatcgcgggcgaggtaaaccggattcagagtaccgcccgtgcgatcgcgatgacggatgtgctggcgtctctgtcggtggtggcgacgcgttacaattacgtgaaacctcatatcaacgaaaagggcatcatccgcatcaaaaacggacgtcatccggtcgtagagcgcatgatgggcggcgagatgtttgtcgccaatgacacatatttagacaacggaaagaaccggatttcgatcattaccggtccgaacatggctggtaagtcaacttatatgcgtcagacggcgctgatcacgctgatggcgcagatcggaagcttcgtcccggcggatgaggcggatatcggtctctgcgaccgtatttttacccgtgtgggcgcttcggacgatctggcatccggtcagagtaccttcatggtggagatgaccgaggttgcgaatatcctgcggaatgcgacgaaaaacagccttctgattctcgatgagatcgggcgcggtacgagtaccttcgacggcctttcgatcgcctgggcggttgtggagtatattagtaatacgaagattctgggtgctaagacgctgtttgcgacacattaccatgaactgacagagctggaaggaaccttaagcggcgtcaacaactactgtatcgcggtcaaggaacagggcgacgatatcgtcttcctgcgtaaaatcgtgaagggtggcgccgataagagctacggcatccaggtggcgaagcttgcaggcgttccggctccggtcatcgatcgggcaaaagaactggtggaagagttgagtgatgccgacattacagcgcgtgcgaaggagattgcagaaaatggtccgggaacccagacgcgcaaaaaggtggcaaaaccggacgaggtagatctgcagcagatgtcaatctttgacacggtcaatgaggacgatatcatcaaggagatcatggaactggaagtaaaccggatgtctccgctggatgcgctcaatacattagataagctgcaggcgaagctgaaaaaccggtggatgcaccagtaaaaaagagtttaggaaggatgtggaggagatagatggctgcgattcaggtcttggattccaatacaatcaatcagattgcagccggcgaggtcattgaacggccggcgtcggttgtcaaggagcttttggagaatgcgatcgattcgaaggcgacggcgatcacggtggagattcagggcggcggtctgcagacgatccgggtgacggataacggaagcggcattgtgcgcgaggagatcccactggcatttaagcgccatgcgaccagcaagatccggacggcgtcggatttgtttcaggtggcatcgttagggttccgtggcgaggcgctggcgtcgatcgcgtcggtggcgaaagtggaactgatcacgaaaacaaacgattcgatcagcggttcccgttaccgcatcgagggcggcgaggaactgggactggaggaggtcggtgcgccggaaggtacgacctttatcgccagagatctgttctacaatacaccggtacgccggaagtttttaaagacgccggcgacagaagggtcccatgtggcagatttagtcgaaaagattgccctgtcgcatccggaaatctccatccgtttcatcaataacaaccagagccgtctccatacctctggaaatcataacttaaaagatataatttatgcggtctttggacgcgagatcacggcaaacctgattgaggtggatgccggagctgatccgatccgggtaggcggcttcatcggtaagccgctgatcgcgcgcggcaaccgcacgtatgaaaattatttcatcaacggacgctatatcaagagcagtatcatcggaaaggcgatcgaggacgcatataaaccgttcatgatgcagcacaagtatccatttacgatgctgcaatttacgatcgatccgtcgtatattgacgtcaacgtccatccggcgaagatggagatccgtttcagagacggcgaacagatctaccggacggtctaccatacgatcgcgatggcactcgctaaccgggaactgattccggcggtttcgctggagaatgagaagaatgcagagaaagaactgaagattctggggttggaaaagggagtgctgccggagcttccaaccagaaagatggaaagcagccagggcagccgtccgtccttaaaaccggtccgtatccgtgaggaacatccggaaccgtttgagacgaaacgtctgggggcgtcgcaggcagaaatgatgtcgctctcggaagatatgccgggatatggggctgaaaacggcagcggatcaaatgcggctgtgtcaggaacggggcggttcgatgaagtgtttggaagaaccgacacaaccggcagagttgaaaatgtttcaattaatacagagtcagatctgccagagccggccacgtcagcgccttccagcgaatccatctcagcttcagcggggcaagctgcatctcctgcatctgtttcaacgggaacgacccagtccgccccatctgaaaagccccgtcagatggatctgtttgaagataaactcctgaccaaaccggcgcgtgcgaaccaccgcctgattggacagctgtttgacacatactggctggtggagtatcatgataatctgtacatcattgatcagcatgcggcgcatgagaaaatcctctatgagcggacgatggcatcccttcaaaagagggagtacacctcccagatgatcgatccgccgatcattttgagtctcaacagcagtgagcagctcaaattagagcagtatatggaacattttacctcgatcggatttgagattgagccgtttggcggcaaggagtacgcggtgcgtgccgttccggcgaacctcttttccgtcgcaaaacgcgagcttctgatggagatgatcgacgatctggcggagggcaatggaagcggaaccccggatctcatcaatgagcgtgtggcgacgatgtcgtgtaaggcggcggtcaaaggcaatcacacattatcatttgccgaagcggacaagctgatcgatgagcttctggaactcaaaaatccgtatgcgtgcccacatggacgcccaacgatcatatcgatgagcaaatatgagttggagaagaaattcaaacggattgtataacccattaaaaggagagaaagtcttatgggaaatctggaacaagcggctgaaaaaaagcctctgattgtcctgaccggaccgacggcagtcggaaaaacggcgctatccattcagcttgccaggcggatcggcggcgagatcatcagcgcggattcgatgcaggtgtaccgccacatggatatcggtacggcaaagatacgcctggaggagatggacggtgtgccgcaccatctgatcgatatcttagagccgactgaggatttcaatgtcgtgcggtttcaggcgcttgcccgcgcggcggcggaagatatttacagccgcggaaaaattccgatcgtggcaggtggaaccggcttttatattcaggcactgctcaatgatattgatttcacccagatcgacgaaaatacgcagtttcgggaggagatggaacgcctggcagacgaacagggagcggaagtcctgcatgagcgcctgcgggcggtcgatccggaatcggcggaggcgatccacgcaaacaatgtaaaacgagtgatccgagcactggaatattatgagcagacgggcgagaagatttctgcccacaatgaggcggagcgggcaaagacttcaccgtaccatttcttctattatgtattaaataccgatcggacggttctctatgagcggatcgagaagcggatcgatgagatgatggaaaagggactggtcgaggaagtgaggcagctgcaggcgatgggctgtcgccgtgattcagtggcgatgcagggacttggatataaagaaattctggcatatttaaatggcgaaatgtcgttggagacagcggtcaatatcctgaaacgcgatacgcgccattttgcgaaacgtcagcttacctggttccggcgggaacgcgacgtgcgtttcttatatttgccggaatttgataatgaccgggaacgcgtgctggaacatattctgcaggaattagcggcggaagcgggtattatggagtgtgattcataagatggatggaacactctaaattataagttgtaaaaatcaagaaaagttaaagaaacaaaaaaagaattatagaataaccgtaactgttcagtaggtctgcgcatttactgcgctgaccgtacgaaaacatgggtcagcaggcaaaaatcccattgccgtaggcaatttttaatggatttttgcgcgtgactgtgaaggtactgaacagttacgaataaccgacaacaggaaaggaaccaccatggagttagagaaaatgtatggcgacctcggtatttcgaaagaagtgcttgaatatggagccagaatcgaagcggctctggaagaccgtttcacagagatcgatggcaatgcagagtacaatcagttaaaggtaatcgctgcgatgcagaaaaaccgcgtcagcgatattcatttttccggtacaaccggatatggttacaacgaccttggacgtgagacgctggaacaggtatatgcggatgtattccacactgaggacgcgctggtgcgcccgcagatcgtgtgcggaacgcacgcgctctacacggcattagccggaaacctgcgcccgggcgacgagctgctttcgccagtgggaaaaccgtatgatactctggaggaagtgatcggcatccgcgagtccaacggttccctgcgggagtacggcatttcataccgtcaggttgacctgctgccggacggaaccttcgattacgacggcatccgcgcggcgatcaacgagaagacaaaactggtaaccatccagcgttccaagggatacgcatcccgtccaaccctctcggcagagcagatcggtgaactgattgcatttgttaaatccatcaaaccggaagtgatctgtatggtagacaactgctatggcgaattcgttgagcggatcgaaccgagcgatctcggtgcggacatggtagtcggttccctgattaaaaacccgggcggcggactggcgccgatcggcggctatatcgccggaaccagacagtgcatcgaaaatgcagcgtaccgccttggttctccgggactcggacgggaggtcggcgcgagtcttggcgtcaatcagtccttcttccagggacttttcctggcaccgaccgttgtatccggcgcattaaagggagctatctttgcggcaaatgtctatgagcgcttgggctttgatgtggttccgaacagcacggagccgcgctatgatatcattcaggcgatcacgtttggaaaaccggagggtgttattgcgttctgccagggcattcaggcggcggcgccggttgacagctatgtatcgccggaaccgtgggatatgccggggtatgattcccaggttatcatggcagccggtgcctttatccagggttcctcgatcgagctttccgcggatggtccgatcaaaccgccgtacagcgtcttcttccagggcggactgacctggtaccatgcgaagttaggcattttaatgtccctgcagaagcttctggatgcaggcatagtaaaacctgagcagctcaaaatcgactagaaatgacgttttttgaatgattttgtaattgattttaagaaaactttaaaaaaaaatctgccggactgcctatacacattccggcagtttgtgctaagataataaagattatagaaagggacggtattcggtatcatgaatcgagcaaaaaatttctggattcttctgctgctcctgatgacagggattgtgttaggtggatttatcggaaatatggcatccggcatcaggggactgtcgtggctgaattacggacaatccttcggtctgatggacccggttgttcttgatttaggaatcctggttatcacgtttggtctgtcaatccgggtgacgatggcgagcatcatcggcgttgtcattgcactgatcgcatatcgtctgatttaatcaaagaatcccgcctggcgggaatggctttctgtatgcagaggagaggcacgcaggaggacaatcaatgaaaaaagaaacagagaaaccagtaaaaagttctgaaccgaccgctggatggcgtcttaccatgaaagatatccctgaaaaagaccgcccctacgaaaaatgtgagagggagggagttggggcactgacggacgccgagcttttagcgatccttatccggaccggaaaccggcaggagtcggcactttccctggcaacccggattctggcgcaggcgcagccgccgggaattttagggcttttgcatctgactcttccagaactgatggagcagaaaggaatcggcagagtcaagggaatcgaacttttgtgtgtgggagaactgtcacagcggatctggcgcaccttgacgctttcagaagcgcctgcgtttacggcgccggaggcgatcgccgctttttatatggaggaaatgcgtcacaaagagcaggaagagatgcacctgatgatcctcaatacgaagcagaggctgattcgggatatcctgctgtttcggggaaccttcaatcactctccggcgtctccgagggagatatttatcgaggcgctgcgctatcatgcagccagcatcgttttagtacataatcatccgagcggggatcctacccccagtgcggaggatcggcggacgaccgtccggattcaggaggcgggcgctatgctgggaatccggcttttggatcatgtgattatcggcgaacaagcctattttagtttcaaagaacggggaatactatcattatgaaaaacagcaagtatattctggcaggtatgtcagccttctgtcttgtgctgattacagcaacgtctatcaaatcaagctttctgatgccgcttcggacgggtgtcggttttgttctggtaccgctgcagtcaggcgtcaacgcgatcggcacaggtctctacaatgcgcttgaaaatttttcctccctgcgggaggcgcaggaggagaacaagaatctccagatgcgtctggatcagatggtggaagagaacaaccgcttgcagtcggagctttacgagttagaccgtctcagagagctgtatcagcttgatcaggaatatatgcagtataaaaaaatagccgcccgtgtcattgcaaaggactctggaaactggtttcaggtattccggatcgacaagggagcggacgatggcatccaggaagatatgaacgtcatggcaggcggcggactggtcggtattgtaaccgatgtcggggcaaactatgcaactgtccgcgcgatcatcgatgacgacagcaacgtcagcggcatgtccctgcggactggcgatacctgtaatgtatccggcaacctgacgctttaccaggatggacggctgggacttgaccatatcaagaaagaggcagatatccaggagggagacaagatcgtgacctccaacatcagtgatattttcctgccgggcattctcatcggttatgcctccgggctgacgaccgatgccaacaacgtaacaaaatccggtacaatcattccagttgcagattttgataacctgcaggaggtactggtaatcacccagctgaaaaatggggatggaggcgacaataatgcggaagctgctgattaaccttgtcatgctgattctggcattcacgatccagatctgcgtgttcccacagatcgccttcttatcttcggctccgaacctgctgctgattgtggtgtttgtgtgcagcttcatcgaggggcgcgagcgggggatgttctacgggctggtggcaggtctttttatggatctgttttacagtggaccatttggcttttatacactgtttttcatcaatctggggtatgtcagtggaatctgcaacaagtattattatgaagactacatcacgctgccgctgcttttgagcctggcaagtgatttaatctataacctgtacatctatgtattccggttcctgatacggaatcgtctgaattttgggcattatctggtctccatcattatcccggagatcatatttaccacggttacgacgcttgtcgtataccggtttttcctttttatcaaccggaaactgaaagaatgggaacaaaggagagattcgaacattgtttgatgacctgaaagaatatctgcgagaatggttcaaaaaagtgattacctcccggctttttgtcctggcggttgtgttctgcctgatgtcgtccgcattggtgatgcggttgttcaacctgcagatcatcaagggcgaagagtatcaggatgcatatacagcgatgacggaaaaagtcataaagactgccagcacgcggggtaatatctacgatcggaacggcaatgtgctggcgtacaacgaactggcatacgacgttaccatacaggataccggtgcgtacaagacggatgcacagtggaacacgatgctctacgatctggtatcgatcttgaataaacacggtgagagcgcacagaccagtttagagcttacgctcgatcacgatggaaatgtcgtgtatacctccgagacacagtccggacgcaagcgattcctgcgtgattattatggtcttaaaaatgtggatgagatggacgattcagatggaaaatacccgtccgacatttcagcgccagatctgctggagcggatgaaaaaggagtaccacctgacactcggtgacgataagaaccgggacgggcgcccgcttgacaaagacggcaatcccatcgatgtttcggatgaggtggcgctgcagatcgtcggtatccgctacacgatgcgttttaccgcgttccagaagtacgaatctacaacgatcgcgacggatatcagcgatgagaccgttgcagacattttagagcacgcagccgatctggtgggcgtcaatatacaggaatcgacgatccgtgtgtacaatgaaagcatctactttgcgccgatcattggatatacgggaaaagtaacgagcgaacgtctggaggagttaaagacggtcaacgatgactatgagttaaatgatgtcgtaggccgtaccggcatcgaatcctcgatggagctggaattaaagggtaagaaaggttcccagacggcatatgtagataacgtcggaagaatcctaagcgtgaccggggaagtcgcaccggtggcaggcaacgatatctggctgaccctcgatctgaaccttcagaagggtatttaccacattctggagaagcagctggcgggcgtcttgttaaagacgattgtcaaccaggatgagaaagatatcgcttatatcgattcttccagtattaagataccgatcaagaaggcatacttccagctgatcaacaacaacgtcctctcgattgacaatttcgcttccgaagaggcatccgatgtggaacagcagatttatcagaagtacgagagctcacgcgtgcggattgaacaggaactgcggggtgaactgcagtctgaaaatgcaacgccgatgaacgcgctgtcagaggaaatgcaggcatatatgcagtatatctattcgtatctttcttccagcaataaggcgattgtccagcgtgatgcgatcgatacgtccagtgacatgtatcaggcgtggaagaacggtacgatcagtctgcgggaatacttatattatggaattgccaacaactggatcgatacgacgaagctggacatacagagccggtattcgaatgcggacgatgtcttcacggcactgctggacgactgtttccgcgatctggaacaggatccggcattcgagaaactgatttatcagtatttaatcaataacaatgttgtgaccgggcgcgagctctgcatggcgctctattcccagaatgtgcttgcatacgatgagaatgaggtcaacctgctgcgtgtcagcggggaagaatatgcgtaccagttcctgatgaataagatccgcaatattgagatcacaccggcgcagctggcacttgacccgtgtacggcgagctgtgtcgtgacgagcgcgaagactggcgaggtgctggcactggtatcttatccaagctatgacaacaaccggatttcggacagcacctattttgcccagctaaatgccgatcagtcgctgccgctgcgaaacaatgcgacgcagacgctgaaagcaccaggctccacctttaagccgatcacggcgattgcaggtctggaagagggggcaatcacgctttctgatatgattaactgtaccggtatttatgaggaagtcagcaatccgatccgatgctggaaatatccaggcttccacggaccgttaaacgtcgtgggaggtatcgaaaattcctgtaactatttcttctcggaggtggcgcaccgcctgtccacagagacagatggaagctacaaaccggagaaaggtctggagacgctgaaaaaatatgcgaccatgttcggtttggaccggacttcgggcattgaaatctcggaggcgacgccgtcgatcagtgataccgatccggagcgttccagtatgggacagggtacgcaccagtttgcgagcgtgcagcttgcccgctatgtgacggcgcttgccaaccgcggcacggtctatgatctgagcttgattgataaggagacggattcccagggtaatctggtcaaggattattcgccggctgtggcgtcaacccttgatttccagacaagcacctgggatgcagtccaacaaggtatgcgccaggtagttaccaacagttcgaccaagcgcgtgtttgatggtctggacgtacacgtggccggtaagaccggtacggcgcaggagtcccagaaacggggcaaccacgcgttctttatttcgtttgcaccgtatgagaatccggaaatttcggtgacggtcagtatcccgaatggatattcttcttcgaatgcggcgatggtggcaaaacacgtatatcgttacttctatggctatgcgagtctggatgatatcctgaattcaggagcattggatgcgtccaatgaacgaatcaatggagattaagaggtgatggaactatgaaaagttccgtagtaataaagggatgtaagtccggtatgacggtaattctgaatccggacaccccctttgaacagttactggaggatgtagggaaaaagtttaaagaaagtgaaaaattctggggatccgcccagatgacgctgaccctggaggggagagaactgaccccaatcgaggaactgcaggtgacggatgcgattaccgccaattcccagatagagattctctgtttgctggatactgacgctaaccgcatcgcccgctgtgaaaaggcgctgaccgagcggctgatggagctgactgcccggacgggacaattctataagggtaatttatcccggggcgatctgctggaatccgatgcgagcatcgtgatcatcggggatgtggagcgcggcgcgcgtgtcagcgtacggggcaatatcgtcgtcctcggcacgctggcgggttccgcccatgctggggcggcgggaagtgaggacgcggtgatcaccgcgctggagatgtcgccgatgcaccttcggattgctgatctgacagccaaaacgcgcagtcagggtaaaaagatggggcgcggaccgatgattgcatcggtatccggtggaaacattgacgtagaatcggtcaaaaaaagttttttagattattttcattttatttagcgtatttaatggatttaagactggaattattctactttttagagtagaataaaatggtaaaacagaatacaggaggatgttcctatgagcgaagttatcgttattacttccggaaaaggaggcgtcggcaaaacgacaacctcagcgaacgtcggcaccgggcttgccatgcttggcaaacgggtggttctcatcgacaccgatatcggtctgagaaacttggatgtcgtcatgggactggaaaaccggattatctacaatctggtcgatgtgatcgagggaaactgccggatgaagcaggcgctgattcgagacaaaagatatcctgacctgttcttattaccttccgcccagacgcgggacaagtcgtccgtgagtccggggcagatgataaaattagtagaagacttaagagaagagtttgattacatactgcttgactgtcccgccgggattgagcagggctttcgcaatgcgatcgccggggcggaccgggcgctgattgtcacgacaccggaggtatccgcgataagggatgctgaccggatcatcggacttttagaagcatccggggtcgggcgtatggacctgatcatcaaccggatccggagcgatatggtgcgccggggcgatatgatgtcggtggatgatgtgatggatattctgtctgtccctgtgattggcacagtcccggacgatgaggatatcgttatatccacgaatcagggcgaaccgctggtcggcatgaatggatatgccgggcaggcatatttaaacatatgcaaacgaatacttggagaatcggtaccatttatacagcttgatgcgtctccgggcttctggtcccggatatccggcttcctcaaacgtgcataggaggggacgctatgattctgattgcagaactgtttacgaaaaagaattccggcgagatagccagaaagcgtttaaaacaccttctgactgccgatcgggcgggctgttcgccggaacttctggatctgattcgcgcagatttcctgaggagcgtgtcacgttatctggagattgatccgggggatgtgacactccggattctgaggacatcctcagaacagccggcggaggtattcccggcggtctgtgcgtcggtgccggttcttactttaaggagccatttacagcatgatattcgattaccaatttagaaattacaactttcgagccctcatttatatgattctgctgagtgttctcggcattttggttgtcgggagcgccagcaatcaggaccgttcctctgtgataaaacagattatcggagtggttgtatccctgattatctgtctggttctgtctttgattgattaccatcagtatttccgatttaccacgcttatctatgtggtctgtgccggaatgctggcggcagttcttttgtttggacgtaccaccaagggcgcgacccgctggctgcggatcggcgggattcagatccagccgtccgagtttgtaaagatcggtctgatcctcatcctggcgaattttctttccagaaaccgggataaaatcaatgagccaaagacattggggatgacggcgcttatctgtgtccttccggtcggcatggtatatttacagccgaacctttccaccaccatcgtcatctgcttcatgattctgtgcatggtttatgtagccggtatcagttacaaatggattgccggtgcggtggcggtcggggtacctggatttgcggcgcttatctatctgtcgctgcagggattcatcccgtttctccagaaataccaggcacagcgtatcatgggaaagattttccacagcagcagtgaatttacggatctgaaccgtcagcaggataactccatgatggcgatcggctccgggcagctacgcggcaaggggctttttaacaacacattaagctccgtcaagaatggaaatttcctctcggaggaacagacggactttatcttcgctgttatcggagaggagcttgggtttgtcggcggcgtggcggtcattgccctctatgcgctgctggtgtatgagtgcctctggattgcggcgcgcgcgaaggacacagctggacgtctgattgcatcgggcatggcggcgcttctggcgttccagagttttgccaacattgcggtagccacgggaatcttcccgaacacgggtcttccgcttcctttcataagctccggacttagttcgctgctcagtatgtttatcggaatgggagttgttctcaatgttggattgcaacgaaataacgtaaccgttcagtaagtacatgcatggactgtgaagctgcatggaaattgaattttatggttatgaaaaataggaatcattaaggaggcaggtatagatgtatatcgggttaatcgcacatgatgcgaagaaaaaactgatgcagaacttctgtatcgcatatcgcggcatcctgagcaagcatgaactctatgcgacaggaacgacaggccgcctgattgaggaggttacgaatctgaccctccataaatatctgccgggtcatctgggaggttcccagcagctcggcgcacagatcgaacacaatcagatcgatctgctgattttcctgcgcgatccgttggcgccgaagccgcatgagccagatgttaatgatgttgtccgcctctgtgatattcacaatatcccgatggcgacaaacctggcgacggcagagcttctcgtcaaggcgcttgaccgcggcgatatggaatggcgggagatgtacaaatgagaaaacagacaatcggacttgcgggcgcactgatgctttgcggtattagcatgctgaccggctgtggtgcccgcggtctggaacaggcatattcatttcaagaacgggaagcgcagatgacgccagcggcaggtgccgggctggcgcccttttttgcgtcttctctctgcgtaccggaatctgcagacggcgatattgctccagatgatgcggtgacggcgcaggcgggcgcattgtttgatgtgaccgactccagcgttatatatggtaagaacatctatgaccagatgtacccggcgagcatcacgaaggtaatgacggcgatcatcgcgatcgaggaaggcaatctttccgatgcggtgacggcaaatgacgatgtcgtgatccgcgaggcaggcgcttcgatggcaggcatcaagccgggcgatacctttacgctggagcagctcttatacggactgatgattccgtccggcaacgatgcagccaatgcgattgcggatcatatcgccggaagcacggatgcgtttgtggagaagatgaatgcgaaagcgaaggaactcggtgcgacccacacgcattttgtcaatgcaaatggtctgcacagcaccgaccactatacaacggcatatgatctctatctgattttcaacgaggcgcttaaactgccgctgttttgtgagatcattaacgcgcagtcttatacagctgattataccgatgcaaatggagccgcaaaacagcaggtctggaaggttggcaactggtatctgaagggagaccgcgaggcaccggagggagtgactgtcttaggcggcaaaaccggcaccacacaggcggctggctactgcctgatcatggcgagcgatggggacgatggcaaggaatatatatcggttgtgctaaaatctgcaaatcgtccgtcactttatgacaatatgacggaaattttgactaaaatttcaaataagtgattgcaatatttataaatttatactat

SEQ ID NO: 10996 - DNA, 16034 bp, Unknown
  gut microbiota DNA sequence
gaagatgaagcttttcttcgccttcttcttcatgaatagcactgaggagcataccgcaagagtcaatgcccatcatagctctcggtggaagatttgtgatagcaataagagtctttccaaccagttcttccggctcataaaagctatgaataccgcttaaaatggttctgtctgtgcctgttccgtcatcaagagtaaactgtaacagtttctttgacttcggtactgcaacacactctttaacctttactgcacggaaatctgacttgctgaatgtatcaaaatcaaccatttcttcaaacaatggctcgacttttaccttagaaaaatcaatcttttcaaccggtttttcagcctctgccggaactgcttcggaagtcttggaagctttcttatcagcgtccagtgacttcatcgtcgggaacagcagtacgtcacggattgcctgggaatcggtcagcagcataaccagacggtcgataccgtatccgataccacctgtcggcggcataccgatctccagtgcgttcaggaagtcttcatccgtatgatttgcttcctcatcgccagcggcaaaagcctcttcctgtgctttgaaacgttctctctgatcgatcggatcatttaactcagagtatgcgttacacatctcgcggccgtagatatacatctcgaagcgctcaaccagctccggattggacggttttcttttggtcagcggagatacctcaaccgggtgatccataacgaaggtcggctgaatcatcttctcctcgcagaactcctcgaagaacaggttgatgatatcacccttcttatggcgctcctcaaatacaacattgtgctctcttgcgattgcctttgcttcctcgtcagttttaacggtgttgaaatcaacgccggagtatttcttaactgcatcgatcatggtgatgcgctcgaacggcttggacatatcaatcacagtgccgttatagctgatgacagaacttccgcagactttctcagccaggtagcggaacatactctcggtcagttccatcatgccctcgtagtcggtgtatgcctgatacagctccatcagggtaaattccgggttgtgacgggtatcaacaccctcgttacggaatacacggccaatctcgtaaacacgctctaagccgcctacgatcagtctctttaagtagagttccagagaaatacgcagttttacatcttcatccagagcattataatgggtctcaaacggacgtgcagccgcaccgccggcattagctaccagcatcggagtctccacttccataaatccgcgtccatccaggaaattgcggatctccttgaggatctgagaacgttttacaaaggtgtcttttacttccggattcatgatgagatccacatatctctgacgataacggatatccgtgttggtcagtccgtgaaatttctccggcagaatctgcagactcttggacagcagtacgatggactctgcatgaacggagatctctcccatcttggtgcggaatacggtacctttgattccgacaatatcaccgatatccatcttcttgaaatctttataagcctcttcgcctacgctgtctctggcaacataagactggatattgccctttaaatcctgcacattgcagaaagatgccttacccatcacacgtttggacatcatacgtcctgcgatcgtaacctctttgccatccatctgctcaaagttatccttgatctcgctgctgtgtgcagttacatcaaattttgtaatctggaacggatcctttccgttgtcctgaaggtctttcagtttctcgcggcgcacctttaataactgatttaagtccttctcctcgttcttattctgctgattctgctctgccactttctctttcactccttcgtctctttatgatactcgctggatgtccaggatcttatactggataacgcccgcctgtgtctctacgtctacggtctcgccagctttcttgccaagcagggcacgaccaaccggagactcgttggagatcttaccatctaagctgtttgcctcggtggaacctacgatcttaaattccatctcttcatcctcttcgacatccagtacctttacctgacatccgatgctgatcttatccagatcgatctcatcctcaacaacaacctctgcgtttttcaacagtttctcaaggtctacgattcttgcctcgatgtctctctgttcatcttttgctgcatcatactcagcgttctcagacaggtcgccctgctctctcgcctctttgatcttctgtgcgatctcctggcgtttatttactttcagatcatgaagttcatcttcatactttttcaatcctgtgtaagttaaaatgttcttcttttctgccatgacagctatccttccttctatcgattcatcactgaatcccctaataattgcatcgcactattatacatgattcttggtgtaatgtcaagaatcacaaagtgccataatggctttaaaaacaagggaaaatcctacattttcgtgctttttctgtgccttccgatttcgtccacccatgtaacacaaccatcgttttgattccacacattcatccttctcttaaattctctcatccaccagccgttccagctcctccagcgtctccacctggtttatatcattgcgaagcgccgacgaatgtggaaatcctgccgtataccatgccacgtgcttacgcatctcccgcattgcgatctcctcgccgcgaaattccgtctgaagcgtcccatggcggacaatcatcctctttacttcctccgcagtcggcggcggcagaagttctccggtttccagatagtggagaatccgtttaaacagccatggatttcctttcgcgccgcgcgccaccatgatgccgtcgcagccggtttcttccttcattctcttagcatcttccggtgtaaatacatcaccgtttccccagaccgggattgaaaccgcctctttgacctgacggataatgtcccagtccgcctttccggaataatactgctctctcgtccgtccatgcacggctaccgccgccacgccgcagctctctgccatcttcgcaaactcaaccgcattgatattcgaatcattaaatcccttgcggaatttgaccgtaaccggtttatgaagtttctttaccatcgccgtcaaaatctgctctgccagcttcggatccttcatcagtgccgaaccttcgccgttattgacaatctttggcaccggacaacccatgttgacgtcgatgatggcatacggtccttcctccagctgcagcgccatctcgctcataatctccggatctgagccaaacagctgcaccgcaaccggctcttcttccggccgcgtctctaataacggctttgtattgcggttcttataaagaagcgccttcgcgctgaccatctccgtgtacatcaaaccacatccctgctccttacagagcagacggaacggcagatccgtcacacctgccatcggcgcaagggcgattgcattttttaattctacgtttccaatcttcattttatttctaatcttcctgataccgttccatctgctcgtcgtctaacagttcgtccgccgggattcccagcaccttcaccttataatacagctccagcgattccagcagctcacgcttctccgcctgatactgcttgattttaagcgcgcttccgatctcgtcaaagaggtaatcattctcctccgcctcaaccttaaactgcagtctgccatccggcataaactccagcaaaataataccgccgatgtcctctgtgtacatgacacacatgatctgcaattcctgcttaattgactccggcagccccgaaaactgctcattcagataatatttttccacatacgaattcgcaccgcagagtacggtggagtctccatctgtattgggattctgcatttctgccattttcttgcacctccatctgtttcattttccattgcccacaaacagggctgacgcacgaacggagagcaggctctccctttatccctgagaagcctgttctccgttcatatgccagcccatctcacaagcagccatcaaattccttaacgaatcagcagcttactaatctcatactgatcttccggaatatccttcttcatattcagcgcctcctgaatatcaaaatccagaaactcgccgtgcttatacgctaccacgcggttggtctttccttcttccagcagctccaccgccttggcgcccatgatggacgcatagacgcggtctttacaggtcggcgcgccgcctcgctgcatataaccaaggatcgtcgcacgtgtctcgatgccggttgccgcctcgattcgcttcgccatcgacgcggaatgtccgatgccctcggcattaatgataatatgatgtctcttgccgcgtttccggttatcgatgatgcggttgatcagcatctgctcattgccatcgtaccgctccggaagcagaatatcctcggcgccgttagcgataccgcaccacagggcgatatatcccgcgtggcgccccataacctcgatgatactgcagcgctcatgggaggtggaagtatctcttaccttatcgatcgcctccatcgccgtgttgatcgcggtatcaaacccgatcgtataatcggtgcaggcaatatccagatcgatcgtgcccggaagacctaccgtattgattcccagcgcggataactttccggcgccgcggtaggaaccatcgccgccgatgacgaccagaccgtcaatgttgtgcttgcggcagatttctgcgccgcgcttctgaccttcctcggtcataaattccggacagcgggctgtgtataagatcgtaccgccacggccaatcgtatctgccacgctggttccgtccatgtccacaatctcttcctgcaaaagtccagcgtaaccacgcatgataccttttaccttcatgcccttgttgatcgcagtccggaccactgcacggatcgctgcattcatacccggcgcatcgccgccgcttgtcagtacaccaatcgttttaacctcttttgccatcgcttattcctccgtcctaaggccttccgcttcacatccccaaccgtgaaccagccgttttattttcgaatcttttgacccttctgataccaaattgttctgcactgcgtgctaccacaattttcaaacaattttattgtaattcattttataggtcatttcaagattttttatgatatttttttaacatgtcgccaaagcgtgttaccgttcacacatacgtgcccagttaccaaagctttcaatgtccaatgcaaattttaacacttatgaagaaatcttccccagcggtttctccaccaccttgacgttcttctcgcccagcatctcgctgagcgtcgtcaccagcgcctcgcctgcccgcacattccagttgcgcggcagaacctttttcgcgcgctcacgtcccaggtaaatgatcacggtgtcatttccatcacttgttttcaggaggtcgagaagttctttctctcccgccagatacgcatccttgtccgcatactgaatccacagctcgcgcggcacctgcgaaaatgggataatctgctcgcagatcagttttccgaccggctcatcgccgaccgatgcgcgcccgcggataaagactttttcatcctttatcagcatatcgcgccgtttttcataatccttcgggaataccagcacttccacacttcccgccagatcttccaccgtcaggaacgccatcattttgttattccgggtcgtcttaaccgttttctcggtgatcattccgccgatcgtcacatacgcgccatcatgaaccaccgccgaaccggtctcctcatccacaacaaaatcggagctcttcgccgtcacatttttctcccaggtgccgatatattcctccagcggatgcccgctgacgtagacgcccagcatttctttctcgtatgccagatattcttccctcgaatactctccgacattcggaaatgtgatctgaaaactcttcttgtcctcttccgctgcaaaatcaaagagtgacatctgcccttccatcgtatttttcttctctttattcttctgatcgaccatcgaaccgcagaccatacatttctgcttgcgggttcccggcagcccgtccatcgcaccggatttgataaagctttccaatgtgcgtttgttgacctccctgcccgacatccggtcaatgaaatcttccagagagcggaattttccatgttcggtccgctcccgcacaatctcatccaccaccgactgaccgatactcttgatcgcagataaaccatagcggatcgcgccgtccgaaacagagaagccgccctcgccctcattgatatccggcggcatgatcttcatacccatctgacggcagctcatgatatattccgataccttcgtaacattatccttgaccgaggtcatcagcgccgccatgaattcgaccggatggtaatatttcagatatgctgtctggtaggagacaaccgcgtatgccgccgcgtgcgacttgttgaaggcgtatttcgcgaaatcgatcatctcatcgtaaatatggttcgccgtcttctcgtcgatcccattcgcaatacagccctttacgccctcttgtgcattgccgtagacgaaattctggcgttctttctccatgactgccgcttttttctttgccatcgcacggcgcaccaggtcgcttcgtccccaggtatagccagccagatcgcgcacgatctgcataacctgctcctgatagacgatacagccataggtcggcgccagaatcggttctaactgcgggcactcataggcaatcgaagccttgtcatttttgcctttcagataacgtggaatgaaatccatcggacccggacgatacagggaaataccggcgatcagatcctccaggttttccggctttaactctttcatgaatcctttcatgccggtactctccagctggaacacaccgtcatttttgccggttccaatcgaatccagcacctttttatcgttgtaatcgatcttatctatatcaagcggttttccggtcgttttctccaccaggcgaaccgcattctggataaccgtcagggttctaagacccaggaaatccattttcagaagtcccagctcttccagcgtcgtcatcgtaaactgggtcgtgatcgaaccgtcagatgccctggacaacggcacatactcatcgaccgccgcacggctgatgacaacgcccgccgcatgcatggaggtatgtctcggcagcccctccagacgtttactcatgtcgatcagatatttgaccgaatcatccgactcatacgcctcacgcagatccggactggctttgagcgccttatctagcgtcatgccgagatcacccggaatcatttttgcgatcgcatcacactgtgcatacggcatatcgagcgcgcgccccacgtcgcggacgacaccctttgccgccagcgtaccgaaggtaacaatctgcacgacgcggtcttttccgtatttacgcacgacatagtcgataacctcctgacgccgttcgaaacagaaatcgacgtcgatatcgggcatggaaactcgttccgggttcaggaaacgctcgaaaatcagctgatagcggatcgggtcgatgtccgtgatctccagactgtacgcgacgatactgcccgccgccgaaccacgtcccggaccgaccatgataccgtttgattttgcaaaatggataaaatcccacacaatcaggaaataatcgacatatcccatcgaatggataacgtccaactcatacctcaggcgctcctgcagcgtcccatcgtcgttcgggtagcgcttgtgaaagccctccccgcagagcttctgcagatattcccaggacgtatatccgtccgggacatcatactgcggcagcttcgtcacgccaaactcgatctcgacattgcacctctcggcgatcttgtgcgtgttgtcaagtgcttcctgtgcatacggaaacagcgcacgcatctcctcctcggatttgacataaaactgcccgccctcatagcgcatccggttctcgtccgtgacttttttgcccgtctggatacagagcaaaatatcgtgcgattccacatcttctttataaatatagtggcagtcgttcgtcgccaccagcggaatctgcagttcctggctcatccgcatcaagccctggttgaccgtccgctgcgccgggatgccgtgatcctgcaattccagaaagaaattgtccggtccaaagatatcgcggtatttctgcgccgacttgcacgcttcctcatacatgcctctcgacaaatacctcgggatctcgcccgccagacacgcgctgagtgcaataatgccttcatggtaggttctcagcacctcgtcatccacacgcggtttataataaaagccctcaacaaagcccttggagacgatcttcatcagattctgatagccggtattattttccgccagcagaatcatatgataatagcgatcctcgccgcttcccgcctcccggtcaaaacgcgatccgggcgccacatagatctcacagccgatgatcggcttgatcccattttccctggctgcccggtaaaaatcgatcacgccgtacatgacgccgtggtcagtaatcgccagactgtccatccccagctccttcgcccgggcggtcagttcttttattttactcgatgcgtcaagcagactgtactctgtatgcacatgcagatgtgtaaatgccacctttttcctcccattcagatcttttaagggactgccgtttcccgcgaaacgacaccccctcatctatcaaagctcttgttttgtgtaactgttccgtcccctgtctctttccgaaaaacggtcagaaatctggatttctactgattgctcagatatttctcaattccctcgatcgcactctcctcgtcgctgccatcagccgttacctttacgtgcgcgccctctgccagtcccagcgtcatcatgcccatgatgctctttgcattgacgcgtttttcttcactttccacatagatgctgctctcatactggcttgccacctgcaccagcatcgccgcaggacgtgcctccagacctgaactcaaaccaattctgatttccttacttgtcataatatcctcctcatcgagcctcgctcgaaaaaaacggcaaaatccgctgccactattgtatcgcacggaatcttccattcggaaaattcctgcctgtgaataataacccaactttactcgccccgctcttcgcggaggctttcagctactgcacttatctttctgagcctgtgattgacccccgattttccaaccggatgacttagattctctcctaattccttcaaagtcgcatccggcatctccagacgaacctgtgctacctctgaaagaagctccggcaagtaatccagcccgaccgtatcacggatgtatgtgatatccgcaagctgcttgactgctgccgaaacagtcttattgatattggcagtctcgcagttgacctggcggttgacgctgtttcgcatttctttcaggatccggatattttccagctccatcaatgccacatgcgcttccatcagccccagaagttccacaatctgactgccttcttttatatataccacataatacttctttctgacaactattttcgcatcgatgtcgaatgtcagaatcacattctgaagctgcaccgccttttcaagcgacgcgcatacgatctcaaaatgataaaatttctccggatcgcttaaggatccggctgccagaaaagcgccccggataaatgccttcttgcaacacgcattctgaatcaccagattccgcaccaccgaaaggttttccccgacatttccctgcgcatccaccatcttgaccgcctccagcacccggagtgcgttttcgtgatcgcgcaccagaagcgtataagaacggctcttttttaaaaatgcattgcgccggatcgaaatgtccgccttaatattaaatgtatttttcaataatgtaaagtattttcgtgcaaccgctacgttttccgtgtggatccgtatgctgaaatgatcctcttcatcgatatgaatcttgccgcaaaggctcaaaatcgccgccagctctgcaatctggcagtgcctcgccttgctcagctgatgcgacagctcttcctttacccgggctgaaaatgacaaagtcctctacctccgtttacccttttgtccggttatccatctctatgtcccgatgttccagtttaagccctatttccgagtgctccttgaggcgctcatagagccggttcgccaccgtaactgaacggtgctttccaccggtacatcctacggctatgacaagctgattctttccttcttttacatagtacggaaacaggaagtcaatcatgtcatagagtttatccaaaaatacgtctgccgtcccgccgcggcgcacaaagtcctgcaccgccttctcattgccggtatggcttcttaaattctcatcataataaggattcggcagaaaacggacgtcaaacacgagatccgcgtccgacggaatcccatatttaaagccaaagcttaagatcgtcacaaagaggctggaaaagcgctcgcgccccatgaaaatccgttccagttccgccttgagctcccgcgtcagaagcgtgctggtgtccagaatatagtccgcccgctttttcaggaaatcgagtttcaggcgctctttcgcaataccgcggtccagccgctcttttcctgccagcggatgggaacggcgcgtttccttatatcgcttgatcagcacctcatcgctggcatccagaaacaggatctcatacgggaactggatgttattccaatcattcagtgttccctccagctgtgccagctcgtcgccgctgcggacatcgattcccaacgctgcacagcttacctccccgctgctgctctgcaccagctccgcaaattttcccaccagcgggatcgggagattgtcaacacagtaaaatcccatgtcctccagcattttcagtgccgccgtctttccggctcccgacataccggttacgatcacaagccgcatattgttcctcccttttccatactctatatatctatatcttaaaagcccagcatctttacttccgtctccagtttcaccccaaactgctcatacacgcgcttctgcaccgtcccacacagccccgcgatgtccgaagccgtcgcatggtcgcggttgataacgaaaccacagtgtttctccgacacctgtgcgccgccctcctgatagccgcgaagtccggcatcttcgatcaattttccggcgaaatagccctcagggcgcttaaaggtgcttccggcactcggatattccagcggctgtttttcccgccgtttggctgccagttcatccatccgcacccggatcgcttccggatcacctttctccagacggatccgcgccgataaaacgatatatccgcgctccgggatgcagctgtggcggtaacccagatccagttcttccgttttaagctcttttacctcgccgtccggcgtcatcacgcgcacagattccagcacatcctttaattctccgccgtaagcgcccgcattcatgaccgccgcgccgcccacggttccaggaatcccggctgcaaactcaaatccggtcattccatctttctgcgcctccctggcggcacgcgaaagcagcacaccggcgcccagctcatagacgcccggttcgctctccggacggaccacctctgtaaactggcttcccagaaggatcatcacgcccggatagcccgcatcactgacaagcagattgcttccatttcctaatatgtaatacgctttctctgcctcccggcacgccgccagcactgccgccagctctttttcgccctccggggtcacaaaatagcgggctggtccaccagcccgaaaggtcgtatgtgcgctcatcggctcctgctcccgcacggaagcagcgccgatggcatcacaaagtttctgataaaaattagacatatctattttcctttattcatttcataacggctccatcccttgcaagtcgggatttccgcactaaatcacacgaatcagactgcgtgaagcgttccattaatctcttcttgccagattcgcctgtacccgcttgtacagttctttcgccgcattatatcccatcttcttggtacgatagttgaccgccgccgactctacgataattgccaggttacgtcccggacggatcggaattgaatggcatacaatcttgttgccaaggaactcggtatactgatcttccatgccaaggcggtcatactccttgtccttatcccactcttccagcttgattaccatgtcaatcgactgtgtatcctttacgctctctacaccgaacagcgtcttgacatcgataatgccgataccgcgaagctcgatgaaatgacgggtaatatccggtgccgaaccgatcagggtttcatcgctgacgcggcggatctcgaccacatcatcgctgacgagacggtgaccgcgcttaatcagttccagcgctgcctcactcttgccgataccgctctcgcccataatcaggacaccctcgccaaatacatcgaccagtacgccgtgaatgctgatcatcggcgccatcttgacgttcagccagcggatgatctccgccatcagatccgaagtcgtcttctccgataccatgcacggaaccccataatggttacacagctccagcacttcctcctccggtgccatgccgcggctatataccagacatggtatacccgaagacagcagtttgtcaaacatttcccggcggcgctgcggagtcagggtcgagatgtacgcattttccacataaccgatgatctgcacacggtccttgtcaaaatggtcgaaaaatccagtcagctgcaatgccggacggttcacatccgcatgcaccagcataacattgtccgtctccagctccggcgtcatattgcgaagccccatcttatcgatcagttctgttatcgtcactccacccatacttttgtctccttttatttttactattgtctacatcctatcacatcttcccctgcttgtcatcacggaaaaatatatagactgcctcggcggctgcccggttcatctgtggcgcagcttccagctcctccacgctcgcctcccggactgcttcgatcgtcttgaacgtccgcatcagagacttacggcgcgctggtccgatgcccttgatatcatccagcacggagcgcacctgctccttgccccggagactccggtggtactcgatcgcaaaccggtgcgcctcgtcctgaatccgggtgatcagctgaaatccttccgaatggcgatcgattggaatttccacattctgataatacaatcccctcgtccggtggttatcatcctttaccatgccacagaccgggatttccagctgaagctctcttaatacctccagcgcgatattaacctgtccgcgtccgccatccatcatcagcagatctggaaaacgcgtaaaacttcccatcgccagatcgccgccctcggcttgcagtttcttcgtctcctccagaccatgggaaaaccgccgcagcagcacctcgcgcatcgaagcgtagtcgttcggtccctgaaccgtccggatacggaatttgcggtaatcattgcgtttcggacgtccattttcgtagacaatcatcgaaccgaccgactcaaaaccgctgatattggaaatatcgtaggcttctacccgcttgatccccgaaagcccgatccacgatccaatctgattcatcgccccgatcgtccggagctcctcgcgcttgatcttctccttatcctgggagagcaccatcttcgcattcttctccgccagctcgaccagtcgctctttctcgcccatctttggcacgacaaagcgcaccttctgtccccggcgcgccgtcaggaagctggcgataacctccgcgtcctctaactcctcctgcacccagatctcatgcggcacaaacggcgttcccgcgtaaaactgtttgacgaagctgtttaagatttctgccttgctctccgagccggtcagattcatatggaaatgttcccgcccaataagcttgccatcgcgcacgaagaacacctgcacaaccgcatcgcgctcatccttcgccatcgcgataatatcccgatcttccatgctctggctcgtaatcttctgcttctgcgccacctttctgacactgtcaagcagatcccggtactcaatcgccttctcaaactccatcgtctcggacgccgtcctcatcttttcttccagatatttcatgaccggctcatactgtccatttaaaaacccgaccgcctgcttcaccgatttctgataatctgcctgtgaaatatacccctgacatggcgcgtcgcactggtgaatatggtaataaaggcacggacggtcctttcccatatcctgcggcagcttccggctgcacgcccggatccggtatatcttccgaatcagctcgattgtgtctttgactgctcccgcgctcgtaaaaggaccaaaatacttatttttatcctttttcatctggcgtgaaaacaagatccgcgggtactcctccgaagccgtcaccttgatgtacgggtacgtcttgtcatccttgagcatcgtattgtagcgtgggcggtgctctttgatcaggttgcactccagcaccagcgcttccagctccgaatccgtcacgatatactcaaaacgtgctatcttcgagaccatctgcttgatcttcgccgtcttatcccggctgctctggaaatattgacggactcggtttttcaggctgatcgccttgccgacatagatgatcgcgtccttcgcatcgtgcataatataaacacccggctgccccggcagttttttcagctcttcttctatttgaaacatctcaaaccatcctgttttctaatctgctgccaccacgttttcttacggcactttcggttccaaaagtgcctacccgtgaacagttacccagactcttctgccagacagccgctcactttccataccgcaggcgcggtgcatcgtacctctgctgcatccggatgcactgacggatcgcgtccagctcttcctccacgcttccaccgaccggattcatatccagacagaagcagagactgtcgagatcacgcttgtccaccttgccgctcattctctggagcacttccagcctgccctcggtcgtttcctgatccagaaattctgccacaagcggatgcagctccggttcctcctgcggtatgtcccaggaatgagtagctgcgtccgacattttcaaacggcgtacaccttcatttacgacatgagtcgttctggttgtccttatttcctgctgtttcgaattttcccacggacccgccgcaatccgctcaaaccggtatctctgcgccgcctccggatattttacccgatctacctcttccataaacatagaaagcggtctaacccagacgccatattctccatagagcgcctgatagacaaccatcttttcccccgtttccgagtgggtcgccaccgccagaatctgatattctttatttttaaaatgccggtaccgctcgcccggctttggaatttcccgcatgaatgctgatacctccttaaaacatctcgctaagtgttcacattatatcacgattcgccgttcgccttaaatctgcaagcagctttctggctcacttgcgctcattatatcataagaacgtattctcacccgtccactcacgaatccgcgctatcgcgctccaccgccctgcttcgcatggctgttcgttcgttaatggcgcaagaaaagaatatgtctgcttcgcagccgcattctt

SEQ ID NO: 10997 - DNA, 14036 bp, Unknown
  gut microbiota DNA sequence
aaaatatcttaagaagtagtatactgtttcttccctgtttccgcaactggatctgttaaatctgtaatgttgataaaaaataaacaagattgttacaaaaatatcacataaaaatcgactaaaatcgagaaaaaattatataatttcgacaaaatagcttgcctaatcataaaataagtgttaaaattaggtaaaaggtaaataaagaaccaaaagcagagacgaagagatgcgccatggttagaaacagctggaaaagactgttttttaaaaatggtgctatttttttgcctaaatgctgaaatggtaatttatttagaaagtagtagaaactgttgatgaaccggtcagaaagatgactgggggaggttaagaaaaaggagagaaaacgtatgagaaaagtattatcagtagtactggcagcgacgatggcaatgagcctggcggcctgcggcggcagcggcgcaaagactgacacaaaggcagcagacgcaggaacggcagcaggtgacgaggcatctgcagatgattactacatcaccatcaagttttccaacgtatttcagccggcagagtggaactacaaagccagcgaatatctggcagacctggtaaaagagaagaccgatggtcatatcactctggagtattacggacagaaccagcttgactgctacgcggagtctgtagcacaggcacacaacggcgctgtctggatgggtctggaggagccgtcctactttgctgattacatcggcgattacaacgtattagttggaccgatgctttacaagaacaatgcagagtataatgcagtgatggattctgatattgtaaaagatctgaatgcaaaactggcaagcgagcacaacatccacgttctggatacacattattcgttcggattcagaagcgtatgtacgaacaaggtagttgagaaaccggctgacttaaatggtctgatcatgcgttcgaccgagtctccgctgtttgttaagacgattacctgtctgggtgctaccccgtctgcaatgagctttacggagtgcttatctgctatgtccagtggtgttgttgatggtttcgaaggttccatctccaccctgaaggatacaggtgcttatgagtacaccaagaaagttgcaaacacgaaccacttcatcgcaacccgttggttattcatggctgaggacgtatatcagtccatcccggaaaaatggagaaacatcctggatgagtgctgtgtagaagctggtaagtgggagcaggaaaatgctgagaacgacgaagcttccatgatcgagttcctgaaagacaaaggcgttgagtggaatgatgtagatgttgatgcattcacagaggcttgtgctccggtttacgactggatcgtagacgagtacggcgcagatccggaacttcaccagaagctggttgatttcctgaatgactaccgtgcaaacaacgaataatgtaaattattccgaacaaatacagtattttaaagcaattatgaaatagtaaaaacgtaacggttatcagaaccgctgcggagaagaaagtatatctgcccgggctgtcagaacgaagaagattgtctgaggtccgggcaggcttccgacaaacgtatagtgccggaaatatgaaactgctggtaactgttcagtaggtctgcgcatttactgcgctgaccgtacgaaaacatgggccagcaggcaaaaatcccattgccgtaggcaatttttaatggatttttgcgcgtgactgtgaaggtactgaacagttacaactgctggaatgatgactgtatgacagaacagtcgtcggttatgcaaaactgactgccattatgaatgcatgaggatagactatggaaaagaaaaaaaacacactggggtcggtgctggtaaacctggatgcaattattacctgcgtgacactgacactctgtacaatcgttgtaaacgcaaacgtccttatgcgctatttcctgaaaagaccgttgtattggtcggaagaggtcgctacggggctcttcgtctggaccgtctttattggaagcgcatatgcgtaccgtaagcacgcacatctgggcgtagacatcctgatcaacattcttccggagaagataagaaaagttgttaaggttattatggatcttctggagcttgttactctgattatgctgaccagaacaagcgtccagtatgtgatgaacacgatggataagctgactaatacgctgcgtgttccgagctggtatatttccggcgcggttccgatcggatttgggctttcattgattttctgtatttactttttggttaaggatattatcaaggtatttaaagggaaagggggaaataactgatgggactcgaattaattgaactcgttccgatttttatggtatttattctctatttcctgggaatgccgattgtatatgcgctgtttggttcaaccttcttttattttacatttattgatacaaccagtaaaaactggctgatcttacagaaggttatgacctctacacagtcgttctcgatgttagcgattccatttttcgttatggctggttccgtcatgaactacggcggcatcagtgacaagatgatggatttcgcggaagtgctgaccggtcatatgaaaggcggtctggcacaggtaaacgtagtacttagtatgctgatgggcggatgttccggttcggccaacgcagattgtgcgatgcagtccaagatgctggttccggagatggagaagagaggttactccaaggcgttctccgcagcgatcacagcggcttcctcggctgctacaccggttattccgccgggagtaaacctgatcgtttttaccctgattgcacagatttccctgggtcgtacgtttgcggctggttatattccgggtatcctgatggcaatctcgatgatgatcgttgtttcgattattgcgcataagagaaactacccgaccacccgtgaaaaattcccgtctctgaaagaaatcgtgaaacagggtattacctctttctggggtctgttcttcccgtttggtatcattctgggaatgcgttttggcatgtttaccccgtctgagggcggtgcggtagccgttctttactgtattattatcggacgtttcgtttacaagaaactgtccctgaaagagcatctggttccgatcctgcttgacagtatcgccggtacttccagcgttgtcctgatcatggttgcagcgaatgtattcggttattacatgacctggatcaacctgccgagagtcgtggcaactgctatgttaagcctgacaaccaacaagtggctgttccttatggcatgcaacgtaattcttctgattatgggtatgttcctggaaggcggcgcggcgctgatgattattacacctctgctgcttccggttgcaagacagcttggaatcaatgattaccactttggactggtagcgatcgttaacatcatgatcggtggtattacacctccgttcggttcgatgatgttcacgacctgtggtatcacgggatgtccgatcagtgagttcctgaaggaagtatggccatttatcgtgtcccttctggttgttcttctgcttctgaccttctgcccgttcttaattacatgtgtaccggatcttctgtacggcgcagcatagaaacagattgacaaaacgttaataaattggatataataaagcctgtgagattaagagcagaaaggcaaacgtagaaatacggatgctttctgctcttttttgttccataaaagataccggtatcggtcatggaagagtcttgtggagcgaaaaagagctgtgttctagaagctttacgggcttgcagagggagaaaaaatggcagtttggaaatggattgtggagacggcggcgacctggacagcggtcggcatctggattcgcctgctgttttcgctggcggtgggaatgttcattggaattgaccgtggcctgaaacggcgcggtgcgggcatcaagacgcatgtgctggtctgcctgggttcagcgcttgtcatgttgacgagtgaatatatgttccggacatttccatctgcaaaagcggacatggcgcggatgggcgcgcaggttatcagcggtgtcggatttttaggggttggcacgatcatggtaaccgggcgtaatcaggtgcgtggattgactacagcggcgtgtctctgggtctgcgcctgtgaaggactggcagccggtatcggatttgtggacggtgcggtttacggtctgattctgattgcggttaccttgaagctcctgacacgtgtggatacaatgattcatgagcatgcaaaggtgttcgatttctatctggaatttaccagcagccggtgtgttggggcgttcatggataccatgcgttctaagaatgtgaaaatcgtgtcttttgatattgccaagaataagttaaagggcgagggtccctccgcgacgatgtcggtggaagtgcaggacaagtcgcttcgaaaaacacttctgagcgatattcaggcgatggaggagatccggtttgcagaggagctgtagcagctaaagggttcagatgggcttacgcacgaaatgtagcagaaataggatgaattgtctaaacaaacaggatagttgaaacgagaacaagaaaacatttagtataaataatggaggatcacagtatgaacggaaatacatacgacgtagtgattatcggaggtggcgtcatcggcagcagcatcgccagagcgctttcgaaatatgagtgccgcaccgtgcttctggaaaaagaagaggatgtctgctccggcacatcgaaggcaaacagtgctatcgtccatgcgggctatgacgcaaagacaggttctttaaaagcaaagctcaatgtaaaaggcaacgccatgatgggagatttatccaaagaactcgattttgatttcaagcggaattcctccctggtactctgcttcgcgcaggaggacctcccggcgctgcaggcactctatgagagaggcgtggcaaacggtgtgccggatatttccattctgaccggcgatgaggtccgcaagatggagccgaacgtcagcggggaggttgtggcagcgctctatgcaccgactggcggcatcgtatgtccatttggtctgacgatcgcgctggcagagaatgcctgtgataacggcgttgaatttgtattcaacacaaaagcagaaaaaattgaaaaaacgacagaaggataccgtgtgataaccaacaacggtgtcttcgagacaaaatatgtcgtgaacgcagccggcgtgtattctgatgagatccacaacatggtttcggaaaagaagcttcacattgtgccgcgccgcggcgagtactgcctgctcgataaagaggcaggcaaccacgtatcagcgactgtcttccagcttccgggcaagtatggcaagggaatcctcgtcagcccgacgattcacggaaatctcttagtcggaccgaccgcggtggatcaggaagataaggacggaacctacacgaccgccgagggactggcagaggcatgtgagaaggcagccaagagtgtcaacaacattccgttccgtcaggtcatcacttccttctccggcctgcgtgcccatgaggacggcgatgatttcatcatcggtgaggcggaggacgcaccgggcttctttgatgcagccggaatcgagtctccgggactttcctgcgcaccggcgatcggtgaatatctggctgggatgatcgaggaaaaagctggatttggcaagaatccgaatttcaatccgatccgcaagggcatcgtgaaagcagcacgtttaaatacggaagaacgcgcagaactgatccgcaagaacccggcatacggcgcaatcgtctgccgttgcgagacaatcagcgagggggagatcgtggatgcgatcacccgtacactcggcgcacgctcgatggatggcatcaaacggcgcgtccgtcagggtatgggacggtgtcaggcaggcttctgcactccgagagcgatggaaattctctcccgtgagacgggaatcccgatcacagagatctgcaaaaaccgcaaaggttccgaaatgataaaaggtgaggaggcataaccatgattcagcatgacattgtaattatcggcggaggtccggctggactggcagcggcagcagcggcaaagaaaagcggcgcagaggatattctgattctggagcgcgacagcgtgctgggcggtatcttaaatcagtgtatccacaatggttttggtcttcatacctttaaagaagagctgaccggaccggagtatgcggcacgttatgaggaagaagtgaaaaagctggaaattccgtaccgtttaaacagcatggtactggatatcaataaagacaaagagatcacagtcgtaagccggagcgagggactggagctcatcaaggcaaaagcgattatcctggcgatggggtgccgcgaacgtccgagaggcgccctgaacattccagggtatcgtccggcaggtatctacactgctggtacggcacagcgtctcatgaacatcgagggacatatggtcggtaaagaggttgtcatcctcggttccggcgatatcggactgatcatggcgagacgtatgacactggagggcgcaaaggttaaggtcgtagcggagctgatgccgtattcgggcggtctgaagagaaatatcgtacagtgcttaaacgactttgatattccgttgaagttaagccatacggttgtgaatatcgagggaaaagagcgcgtgaaaggcattacgctggcacaggtcggaccggaccgcaaaccgattcctggtaccgaagagcactatgactgtgatacgcttctgttatcctgtggcctgattccggagaatgagctgacgagaaatatgggcgtgacgatgaacccggttacctccggcccaatggtcaatgaccgtctggaaacaggcatcgagggtgtatttgcctgcggcaacgtgcttcatgtacatgatctggttgactatgtatccgaggaggcagcgctggcaggacagaacgcagcgaaatatgtgaaatccggcgagacgaagaaaggtcacagcgtgacactcaaggcagaaaatggcgtccgctacacggtaccgcagtcgatcgataccgaggcgatggcagacaagctgaccgttcgtttccgtgtggcagatgtttataaaaaccgcagcatttccgtttattttgacggagagcgtgtaagcagccgcaaaaaacgcgtgctggcaccgggggagatggagcaggtgatcctgacgaaggaaagtctggagaaatatccggatctgaaagaaataaccatttgcacggaggtggatgagtgatggaagtaagagaactgacctgtatcggatgtccgctgggctgtcagctcactgtgacgatgggaaatgacgagatcaaggtagaaggaaatacatgcccgcgcggcgaggcgtatgcaaagaaagaggtaaccaatccgacgagaatcgttacctcaacggtacgcgtcgagggcggcacgatcgagagagcagcggtcaagacggcttcggatatcccgaagggcaaaatctttgattgcatgaaggagatccgcgccgtgaaggtggctgctccggtgcatatcggggatgtgatcattgatgactgcgctggaactgggattgcagttgtggcgagcaagaatgtagagcgggcgtaaggaatcgtgaaggtgacaccgacagccccgacacagaatataggatgagagatgggaggttgtacagactcatagaaaaagtttgtgcagcttcccatttttgaaattgaaatatatgaaaaacctgcttgcatatttgggcaggattggataaagttgttttgaagaaaatcttttttacaggtacatatttacagagataaattacaaggagagaggcatggaaaaacgtgaaattttaaaggagacagagctgtttgtcctcgatatggacgggacgttttatctggatacggatgtgctcgacggggcgttggatttcctggaggaagtgaagaaagccgggaagagatatgtgttttttacgaataattcgtcgaaatctccgaaaacatatattgacaaactggcaaaaatggggtgttatattaaaagaaatcagatcattacatccggggatgtgatgattcagtatctgaaagagtattatcctgaaaagaaagtctatctggtgggaacgccggacctggaggagaatttccgtgaaaatggcattcttctgacaagggagatgccggatgtggtcgtgattggctttgatatgacattgacctatgagaagttggagcgcgcctgcacgtatatccgcaacggcgctgtgttcctggcaacgcatctggatatcaactgcccgacgaaggatggttttatcccggactgcggcgcaatgtgcgcggcaatctccttatcgaccggaaaggagccgaagtatgtcggaaaaccattcaaggagaccgtggatatggttctggagatgaccggggcaaagcgcgaggcaatgtcgtttgtcggcgaccggatctacacggatgtgaaaaccggcgtggtaaatggggcacacggaatcctggtgctgaccggcgagacgaagctggaggatgtaccgaaggcggatgtcgtgccggatgcgattttcacagggctgaaagagatgggagaaatactcaagactatgagagaagaggaagcatagaatgacaatgcttgaattactggaggaatctccgataatcgcagcgattaagagctgggaagggctggaaaaaagtcttaaatctgaatgtaaggtagtatttgtgctgtttggcacgatctgtgatattgatcagattgtagcgcgcatcaaggacgccgggaaggtggcgatcgtccacgtggatatgatccagggactgagcaccaagagggtggcggtcgattttatcgcccacaatacgcgggcggacggtattatcagcacaaaaaatacactggtggagcgcgcgaaggagatgggactttatgcgatccagagaacctttgttgtggattcgatcgcactcgatacattgaaaaaacagatcgaaatgttccgaccggatgcagtcgagatcatgccgggggtgatgccgaagattcttaagatcatgcgcgagtacaccgatattccgctgatcgccgggggactgctgtctgacaaaaaagatgtgatggcggcctttgaggcgggtacggatgccatttcagcgacgaatgaagcggtgtggtacgtgtgattttaaaacttaaacgatttagacgctgtgagtgacagatatatttgaaataatgaaattgataaaaaaatatcaatcatttcgcgatttcgcttgattttttaccatgaatgcattagaatgatgaagtaatctcttttggtaaaaatagataaagagaagaaaaggcgagttttcgcattgtacaaaatataagaaccgtgaaaaggtaaagcggttgcaaactatacacatgtacagtgggggacactgaaatccccggttcggtgagaaatgtcagacaaaatttaagtcgaacgtccgtgagacttggcgcatgattctggtcagcgaagctgacaatttcacacagacgggagccgccggataacaggaaaggggtattaagatggctaagatcgatttaagcaagtacggaatcacaggaacaacggagattgtttacaacccttcttatgagatgctgtttgaagaagaaaccaaaccggagctggagggctatgaaaaaggtcaggtcagcgagcttggtgcagtaaacgttatgacaggtatttataccggacgttccccgaaagacaaattcatcgttatggatgagaactctaaggacacagtatggtggacttcagacgagtataagaacgacaaccatgtagcatccaaagagacctggagcgcagtaaaggatatcgctttaaaagagctctccaacaagagactgtttgtagtagatgctttctgcggcgcaaataaagacacccgtatggcgatccgttttattgtggaggttgcttggcaggctcatttcgtaaagaatatgttcatcgttccgaccgacgaagaactggctgatttcgaaccggacttcgtagtatacaatgcttccaaggctaaagttgagaactacaaagagcttggattaaactctgagacagctgttgtcttcaatatcacaagccgcgagcaggttatcatcaacacctggtacggtggagagatgaagaaaggtatgttctccatgatgaactactaccttccgttaaagggcatcgctgctatgcactgctccgctaacaccgacttaaatggcgagaacaccgctatcttcttcggactttccggaactggcaagactaccctttctaccgacccgaaacgtcttctcatcggtgatgacgagcacggctgggatgacaacggtgtattcaacttcgagggcggctgctatgcgaaggttatcaacctggataaagagtctgagccggatatctacaacgctatcagacgtgatgcgctgcttgagaacgttaccctggatgagaacggcaagatcgatttcgctgataagagcgtaaccgagaacacccgtgtatcctacccgatcgatcatattcagaatattgtacgtccggtatcctctgcaccggcagctaagaacgttatcttcctgtctgcagacgcattcggagtacttccgccggtatctatcctgacaccggagcagacacagtactacttcttatccggatttacagcaaaactggctggtaccgagcgcggcattaccgagccgaccccgaccttctccgcttgcttcggacaggctttcctggagctgcatccgaccaaatacgcagaagagctggttaagagaatggagaagagcggagcaaaagcttacctcgtaaatacaggctggaacggaaccggcaaacgtatctccatcaaagatacccgtggtattatcgacgctatcttaaacggtgacatccagaaggctccgaccaagaagatcccgtacttcaacttcgaagtaccgaccgagcttccgggcgtagatccggctatcctggatacccgcgatacctatgcaaacgaggctgagtgggaagagaaagcaaaagatctggcaagccgtttcatcaagaacttcgctaaatacgaaggaaacgaagctggcaaggctctggtaaaggctggtccgcagttataatgccagaaataaatggtaaataaatccaagaggtaaacctggtgagatagaaaacctccagtttatttggatgagaaatgtgattctcattcgaatggactggaggttttttgtttcataggaaattacgtcctatgaaacaaaaaacgctccgcgaggatgcacacccgcgcgaagcagaaacatgtcgcaagcgaccgcgcgagacgcccggatgcgccaaggcacattctttttactgctgtaaaacacatgtttggatttgagtatttcgtgaagctgatggttatgctataatagaagcatgtagtgagtttttaactggattttcatgtgtacgctcggaatctttctgtgcttgattttttgagatgattttttaccagtggcgctcaaattttaaattcatagagaagggaggatcctgccatgcagaaaacagtttccaggcgcgcgtacattgccattgatttaaaatcgttctatgcatcggtcgagtgcgtagagcgcggtctggatccgttgacgacgaatctggtcgtggcgaatccgtcgcggacggagaaaacgatctgtctggcggtgtcaccgtcactgaaatcctatggtgtgccggggcgtcccaggttatttgaggtgattcagcggattagggaagtcaatgaggaacgccgcagactggcgccgggacgtcagttccgggataaatcgtggagaaatgaagaattaaaggcggatccgtcgctggcggtcagctatctggttgcgccgccgagaatggcatactatatgaaatggagcacgcagatctaccagatttatctccggtatgtggcaccggaggacatccatgtgtattcgattgacgaagtgttcatggatgtgacggaatatctggggatttacaaggtttcgccgcgcgagctggcaaaggggatcatccgcacggtgttaaaggaaacaggcatcacggcgacggcggggattgggacgaacctgtatctgtgcaaggtggcgatggatattgtggcgaagcacgtggaagcggacaaggacggcgtgcggattgccgagctggatgagcagagttatcgggagcttttgtggacgcatgagccgctgactgatttctggcgggttggaccgggctatcagaagaaactctggcaggcgggacttcggacaatgggcgatattgcgcgttgttcactgggaaaaccgggcgagttttacagcgaggaactgttgtaccagatgttcggcatcaacgccgagcttctgattgaccatgcgtggggctatgagtcgtgcacgatcgcacagatacgggcgtacaagccgcagagtagcagcctgggctgcggacaggtgcttcactgtccgtacacggcggacaaggcgcggatcgtggttcaggagatgattgacgggatctcgctggagctggtggaaaaacggctggtgaccgatcagctcgttctaacggtcggatatgacatcgaaaacctgacccgcccggagatacggaaagtatacaagggaccggtaacaaccgatcgctacgggcggcgtgtgccgaagcatgcacatggaacgtggaatctgccgcgtgcgacttcgtcctcaagcgagcttctggaggcgatggcggctctgtatgataagattgtcaacccggcgcttctcatccgccggatgtcgctctcggcatgtcatgtggtaaatgagaaaatggcgaaagagcgtgaacagaaggaaacttttgaacagcttgatttgtttaccgattacgcaaaaaaggaagcaaaagagaaggaagaacagaaaaaacgtgagcgtgagcgccggatgcaggaagcgcttctgacaatcaagaaaaaatacggaaaaaacgcggtgctgcgcgggatgaactttgaggaaggcgcgaccgccaaggagcgcaacgggcagatcgggggacatcaggcgtagatggaagatcaatatagagtgaatgaatttgaaaacttaaaaggtggacgaagccaaaccccaaaagggcaggaaagtgacgcccagcgccgctacggcgatatcctcggtcattcttacccatttcccttgcgccatgcacggatgccggtggaggaccgggcggcgcagtttgcctcgtttgccgcactgaatggctatgaggaggcggtagaggaggaagcgcgtctgaccgagcgggagatcgatctggatgacagcgtgcgtgagatgatcaatcagacgcttgtggaagcggaggagcagctgatgcgtggcgagacggttcggctttctgtgacctggttccaaccggacgtgcacaaggatggcggcgcttaccgaacggcagcaggacgattgaagaaaatcgactattaccggcaggttttgtggttggcggaaataaggagtggaaatcagcctggacttgaaaatataggcggggagatcgcggtaaattttccacagatctgccgtgtggagctgatagaagaggaagtggagtgaaatgttacatggcagcacagttgctgaagctttgtatggacctcctgaccggcaaaggaaaatatcgttactgtttacgggtaggcacttttggaaccgaaagtgccgtaagaaaacgtggtggcagcaggaatttgccgtatttaaatgcg

SEQ ID NO: 10998 - DNA, 9902 bp, Unknown
  gut microbiota DNA sequence
tcaatattcttttcgctgagaatcttctcaaagattcgatctccaagttgttttattttggtaacaagaaatccgccattcattttcatacaaaaactcctatatagtattttatcaaataatactatataggagttttactgtcaacagtttgtatgtctaagtagaagtaaattccgattgttcgagcttttcaaatactaacgtacttaattctgttcaataagtgatttatagtagttaccaaagtcagcaagtgaattaacaattggaagcatttttgctccgagttccgttaatccgtattcaactctcggtggctgctcatggtaatcgtggcgatatgccagtccatcactcatcatttgtcttaaactatctgtcaaaaccttttgtgaaataccatttgacctcctgccttacagttccaatcttgtagtactttccctcatactcaagtacatcaccaaagagtgccggagttgttgttatctccttaactcctgtgacaaatacctgagatattgttttcatcatcgaccagccatgatcaatgcccattacttctaatctgttatctgcgatactgacttggattttcggttttgatataacagcgctgccttatcccaccgctaaattggtataaaaataagaactaaattagtgctaaccccttgattttactgggtttctctaactttgtccttattataacatcatcatcctggaacggatgaatccgctcaaacttcacatgaaagtccagaatgtcctcaaaggtcttttcttctttggcattatattccatcagcaataccttcattttatcggcaacttcttccggaagggcggtatccataccgccgacttcattcggaagtttctcataatcgccaaccgcataccaatcttttctggaatcgctggtgccgttcttcaaaaccaagtgaagctctttgatgaatttttccgtcagagctgctttttcatgatcaatgatcatgtcaatgcagcagaagtgatttgctgtttcaatcacatcatccacgttcagcacttctttttctacaccgatggtgctggtttcaaagatatatcggggctgatcgtgggtcattcggcttccttctatatggttggaatagtatgtcaaatcaatctgtgttttgtggtagatccctccggagtatttacttgccttctgctctttcagaatatccaacagtgtaacactttttgccgacatatgaaatgcaatttctggatacagaacgccggactccatcgaaaatgaagtccggcaaggtattatctatatacggtttctcttcaattttttgaaacttgcttttaaggagtatatacagtttatgctacagatgcagggcaaatctgaaaagcagcggtgacgaaactgagagcacgcttctcatacaaaggcatctgactcctatcagacccaaccttaaatatcctattaacctccgcccaaagagaaacagggatttcatgtatcgagcaactcaaatctcatccctattatatttcttaacgtgaccgatgtgcattctgtcttttcgtcataccttaaaatatttttgcagcacatgtgagtattttccttgtaatgtacaatgcagatttttctgcatattcccttaactgaaccatgctttccgccatcgaaaccggcagcctgagcgcagcggcggcagaactgatggaatttacgcggaaggatctgattcatgccttcgagtaatttatacgaaaatccgctttttatacattactcgtccttcttcacctgctgcagcacctcctccggcaccgaatccagcagataatttttatgtccgctatgcggtcggttggtatgctcacgtgtctgattcttcacacggtctacctcttcctcaaaatcccgcgccgaatacagcccgcagccctgcccacggatgatgatctgttccagacggtcggaggtcgctaccatcaccgtatatttccgcccattttcatgggcaaatttctcgatgtactggtcagctgtctccgcctctttcgtaaagactacatgaatgttgtggtaatccgtcacctccgtccggtgtccctgcacccggtaggcgtcgaacaccgctatcacctcgataccgcggcttccctgataatcgcagagaatatccagcagcttaccacgggcgctatcaatgttgatcttcgccagctcatttaactcatcccaggagaaaataatgttgtagccatctaccagcaagtattcccgtaccgccgatgccattttccctttggagccgccggttctgctgcccgctccgccactttccggcgctttgcctgcatgttccaattttcctgcatttccagccacagaacttcccgattttccttcacttccagatgccaaagtttcagctgtcccgactttcgaatcgctcttctgtctcaccgcttcctgcctccgcgccgtctctccgtacactccggcaccataggtttccgccgggcgtttgctctttccgccccaccggcgttttccgccgtcttcctttttatttgcatggtaggtgcgagcgagaatcgcatcgacctcgtccgttccgatccacatttcttccgaagcgccgccgccctgtccatccgaggagcgcgcacccagctcagggatcgcatccatccgccgttttccattggaatcgcccaggcagctttccagatgcatgtaatctttgacctcatcccagttgacgacaaatcccgctccgtgcgtacagaaaacagatccgctcgggtttgccaaatccgcatccggatcatacccggctgccgcaatgatttcttcttcattgtggcacggtccgtagccatcgagcgtgcagatcatctgtcccaatccgcccgtgtacgccgtcacctccgtctgatatccatcgagtgccgataccggggcacgtccggttaatattgcctgcccgtcctccagcgccggtccctcaaagacggcaaaccgccgctccagatcggtcattgcacgtcccaccatcttgtccggtatcgtcaggtgaaaggcataaaatggttccaacagcaccgaatgcgcctgcatcagtccctgacggaccgcccggtacacggactgtcggaaatcgccgccttctgtatgtttcacatgggcgcgtcccgatttcagcgtaattttcatatccgtgatcggtgccccaatcagaacaccccggtgtaccttttcttccagatgcgtcagcaccagccgctgccagtttttacttaaaatatcttcactgcaatcggtatcaaacaccagcccgctgcccggttctcccggctccagaagcagatgtacctccgcataatggcggagcggctcaaaatgaccgacgccctccaccgtatcggtgatagtctctttgtatacaatactgcgtccgccaaagcgcacctcgactccaaaccgctccgcaatcaggctttttaagatctccatctggatctcgcccatgatctgggcgtggatctcctttttctcctcttcccacacgatatgcagctccggctcttcctcctccagctgcagaagcttcggaagcatagccgccgcatctacatcatacggaagttccacccggtaggtaagaaccggctccagcactggttctgctcccatctcacagcttcccagcccctcgcccggtttcgtgtgcaaaagtcccgtcgccgcacagatcatgcccgccggtgcctcgctcaccgcctcatacttatcgcctgaatacaagcggagctgatttaccttttcctcgccgatccggtctttgacatgcagcacgccgcccgtgatcttcatataagtcaggcgttcgccctggctgtcgcgcacaattttaaatattttcgccccaaattcgtccggatacactggttccagcgtatattcttccaaactgcgcataaattcttccacgcccgtatttttgagcgccgaaccaaaataacacggaaacagatcccggctggcaatccggctgcggatcgcatctttagacacctgtcccgtctccagaaattcctccaattccgcttcgccgctgactgctacctcttcatagaaactttccgtcccgtccgcaccaaaatcaacgaagttgccgcccagcgactcttttaggtcgcgcaggatctcctgttcccgtcccggcgccagatccattttattgataaaaaggaacgccggaatctggtagcgcgccagcagccgccacagcgtccttgtatgtccctgcacgccgtctgaaccgctgataaccagcaccgcatagtccagcacctgaagcacccgctccatttccgctgaaaaatccacatgtcccggcgtgtccaagagcgtcacatccatatcatcccatgcaagccgcgcctgcttggaaaaaatcgtgattccgcgctttttctccaattcatatgtgtccaggaacgcatcgcccttgtccacccgccccagatggcggatcatgccacccgcatagagcatcgcctctgataatgttgtcttccccgcatctacgtgcgccaggattcccaccgccagtctcttcatgtatgttaccctcatttccgttctatatgaaaaagaatgtgccttggcacattcgggcgtctcgcgcggtcgcttgcgacatgtttctgcttcgcgcgagtgcgcatcctcgcgaagcgttttttgtttcataggacgtaatttcctatgaaataaaaatcactctacccgttatgataccatgtatgtcactgattgtaaaataccgcgtgctgaccagcccgcttctatatcacaaaaaaagtgcctctatttttctttttttcgtgatttttcggattgccaattttatatatttcttataaaatctactctcagagttttataatcgttttttagaaaggatggtttttccatgagccgctcttcgcaacgctctaccataaaagatatgacaaacgggagcccggcaaagctgattctgggctttgcggttccgatgctgatgggacttctgttccagcagttttacagcatggtcgatacgatcattgttggaaaatttctcggtgtcgatgcactggcttcggtcggttccacctccgccatcaactttatgattaacggtttcgtcatcggcgtctgcaccgggttttccattccggttgcacagcggttcggcgcacaggattacaaggacatgcgccgtttcgtcgctaatgccggatggatcgcctcctgttttgccgtgatcatgaccgtgatcgtctgcctgatgacacgccagattctcgtctggatgcagacgccggacaatatcattgacggcgcgtacagctacattttcttcgtattcgccggtatcccggcaacctacctgtacaatacgctggcgggcatcatccgtgcgctcggcgactccaaaacgccggtctatttcctgattttatccagccttttaaacattgcgctggatctgcttttcatcgtacagatcggaaccggcaccgccggagctgcctatgcaactgttatctctcaggcagtatccggtattctctgcctgatctatatgaagaaaaaatttgaaatcctgcatatgcaccatgaggaaacgcgcatcagcggcagacacatttacattctctgcaaaatgggtgtgccgatgggactccagtattcgattaccgcgatcggctcggttgtcatccagactgccatcaactccctaggttccatcgcggttgcctccgtcaccgcaggtcagaagatcggcatgttcttctgctgcccgtttgacgcgctgggcggcacgatggcaacctacgccggacagaacgccggtgccggaaaggtagaccgcatccgccagggcgtccggtccgcgactctcatcggcggcatctactccattgcggcgtgcatcgtgctgaccgtgtttggcggcgtgattccgcttctcttcgtcgatgcctcggaaacagttgtaatccatcaggcgcacctgttcctgaccttcaactccctgttctacatacctctgacaatcgtcaatgtatggcgtttcacgattcagggaatgggctacagcctgctcgccatcctggcaggtgtctgcgaaatgatcgcccgcgccatggtcggcttcctgctggtaccgatctttggctacatcatcatctgttttgcctcgccgcttgcatggctgctcgccgatgcatttctgattccggcattcttctattgccagaaacatttgctgtctgagaaagcacggatggactaaaacaaaataaataatacaactcaaaaaaactcctcagaaagctttcattttgaccactttctgaggaaatttttgattacagattcttattttgggctttcgccaatttgattttcaaagatttttattgttccgtctattcttacacaagcacagttctatgcaaatgatttcatttttgtacagacagagttcacgcattttcactttcctccggctcattctcactccacttatcccgcatttctatctcttctatttccctcttctcatcccgcacgtccctataaaatgccgcaaatgccgcctcctcatatgggcgcagaaacagatagccaatattgagcggtcccatcagccctaccagaaacagcacggtcacaccgctgagccttccctgtgtatacaaaagaaccgctggtattatatattgaatgctgcagatcagccgccagccgataaagctaaaggtcaggcagaataaattccattttttcccatccatcaggcggcgcgactcggtgatcgcctcgttggcggaatattctggatgttccatcagcacatatggtgtcatcgcatagctgtacgtctttatgaaacccggaacgaaaaacaggcaggtccagcaaaatatataaaagccgcgcacaaataccatcgccacgccatctgtgatccgcgaaaactgggaaaataaatcagaaaaggatgcttcctttttctctgccagattcagatggaaacgggcgtatcccatctgccccgcacctccaataataaccaccatcaagccccagataagcaaaagcaccaagggcagaagcatgctgcgcatcagaaatacctgcgtcagcacattcttcacttccggtcgtgcctgtatcactttttgcagctctgatattccatttggcgccgtatcggcaatctccgcaccaatcagggacgctgctaatcccgttcccatcgcaagtttccagtttccgcgcagtgtctcacgcgccatttgcctaaattcagatgcacttctcatgcttttgtcccctttctttctgaaatcattgtatcatttttccattttgaccgtcaatatgccacttcaaaccgtaaataatttgtaataagctcgtaatgattctactgtcgtcaaaggaaaattcagaatgccggaatcactctcccagcattctgggagctgattgagctggcgatccgctggcacttctcatcttccaaatctgccctgcttcctacaatcttcaactgaaatttttagcctgcatcacagacaggttgttttcatttttccctacttcatatacccgcgcagcttcacatattccttgatcagctccgccgtctcgtccagtccgaggcgggtcgtattgatcggaagatcgtagttcttcatatttttccagtcatttccggtaaaatatttataataattcttccgctcattctcaatcttccggatgcgcttcttcgctctttcttcactgatgcagtctacttccataacgcgctgcacgcggcgcacacggtcggcatagacaaagatgcggatcagattttcgatctcctcgtcctgatccagcacatagccagccgcacgacctacaaatacgcacggttcctgttctgccagctcccgcatcaccatcgcctggaatttaaacaggttatccggcgatgtcacatcgcctttcagggacggctttccgaacacatctgccttcttcgcgccagtcagacggtgaagcaggttgtttcccgctttctcatccgctaaacggaaaaattcctctccaaccgcactcttctccgacgccatctttaagatctcatcgtcgtagaaatgaagccccagctcctctgccagcttgcgtcccacaatacgtcctccgcttccgtactccctctcgattgtgataatcagatttttatttcccataaactccaccgcctttctatgtcccagttttatctgcaaaacagcctgtcttttgtctatgcaaatctccatgccgttttcttatttgcatctctttctgcacatcactttttgacacatctttcattccgtccggaatttttctttagatgcgatcgctcacacagatcgcgccgtgcggacggatactcatgcgatatacatttcccttaccggtcgcattttcaatgtattctgtatactcgtccaccagatcattcggaatcatcgccatgatgacaccggcaaatccgccgccatgaacccggcacgcgccgcgtccttttttcgcaataaacagctctgtcagcgccagtgcaatgctgatgccctgctcctgcacgtctgcagtcgtgtatacattctgaagccatttccaggaagaattgcccgaagctgtgattccctccaaaaaggcagcaaaatcattttcccgaagggcctttacttcctgctccactctcttattttcctcaaagaaatggaacgcacgcatcacggaacgatctcccgcaaatgcacgcactttcgccaggtttgcgatcacctcttcctcggaaatctccgcgcagacctctttgccaaagtactgcgctacttttttcatctcgtttggaacggaagaataatctgcgctcagatccgcgtggccttttcccgtatttacaatcatcaggctgtgatcctgcgcgccgaaatcaaaatcaatcttctccacaaccggcgcttccggatttttaaaatcgatcgtaatcagaccgccgaccgcgcatgccatctgatcgagcagacccgacgccttgttccagaacttgttttctgcatattttccgatgtgggcgtaggtgacaacatccatcttttcctcgttaaacatcgtatttaacatagagcagatcagcatctcataggaagccgaagaactgacgcccgccgcgctgataacattgctggtaatgtatgcgtcaaatccgccgaccttgtatcctctctcctcaaagccctttaaaatgccctttgtcaggtcgatggtgccgctcatacccgtgctcggtttcaggtcgcttaaatggatgctgaaattttgatgaaatgtctcacttaatatgcggatcgtgtcggttccgttcggtgccgccgctccgacgcagtccaggttgatgctgcccgccagcaccttgccatgattgtgatcggtgtggttgccgctgatctccgtccgtcccggggaagtaaacagcttgatatcacgttccccatatgttttctcaaagcgctctgccacatagcggtaacgcgcccggttctcctccgctttctctgccccgtataattctgccatcagcactttcgttttctcagattccagctgtttcagtgtttctttgactgacatatcccttctccttttccccaaattgtttgttactgttcacgcatacgtgcccagtaacggaatttgccgtggcttcgcattttaatacggcaaattcctgctgccaccacgttttcttacggcactttcggttccaaaagtgcct

SEQ ID NO: 10999 - DNA, 69044 bp, Unknown
  gut microbiota DNA sequence
gtatataatcaaatataaataagaaaataattattataaattttttgttatagaatcataagtggacaaaagtgccggaaaccctgtagataaatgggaaagaatggaacggaatgagaatgttcacgggcgggaagtttcgggatgaaatatcccgcaggatgcagcgatgagaaaaagcagggtacataggaggaaacatgttcgacggaaaagagtatgtatacgcggtctacgaggaaaagagtttttcgaaggcggcgcagaaactgtatattacgcagccggcgttaagcacggcgatcaagaaggtggagaaaaagataggaactccgatttttgaccggagcacctctccgatcggactgacgccgggcggtgaagtttatatcgacgcgatcgaaaagctgtttgcgctggaacagaacacgctcaatcaactgaataacttaaatgggcttctggcgggcaagctgtcggttggcggaacgatcttttttacctcgtttgtacttccgggcgtgttgagcgagttttcccatcggtatccgcagatcaagattgatctgcaggagggcacgaccacacagctgaccgataagctggttgccgaggaactggatcttctgatcgataactcggaactggatgacaaaaattatgaaaagtattattatagcacggagagaattattctggctgttccgaagagttttccgatcaatgaggagctgatccagtatcagcttaccgcgaaagatatccgggcaggacgccacagtcaggcggagttcccggtactgccgctgccgctcttaaagagtactccgtttatcttcgttaaagaggaaaacagtatttacaagcgcagcatgaagatgtgcagccgccagaattattcgccgaatattatcatgaaaccggaccaggttgtctctgcgttcaacatggcaggacggggcgtgggcgcggccttcatcccggatggcctgatcgtcaatcttccatatgaagtgccgctgtgcttttacaagatgaatgaagagctggcggtccgttacgtttatttgtacaagaagagaaataagtacctcacgaaggcgatggaggagtttatccgcgtggcagtcggcgacgaggcgttccagaaggtacgggagcaacgggagaaagagaatcaggagaagaaaggttcggataagaagggggataaataatgcgaagaggagagcgtgcgattgagtcgaaagacgggcagaaagccattttggaacactgccgggtgtgtagtatcgccttttctggggatgaatacccgtatgtgatcccgttaaattatggttttgtgtggaacgaagaccaggagacgccggtgctgtattttcacggcgctccggtgggaacgaagattgagcatatggagcgcgacaaccgggtggcattctgtgtgcagaatgaaaaagagataaagattctggaaccggcatgcagaagcacgatgatttatgagagtgtctgcgggactggacggttattccgtgtggctgctcctggggagaaaggagaggcactgacaaggatcatgcagcagtatgacccggagggcggaccgtatgagtttgctccggaggtagcggcgagaaccaccgtcctctgcctgcgtgtggaaactctgacaggtaagagcaatgcgccgaaaccggagcaggcatgaaacagttaagacagatgtcgattctggtgcggggggcacagcttctgctgctggtcctcgcactttttctggttgtatggctggtgccggatgcagggaaaaagcatgcatccgggacggaagcttcggaagctgagacagatggcggcgatgtggcggagaatgaaaaaaatagagccgccgggaatctggaggatgatgggtcatccgccggggaagtgatacaggatgatgcagatgagaacgcttcggatgtagaagcggctttaaagcgccagacttcccggaaacagctgtataaaagaaaaaaagtgccccagaaggcacaagaagagacggtttatatgccgccgactatctggctggcgacggatcttcactatcagtccccgcagatgacagatttccagtcggcgtttgatacctatacgatgggaaatgatgggacgatcgtgccatatctggatgagatcacggaggcatttctggaggaggtgcggacggcgcatccatcggcactggttttgagcggagatctctcccagaatggtgagaaagcaaaccatgaagcgcttgcagagaagctagaacgggtgcaggcagcgggaattccggtgctggtgattccgggcaaccatgatattaaccacccgtgggcggcaacgtattttgatgatcaggtatccccggcagagggaacaagttcggaagagttttaccagatttaccataagtttggctatgatcaggcggtgtcccgggcttcggattcgctgagttatgtttaccgcctggatgaaaaatattggctgatgatgctggacagctgcatgtgtgaaccggtccatgagacgggcggaaagctaagcgaagagacggttgcgtggatgaaaacacagctggaggaggcgaaaaaacagggtgtgacggtcattccggtttcacaccacaatctgctggatgagagtacactctatccggaggaatgcacgattgaaaatacgaaagaagtgaccgcgcttctggaagcatatggagttccggtgtatttgagcgggcatctgcatttgcagagaatcaagaagcatacgtcaaatctgaacacaccgggcggatatggaatccgggagatagtgacttctccgcttccgatggcgccgtgccagtacagtatcttaaactggcaggcggatggcagcctgtcctaccatacaaaaaaggtagacatagcaggctgggcgcagcgctacggggaagaagacgagaatcttctcaattttgatgcttatgcggatcagtttctggtagatgtgatttcggaacagacgtttaaggcgctgcagtcggcatcaaaggatatcaaagaagagatggcaaggctctatgccgatatgaaccgtgattattgttcgggcacgaagattgatgtggcaaagatcagaaaaagcgaggcatatcagtactggatccgttacagcggcaatgatttctggctggcaaggctgcaggcgatcctgcacgatgcccggacggacaacacggtgctggagctgaaagcgggcgtggatttcccgctgccgggggagacgatagaaaacccggagaatgcagaaaatgaggaaactgccggagcagatgcgggcagtccggcagaggagatacagaaaaaggaggaatcatatggactacgagggaattgtatacagaccaccgagtgaggcgcgcagcctgatcattcaggtgacgatcggatgtgcacacaacacctgcggcttttgcaatatgtataaagaaaagaagttccggatccggagcctgacagagattctggcagatttgacggaggtttcgcacaatccgtatgcgccgtatatcgataaggtatttttggcggacggcgatgcgctggttatgaaaacagaggatcttctggtgattctggatgcgatccaccgcctgtatccgggcgtgaagcgggtggcttcctacggaacggcacaggatattttgcgaaaatcggaagaagagctgatccgcctgcgtgaggcgggactcggaatcgtctatgtgggcgcggaatccggcgacaatgagattttaaaatatatcaataaaggcgtgacggcggaacagaccattgaggcagggcagaagctgaaacgctgcggcatcgcgacctcagtgacgctgatttcggggcttggcggacgcagcaaggtggaggaacatgccttgtcctgtgcgaagctcatcacggcgatgaacccggagtacgcatccttcctgacgctgcgcctgtacgagggcacgccgatgtatgcggatgtcgtggaagggcggttccagcggataactccggatgaaattgtggatgaaatggaaattttcctgaaaaatgtggattctccgggcacggtattccggacgaaccatgcgtcgaactacgtgattctggcgggaaccttaaacggggatattccggccatgcttaaaaaactggaggaggcaaagagaacgcatcattaccggaaattccgggagaccggcgatctcttataagtggatatgatttatctgatttttgcgattcttttcagcgcgtccctggcgctggcgctgcggatcagtgagacgttcagcgataaccgatatgggattttggttggaaattatgtgacctgcctggtggtggcgtttgttctgcttccagataaaaatatctttgcggcaggcagccggacggcggttctcacgggaatcgtgaatggatttttgtttacaggaaatctggttctgatgcagaaatgcatccgtgaaaatggggcggttctgtcgtcggcatttgcgaagcttggtatcgtgattccggtcacggcgagcatcctgtttttaggcgagatcccaacgctgttccagctggtggggatcgtgctggttattgtggcgatctgggtcatcaacagcgagggggaccgcggctgcggacgcagacggaggatgggttcggcgggacttctgctcgttttatttgtcgtcagtggtatggcagacgggatgtccaaggtgacggagcggatcggcgagagacggtttgatgcgctgtttctgttctatacgttcctgaccgcactggttctgactgtggttctggcatttttcgagcagcagagaacccgccgcaagattggaaagatggactttttgagtggtgtggcagtcggatttccaaactatttttcaacctcgctgctgctggcgagtgtgtcgagactgccggcgtttatcgtgtatccgagctttagtgtcggcacgatcctggtggtcagctttgtgagcgtgctggtgctcggggatccaatcagccggagacagattgggggatgcgggattattttggtggcgttggcgctgctgaatctttaggattttccgtttcggatgctgcgctcataataaaagatatactgctgcattacccctgcgtatcctttatagcttccaaaaaaatcctggataatagtagtgtacaggcggctttttggaaggcggcggtagcggatggggtgtttgggaaggtattctttggtcaggatctgttcaatccaggtatcgacggggaaggcgtcgatgtggtggagtccgaagaggcagacgcagttggcgaccttgggaccgatgccatagaggctggtaagtgcggtcatggcttcgtccggcggcagggctgcgagggattctaaggatacggttccggcgaggacatcctggatgaggcggtggatgtatttggcgcggtagccgagttttaaggttaataggtcgtccaggctggcagatgccagttcttcgggcgagggaaaagaatagtaggtgcggatggaaccgtcggacagggcggcggttctcttcgcaccgtatttttttgccagagcttcgacggcttcgcggatctttgggatggttttctgctgggagatcaggaaggtgatcatcatttcccagagatcctgacggagaatccggatgccggaaccggcgtctgccgccgccgcgaggtaggcatcgtctgcgcggatggaggcgatgaaagagccgtaatcggtgccgagatcgaagtattgtttccagaaaggaagcgcttcgtccgggcagtcgaagaagaaaccgtccggcgtcccggaaatttccagatagtgcgtcccgctgatgagtgaccagatccccggtttttccggaaccggaagcatacggaaacattgaccggaggcggcgatctgggcgaggttcaggttcaggcaggagatgatgtgggagttggggaaagtgtgtgtttcgattgcaggcaggtttgttgtatgtgtgttcatggcagggcatcctcttttttttaaatattttttgcttatatcaatggaatatcaagttataaaaccttgaatcataaagtatcaaatcatgtaattcttatgagacgtatcatagcatagaagacctttgcctgcaaacggttaccttttatcagaaaggaattggttactgtacacgcatacgtgcccagtaacggaatttgccgtggcttcgcatttcaatacggcaaattcctgctgccaccacgttttcttacggcactttcggttccaaaagtgcctacccgtgaacagaaacgcatcagaattgcattagagcgtaaaaaaatcttgcgaaagacgcgctacttaggtatgatgtatatatgtgcgaactcgcgcgaagaggaatcatgtcgcaagcgaccgcgctcggcgcgagaatgtgccagagcacattctttgttctatggcaggaggggagacggatgttttttatcggtggcatcagttccggcgtgaagccgctggagtacctgaaaacagtgatttgcgggcgctgcggcgcttatggtcggtatcaggtgtacatgacctatatgtattttagtttcttttttatcccgatttttaaatggaaccggcgctttttcgtggaaatgtcgtgctgcggtgcggtctacgagctggatccggaggtgggaaagagactgcttcggggcgaggaggtcgagatcacggaacgcgatctgacacttcggcaggatggaaatggaaacccgtggacgggaagtgatgcatcacaccgtcataaggtctgtccgtcctgtggatttgagacggatgaagatttttcgtactgtccaaagtgcggcaaaccgctgtaaggcggggaaatacagatggatatcgctaaaagagtgatggcggctgtgaaagcacgggacggttacagaaatttgagttactgtgcacgtatgcgtgaacagtaacaaatttgatacagcgcagattttggcgcaaaaagaaagagaggcagacaatatgttagaagctggtatcaagggaagacaggaagttatggttacggatgaaaattccgcggcagcagtgggaagtggtctgttaccggtgtttgcaactccggcgatggttgcactgatggaaaaaaccgcgtggatgagcgtggctccgtacttaaacgacggtgagggaactgttggtacaaagctggaaattgcccataatgcagcgaccccggtcggcatgcaggtttggtgcgagagtgagctggtagaggtagacggcagacgcctcgtatttaaggtagaggcatttgacgcgaaaggttccatcggcggcggcacacatgagcgtttcatcatcaaaaatgagaaattcttagcaaaagcacagagcaagaaggaaaactaaaggttgcgaagaaagcacagccggctgaaagcgctgcgagtatcgtatgcgggatgcttttggctggctgttgtttcgtgtaataggaaattccttgaaatttcctattacacaaaaaggcactaacgtgccaatgatgcgcactcgcgcgaagcagaaacatgtcgcaagcgactgcgctcggcgcgagaatgtgccaaggcacattctttttcgttatagaagggaatttattcgtttgaaaatcacatatattcatcacagctcgttttcagttgagcttgaaaatgccgtgattctgtttgattattttaagggaactctcccggagtttccggcaggaaagccgctttttatctttgcgagccatttccatgccgatcattatgatccggtgatcttcgggatgggagaaaaacgggaaaatgttttttatattctctcaaaagagattgggaaaaagataccggaggaatatcgaaaacgatataaagacagaatacggctggtaaaggcaggagaaagattttgcctgaatatttctgaagaaagccttatcgttgagacgttccattccaccgacgaaggcgtcgccttctggctctcctgcgaaggaaaggagatttatcatgccggtgacttaaataactggtggtgggaaggcgaagatatggcttggaaccggaatatggcggcttcttataaacaggagatgaaaaagctttccgggcgcacggcagatctggcatttatcccggtcgatccgaggcaggagcagtggttttatctgggcgctgccggttttatggagcaggcggacacaaaatggattttcccgatgcatttctgggaagattatacgattataccaaaattaatcgaacatccatccagtgaaggctggcgggatcggattgtagagattcacaaggaaggagaggagtttattcgatgaaatttacatttgcacacaacaatttcaatgtcatcgatctggacaagtcactgaaattttatgaggaagcactgggacttaaggaggtacgccgcaaggaggcggcagacggaagctttatccttgtttatctgggcgacgccacgaccggctaccagctggagctgacctggctgcgcgactgggagaaggactcctacaacctgggcgacaatgagttccatctggcatttgagacggaagacatggaggcggcacatgccaaacataaggaaatgggatgcatctgttttgaaaatccggcgatgggtatttatttcattaacgatccggatggatactggctggagatcgtgccggcgaagaggagttaagggctgagtttgtctgaaaaaatgttttgacgtaactgtgaaggtactgaacagttacgttttaacatatgagttaaaaaggggttagaatggtaaaaataattaaaaacggtagagtcatcgatccggagagcagattcgacggaagggcagatttgtggattgaaaatgggaaaatccagaaaatcgtgaaaaaagatacaaaagcagaatcagatgcggcatctgacgcaccgtccatcccggcagatgccgaggtgctggacgcagaagggctgatcgttgcgccgggactggtggacgtccacgtgcatttccgcgatccgggtctgacctacaaggaggacatcgagacgggcgcggcggctgcgaaggcgggcggctttacgacggtggtttgtatggcaaacacgaaaccggttgccgacacgccggagattgtccggtatattctggaaaagggcgcgaaaacgggaatccatgtggaaacctgcgcggcagtctcgaagggatttcagggaaaagaactgaccgatatggacgccctcaaagaggcgggggcgatcggatttacggatgacggaatcccgctgatgagcgaaaaattggtcaaagaggcgatggagacggcgaaacgcctcaatgtgccgctcagcttccatgaggagaatccggcgtttattttcaacaacggcatcaaccgcggtccggtgtccgagcagctgggaatcggcggttccccggcgctggcggaggattcgatggtggcgcgcgactgcatgatcgcgcttcacacgggcgcagatgtggatatccagcacatcagttcccgcaatgcggtgcagatggtaggtttagcgaaaaagctgggcgcgcatgtctggacggaggtgacaccgcatcattttacactggacgagacggcggttctggagtacggaacactggcgaaaatgaatccgccgctgcggagtgccgcggatcgcgaggcgttgattgaggcaatcaaggacggcacgattgatatgattgcgacggatcatgcaccgcacagcgccgaggagaaggcaaaaccgctgaccgaggcgccgagcggcatcatcgggctggaaacctccctgccattggcggttaccagactggtaaaagctggtcacattgattatctgactctgtttgagaaaatgtgcctgagtccggcgaagctgtaccggatgaaggaggcgggacgcatccgcgagggcggcgcggcggatctggttctttttgacgaccagacaccatataccgtagaaaaattccattccaaggcgtctaactctccgtttgtgggagcgaagctctatggaaaggttcactataccatctgcagcggtgagacagtatatcgggcagaataggaggaaacgaagcgatgaagacaatgttaaaacgcggcgcaggcgtgctgatgccgattttcagcctgccgtcgccgtatggaatcggtacgttcggacgggcggcgtatgagtttattgatcagttaaaacgcggacgccagacgtactggcaggtgcttccgatgggaccgacctgctacggggacagcccgtaccagtcctactctgcatttgcgggaaatccgtattttattgatctggatacgctgaaagacgagaaacttctgacccaggatgagatagacgcctgctggtggtgcgacaagcaggatcaggtcaactatgacgctctgtattattaccgttttccgcttctgcgcaaggcgtatgagcggagcagccataaggaaagtgtggaatatcaggcatttctggaagaaaatgaagaatggctggacgactatgcgctctacatggcagtcaagggtaaatatgaaggaaaaggctggatggactgggacgaggacattcggttccgccgtccagaggcgctttcggcatgccgcgaagagctggcagaagaaataaattactggaagttcttacagtttaagttttttgaacagtggaaaaaattaaaacagtatgcaaaagaaaaagaacttcagatcgtcggcgatattccgatttacgtggcgctcgacagcgcggatgtctggagccacccggagctgttccagctcgacgaggaaaatctgacgccgctcaaggtatcgggtgtgccgccggatgcattttcagaggatggacagctctggggcaacccgctttacgactgggagaaaatggaacaaaccgatttcgcctggtggcgaagccggatgaaagcgtccgcggagctctacgatgcggtgcggatcgaccatttcatcggcgtggtgcagtattatgcaatcccgtatggcgctgtgactgcgaaagacggcgagtgggagaaaggtccgggcaaaaagctgaccgacgcacttgacgaggcggcaggcgagacgaagatcatcgcggaggatctgggtgtcttctgtcaggaggtcaaggatctgctggcagagacgggctatccgggcatgaagatcattgagtttgcgttcagtggcgatcgtttcaacgagcatctgccgcactgctatgacccgaactccgtagtctacggtggaacgcacgacaatgagacgctggcggggtatttcaaaccagaaaaacgtcagtggtgggagctccagtacattgccgattatctcggtgcggcacatcagagtgaggtggtagaccgagtgttccgcgcggcatacggttcggtggcgagcgttgccattttccagatgcaggatgtgttgaagctcgataactgggcgcgcatgaatacaccgggaaccctgggggaaaactggcgctggcgtctggttccggggcagtttacggatgagcgggcagattatttgtcctggctggtggatacgttcggaagattttagtttcacgcggatgggaataaaaacccgtaaaatgcttgcaaattcgggaaaaacctgtaaaatatacatggattgcacccgcccggggcaaagatgcacctggggagtatgaacgatttgaacagtatgaaaggaaattgccatgattagtacaagcaatgtaacactgcgagtaggaaagaaggcgttatttgaggacgtaagcattaaatttatcgagggaaactgctacggactcatcggtgccaacggtgccggaaagtctacctttttacgaatcctgtccggacagctggaaccgaccaatggtgaggttatcatcacaccgggacagagactttcattcttacagcaggatcactttaaatatgacgcatatccggtacttgataccgttattatgggaaatgcgagactctacgagatcatgaaagagaaggaagccatctacatgaaggaagacttctccgaggaggacggcgtcaaggctgccgagctggagggcgagttcgccacgatgaacggctgggaggcagagtccgatgcggcgaaccttttaaatggtctgggaatcgagacagatctccactacaaacagatggcagatctgaccggtgcccagaaggtcaaagttcttctggcacaggcactgttcggaaacccggacatcctgcttctcgacgagccgacaaaccacttggatctcgatgcgatcgcatggctcgaggagttcttgatcaactttgagaatacagttatcgtggtatcccatgaccgttacttcttaaataaagtctgcacccagatcgcagatatcgactatggcaagattcagctctatgccggaaactacgatttctggtacgagtccagccagctgatgatcaagcagatgaaggaagccaacaagaagaaggaagagaagatcaaggagctgcaggagttcatccagcgattttctgccaatgcttccaagtctaagcaggcaacctccagaaaacgtgctctggagaagattgagttagatgagatcaaaccgtccagccgtaagtacccgtatatcgacttccgtccggaacgtgagatcggtaatgaggtattaagtgtagagaacctgtctaagactatcgatggtgtgaaggttcttgataatatttccttcattctcggacgcgaggacaaggtagcatttgtaggaccgaacgagcaggcaaagaccgttctcttcaagattctttccggcgagatggagccggatgagggatcctataaatggggtctgaccaccagtcaggcatatttcccgaaggacaattcgaaagagttcgataacgacgacacgatcgtagactggctgacccagtactctccggttaaggatgtgacctatgtccgcggattcttaggacgtatgctgtttgccggtgaggacggcgtgaagaaggtccgcgttctttctggtggtgagaaggtgcgctgcatgctttctaagatgatgatctccggttccaatgtcctgattctggacgagccgaccgaccatctggatatggagtccattaccgctctgaacaacggtatgatcaagttcccgggcgtgctgttattctcctcccgtgaccaccagatcgttgagacgaccgcaaaccgtatcatggaaatcgtaaacggcaagctgatcgataagattactacttacgatgagtatctggcaaacgatgagatggcgagaaaacgtcaggtatttactgttacggatagtgaggaagaggacgactaagagctggaatcaaagtgatttagacaaaagtctgaaagataaaagacagccccagacgctgcatgtgagcgatgcctggagctgtcttttgcacatctatggtgtcaatgtcccgtttttggcgcgatcaatccttcttatggcgtgattccagataaaccaggtaattgatgtattcgatcaactgctttttcgtggaagtctggaatgatgagatacgcccattgacctctccataggtgacatttttaagaaatggtttcgccatttcgggcggattcttcgggtaggaggttcgaccgagaatataatcggcgctgacctggtaataatccgccagttttatcagatgccgaagaggcagatccgtccggtttgtttcatagcgggaatagatttgctgagttgtacccagcagactggaaatttccgcctgcgtttttcctttgtcctcccgtaaatcacggagccggtcaccagcagcaatcatttaaagcacctcccgcatacatcaaatatttgtgaaaacaatctatcatacaagtatgcgcagaactaaaagatacaattaactggtgtagaaacagtaaaaaatacatttataaaaatgtaaacaaaaagaatatccgctctatggaataaaacggcagccgggtttttgttttactgtttacagtctgcccgaattagtttaaaataaaaggaaacaggcaattctgctttgaatgaaaacgggcaggattgtggataagaaacagaaagcgaggacaattttcatgagtcagaagccagttctggtgatcatggcggctggtatgggcagccggtacggcggtttgaagcagattgatccggtcgatcgggaaggagatctgatcatcgatttttcgatcttcgacgcagtcgaggctggattcgaaaaggtcgtatttattatcaagaaatcgattgagaaagagtttaaggaacatattggaaaccgcatggaaaagcacgtgcaggtggagtatgtgtatcaggaaaatgaccgtcttccggatggatttgaggttccggagggacgcgtcaaaccgtggggaaccggtcatgcgattctctgctgcagcgaggtgatcgacggaccgtttgcggtgatcaacgcggatgattactatggaaaatcggcgttcaaggcgatctatgatcgtctggcatcctgcggtgatgatgacaaatatcagtatgcgatggttgcctatcatctctacaacacattgacggaaaacggccatgtggcgcgcggcgtctgtacagtggatgcggatggacatctggcggatatccacgagagaacgcgcatcgagaagcacggcgatcaggcggaatataccgaggatgacggcgcaacctgggagcagctgggggaggatacgcttgtatcgatgaacctctggggctttacttccagcatcttaaaggagttaaaggcgcgctttgttccatttttggagaaaaacctgtcggtaaatccactcaaatgtgagtatttcctcccgtttgtggtggatgaacttctgaaagaggggaaagccgaggtgaccgtgttaaagagtgtggaccgctggtacggcgtgacctacaaggaagataagaagatggtgacagatgcgatccaggggatgaaggacggcggtctgtatccgaaaaaactttgggaagagtaagaatgaagagataggtattaggaaggaaaaatgggtatgagcaagttgatgaaaagcctgccgtttcggctggcgctgggtgtagcgatcggtattattgccggtcttatagcaaatgaaagttttatgaatctcgttgtgacgctgaattatatttttgggcagattatttcgttctgtgtaccgctgatcgtcatcggctttattgccccgtcgatcacgaagcttggaaagaatgcctccagattgcttggagtagcgctgattctggcgtatacatcgtctcttggcgcggcgctgttttcgatggcagccggatatacgctgattccgcatatgtcgattcagtcggcagtcgatggactgcgcagtctgccggaggttgtctttaaattggacattccgccgatcatgggcgtcatgagtgcgctggtattttccgttatgattggtctggcagcgacctggaccaaggcggtgacggtaacgaaactcttagacgagttccagaagatcgttctggagattgtacagaagattgtcattccgattcttccggtttacatcgcatttacgttctgttccctggcatatgagggaaccatcacaaaacaggctccgatcttcatttcggttatcctgattgttatggcaggccactatatctggatggcgctgctgtatacactggctggtatttactctggccgtgacccgagaggcgttatcaagcattatggtccggcatatctgacggcagtcggtacgatgtcttctgcggcgaccctggcagtggcgctcagctgtgccaaaaaggcagagccgcttcgtgacgatatggttgatttcggtattccgctgtttgcgaatatccatctgtgcggttcggttctgactgaggtattctttgtcatgacggtatccaagattttgtacggcgccctcccggatatgatgacgatggttctgttctgtgttcttttaggtgtatttgccgtaggtgcaccgggtgttccgggcggtacggttatggcgtctctgggactgatcaccggtgtcctcggtttcgatgcgaccggaacggcgctgatgctgacgatctttgcgcttcaggacagttttggtactgcctgcaacgtaacgggcgatggcgcgctgaccctgatgctgacgggatatgtggagagacatgggattaaacatcaggatttacacgtagatttataaaaatgagagaggtggggcaggcagcagccgccccgaaactgctctgcatccacagaccagtttcggagcgtctgccacctgcctgctgtctttttatgtatcggaaaaactttatttgataaaaaggagagatagaatgaaaaaaatgatttcctggaacgtaaacggcttgcgggcgtgtgtggggaagggatttctggatgtattccatgagctggatgcggatattttctgtattcaggagagcaagctgcaggaagggcagattgatctggagcttccggggtattatcagtattggagctatgcagagaagaagggatattcaggaacggcgttgttttcgaaggaggagccgcttagcgtgagctatggtcttggcatcgagaagcacgatcatgaagggcgcgtcattacggcggagtacccggattattatgtggtgacctgctatacgccgaactcccagaatgagttggcgagacttccgtaccggatgcagtgggaggatgatttccgccagtttttgaagaagctggaggagaaaaagccggttattttctgtggggatctgaatgtggcacacacggagattgacctgaaaaatccaaagacgaaccggaaaaatgccggatttacggatgaggagagaagcaagtttacggagcttctggactctggatatatcgacacgtaccgctatttttacccggataaagagggcgtttattcctggtggtcgtaccggtttaaggcgcgcgagaagaatgctgggtggcggattgattatttctgtgtttccaagagcctgaaggaccggctggcgggcacacagattcatacggagatactgggttcggatcactgcccggtagaattacagataaaggatcgggatgagacatgaatttactgacagcagaacatctgaaaaaatcatatacggaacggctgctttttgatgacgtggcattttccatcggtgaaggtgataagattggtctcatcggcatcaacggaaccggaaaatctactcttctaaagattgtagccggtctggaagagccggatgagggtacggtggtaaagggacgaaatctctatatccgttatctgcctcagaatccggagtttgaagcgggacggaccgtcttagactgcgtgatccgggaaaatatggcgcatgagcacgcctgggatctcgagggcgatgcgaaatccatgctgaataagcttggaatcaccgattatagtgccaaggtggagacactttcgggcggacagagaaagcgcgttgcgctcgcagcggtgctgttatcgacggcggatttgttgattttagacgagccgacgaaccatctggacagtgcgatggcggactggctggaagagtacctgaaaaaattccgcggtgcgcttctgatgatcacgcacgaccggtatttccttgataacgtgacgaaccgcatcgtcgaactggacaagggaaagctgtacagttatcagtccggctatgagggctatctggaattaaaggcagagcgcgaggcgatggcggtgagctcggagcagaaacgccagaatatcctgcggacggagctggcgtggatccgacgcggcgcacaggcacgcagcacgaagcagaaagggcgtattcagcgcttcgaggcgttgagtgcggtggaagcgccgaaagtagatggaaatgtggagatgagctcgatttccagccgtctcggacgaaccacggtcgaagcacaccatcttcataaggcgtatggtgaccgcctcctgatcgatgatttttcctatatcttcttgaaggatgaccgcatcggcatcatcggaccgaacggcagcggcaaatcaacgctgatgaagatgattaccggctgggtgaaaccggattcgggcgagacgatcatcggccagaccgtaaaaatgggttatttttcacaggaaaacgaagatatggatcagtcgatgcgcgtgatcgactacattaaaaatgtggcagagtacgtgcggacggcggacgggctggtatcggcatcccagatgttggaacggttcctgttcccgtcccatatgcagtacacgctgatcggcaagctatcaggcggcgagcggcgcagactctatctgctccatatcctgatgggcgcgccaaacgtccttctgctcgacgagccgaccaacgacctcgatatcggcacgctgacgattctggaggattatcttgatcatttccaggggatcgtgattacggtatcgcatgaccggtatttccttgatcgcgtagtgcgccggatcttcgcctttgagggcggaggcgcgatccgtcagtatgagggcggctataccgactatcaggcagcctgcggggaacgcatagcggcagagatggaggaatccggtcaggaacacggcagaggtcagaagaccggaggcgcttctggtgtgggaacgtcagatgcagcggagacggcaaaggataaaaaccgcggtcgccagcgcgagaaaaagctcaaattcagttatatggagcagaaagagtgggagacgatcgaggatgatatcgcggcgctggaagaggcaatcgcggatctggagcagcagatgcaggactctgcccgcgattatacggctctgaacggcatcataaaggaaaaagaggaaaaagaagctcttttggaagaaaagatggaccgctggatgtatctgaacgatctggcggaaaaaatagaagcgcaggcggctgctcacaaataggcacttttggaaccgaaagtgccgtatgaaaacgtggaggtggcagattttgccgatttggaatgcgaagcatcggcaaaatcctgttacagtctgcatatgtgtggactgtaacaggcgcaggcggctgctcacaaataggcacttttggaaccgaaagtgccgtatgaaaacgtggaggggatacaggtgaaagcagaaaaaatcgtgagacagaagataagaacccctgattttacaccgggaatcaagcggacagagacgggaatgcacttgtgcgtcgaggcaccggggacattctgccatctgacaatttatgagacaggtaaaaaacagggtgtccggatcccattttccccggaagaacgggtgggggatctctggatgatggagcttgcgggcgatgatttttcgggactggaatacacgatcgagactgagcagggggagctgccggatccgtgcgggcgcatctatacaggacatgagcgctggggcgatttaaaagcggcgctccgtccggtgcgctgccgtttcccggaagaaacgtatgactgggaaatggatcagccgctgaaacatccgtatgatgagacgatcctgtaccggctgcatgtgcgcggatttactcgtcatacttcttccggcaccggggagcggggaacgttccgtgcgctgacggagaaaattccctatttaaaggaattgggtatcacagcagttgaattaatgatgccgaatgaatttcaggaagtgatgatggaggatggggcagacgggaatccgtatgcgaccgggacaccgaccggacggctcaattactggggctatggggcgggatacctgtttgcgccgaaagcttcgtacacatccgggaaagagaaagaaccggagcgggaatttaaggatctggtgaaagaatttcataaaaatgatattgaagtgctggttgagctttattttaccggcgaggagagcgcggcactggcgcaggaggcggttcgtttctgggtttacgagtatcatgtggatggcgtgcacctgtccgggtttgcgccggccgaactgctggcgtcggatccgctgttagccgatacgaagctattagctggttcctgggatggcgtgcgtgtgccaaaaacggcagcggcaccgaagctgcgggagcgccgctggcatctgggcgagtacaatgaaggatttttgatcgatatgcgccgggtattaaagggcgatgaggatcaggtcggccgtctcatttaccagacacgccggaatccggacgcgtatggcgtgatcaactatatggcggcgacaaatggctttacgatgatggatatggtttcctgtgagcagaagcacaacgaagcgaacggggagaataaccgggacggaagcgattataattatacgtggaactgcggtgtcgagggcacgacgcggaaaaagaagattgtgcagatgcggaaaaaacagctccgcaacgcatttttgctgctctttctgagccagggaacgccgatgtttttagcgggcgatgagttcggcaattcccagaacggcaacaataatgcttactgtcaggacaatgagatttcctggctcaactggcatcagctggagacgaaccgggatatttacgaatttgtaaaatatatgatagcgttccgcaaagcgcatccagtgttccatctgccggtggagccgaaaaatattgattacctcgtctgcggacacccggatgtttcctaccacggcgtcaaaacatggtgcccggagtttgaaaatttccgccgccagctcggcattctctactgcggcgagtacgggcgaagagcggacggcaccagcgatgactatttctttgtcgcctacaatatgcactgggagccgcatgaatttgatcttccgaagcttccgaagggaatgcagtggactctgtgcatcaacacagacgacgcagacaataacggaatctgtccgccggatagcctggaggcagggcaggagccgcaggaagagcttcgccagtatatggttccgccgcggagtattctggtatttcgcggctttaagctaatttctggtccggcatccgaaaaggatggcaaaaaagccgggaaagtggtaaaatcggtaaaacggcagaatgtcagaaaagaaccggcaaaggaagcggagactgtggttgcggcagcgcgcgaactgtaagaacggaattgaaagaggataaagcaagttgaaaaagaaactttttagagggctggcagccgccctgtgtgctgccatgatggcagggagcgcggcgcttccggcatatgcggcgggtccgtcacgggagtcggttccctatgcggattcctatgcctcctatcagtgggcttttttaaatacaggtgaactgcgtctggtgccgagccatacggcggcggtggatgcagcgattggggcgattaccggcagcccggcgttctcagcagatggaacggtccgttctctggaagggatcgatatgaatattgtcccggcatggaagaaatatgacgcgaaaagtggaaaacgtcaggtgattgtggcgctgattgatacgggggttgacataactcacccggagcttggcggttcgatctggacgaatacgggggaaattccgggcgatggcattgacaatgacggaaatggttatatcgatgacgtttacggctggaatttctatgataataatgcccaggtatttaccgggacggatgacaatcatggtacccactcggcgggcacgatcgcggcggcgagaaatggagtcggaacggttggaatctgcgatccggcgtatgtgaagatcatggtgatcaagacgcttggaacatcgtccggtgtcggaaccgtcagcaacgtggttaaagcgatccggtatgcgcaggcgaatggcgcgtcgatctgcaatctgagctttggcacgatgaaatatagcgaggagctgtatcaggcgatcaaggattcggggatgctgtttattgtggcggctggaaacggcgacgcctccggcaatggctacagcatcgatgagcagccgatgtacccggcaagctttgaactggacaatatcatttccgtggcaaacctgcgctttgacggtcagctcgaccgtgcgtccaattacggagtgagaagcgtggatctggcagcgccgggcaattatatcctgagcacgatcacgggcaatgactatgcctacatgagcggcacgtcgatggcggcaccgatggtaaccggaacggcggcgatgctgtactcctgcgatgcgtccctgtcgcttatggatgtgagaaaccgtattctgcagtcggcgcggccgcttgagagtctgtccggcaaagtggcaaccggaggtatgctggatgccggggcggcgatgccgtagatgagaaaaacgaaaagaaagattgttaaaaaaatattgaaattcttgtttgtatatgataccatgaacgggtgagataattgccccgcagattcatatgtttatatgtatgaagacggagtaattaccatgatttcttcggggcagggcgaaattccctaccggcggtatagtccgcgaaccgcgatggcggccgattcggtgagattccgaaaccgacagtatagtctggatgagagaagaggcaggagtcagagagtgtaccgcttgagcgtaagcaggctggtgtacatcggctaagttgcgatttattatcccaggtcccgaacaacctgggattttttagttttacaaatgcagctagtccggcacttgattcatactcctccttcggagaaatgagttttaaaaccgaaaggagatttaagatgaagacaggaaaatggagtattcaaaaattgatttatacggcgatgctggcagcggttgctggcgtgctgatgtcattggaattttcggttccgatgatgccgccgttttataaggtggatttcagtgatgtaccgtctgtgattgccgtgtttctgatgggaccggtatccggtatctgtgtagaagtcatcaagctgttaatcaagctgattactgtcggaactaacacgatgtacgtcggtgagctggccaacctgattgcggcgttcctgttcgtatggccgctgtggttcctctatcagaagctgggcgctaaccgtaaggcagctgtagaagcacttctgctcagtatcgtgatccgcaccgcgtgtgcatgctttatcaatgcgaacattacgcttccgttatatgcgaaagcgatgagcctgccgctggatgaagtgatccgcatggtagcgtcggtcaacccggcgatcaaagacctgaatggatttatcatcctggcgacgatcccattcaacgtattgaaagtgggactcaactatatcgttggacagcttttgtttgtacgcctgcgtgcggcgaagattgtgccgaaagcagtataaaatgaaataagaggaatggtttgacggatttggctgtttgctgtgaaacggcagaaccatttcatagaaaggattgtcgggaaaccgctgggaaagctgcctgggggaagaatcccggacaatccttttttgtttgatggaacgtgcaaagacatatctgtttttataagaggaggagatactatgatacgtaactatagagatttgacaagatgggaaatggagcaggtggaccgtgagaacacgattgtcctgattccgctcggggcgctggaacagcacggcaatcaggcaccactgggaacggatgatattatcgcggaggcgatgagtcaggagatcaaaaaggcactggaggcagagggggaagaagacttcccgatgctgctgtttccggtgattccggtgggcttaagtacagagcataagaatttctgcggttcggtcacagtccggccggacacttactatcatctcttatatgatatatgcgtcagcctggcgcatcacggttttaagaagctggcttttttggtatgccatggtgggaatgcgccgattgcgcaggttttaagccgggaacttcggagtgagctggggattgcaccgtttatcctttcatcgggggcatttggtcatccggatgtaaaagcaacgatttcaaaggggaatatctgggatttccacggtggagagatggagacatcgatggtaatggcggtcgatgagagtcttgtgaagctggaactttcggaagcgggagagccgacggcgtttgagaagacccgcgccctgaagccatacggtccggtttcgatcggctgggtgtcggaggactggaaaacaaaagacggatcgccgattggaattggaggagatccgtctggtgcaagcgccgagaaggggcgaattatattagagacgagtgcgcgggaactggtcccggggctgttagatatccgggattggaatgaataggaatcaaacttaaaaatggggtgtctatgtcatccgaataccagtgttatttaccagattcccagcgtccggatgcaccgcatggtaataccagtccggtgcgggtaaccggaagtcccagctcgtccgatttcactgtgccgccgtgggtggaggcaacttcggttgagagcatataggtcaggacggacggcgccagcccggtggtgtaggagttgatgaggaagaagagcgggttgtccgataacagtttcgtacagagctgcacgaacgggtaaatcgaagtttcgatcttccagatctcgcctttcggtccgcggccgtaggacggcgggtccatgatgattccgtcgtaatggttgccgcggcggatctcacgctcaacaaatttcacacagtcatcgacgatccagcggatgggtgcattttccagcccggaggaacgggagttttccttcgcccaggctaccatgcccttggaggcgtccacatgggtcacgctggcgccggctgcggctgccgccagggtagcgccgcctgtgtaggcaaagaggtttaaaaccttgattgggcgtccggcattgcggatgcggtcaccgaaccagtcccagtttgccgcctgctccgggaagagacctgtgtgcttgaagctgaacggttttaagttaaaggtcagttctttgtaatggatcgaccactgctccggcaggtcgaaaaattcccattcgccgccgcccttggagcttctgtggtagtgtccgttcatctttttccagccgcggtgtgtcttgggggtgttccagataacctgcgggtccgggcgaaccagaagatagtcgccccaccgctccagtttctctccttcggagcagtcaatcacttcataatcgttccatccatctgcaatccacataaaattttatcctttcaaaaaaatgaggcgcaaaccccggaaaagggtatctgccgcctttataatcggtgttatccataagccatttccatccaaatggcataaatggttactgttcccgggtaggcacttttggaaccgaaagtgccgtaagaaaacgtggtgacagcaggaatttgccgtatttaaatgcgaagccacggcaaattccgttactgggcacgatgcgtgcacagtaaccataaacgcagtctgtctgaccggaaaaacggttcagttgaaatgcatacctaattatatcggtcattgattggcgtgtcaaaccttttgaacggcttcctgccaaaaaaagtaaataaattgaaagataaatctccttgaagattcctacatctcctgttaaaatgtatattaggtaaaagatagattgcacgtatctggaacaaaacaaggcgttataagcatctgatgcagtctccacacgacgggaagtgtgcgaatgcgcagcaggtgggagaatagacgttatcaatcgtgaactgggagggcttgtatatgaagaaacagaaactggcagtctgcgtcctttccgcagcgctgatgataggggcggcgaccctgacatcttacgcggcagaaggctggcagcagtctggaaacagctggatatatgtggacaacaatggcaacaaggtgacgaatacctggaagaagggagcagacaatctctggcgctatctcgattcccagggcaacatcgcgtcgaactgctgggtggacgacgaatactttgtcgagagtaccggcatcatggcgactgacaagtggctgaaactgccgaagcgcaatccggcatggaacgagacttccgctacgacggtctggtactatttctccaccagcggaaagatggtatccgacggctggtccaagatcggaggcaagtactattacttcgacggtgatggagcgatgcagacgggctgggtggatgatgacacctactacacgaatgcagatggtgtcatgcagatcggctgggcatatctggaagatccggatgataccaaaaaggacgatgatgaagtgaaacccggcgacgacgatgaggatcatcattggtactactttcagagttcgggaaagaaatatgtgccttctttaggcagtgccaaatataaacaatataagattgacggaacctactactgcttcgacgaaaacggagcgatgcagaccggctgggtcgatatgggaaattcctctggatttgaaaattaccgttattatcagagcaacggtcaggtacagactggctggctctccacgactccgccggaggatgatgattacaatctggatctcggcagcgatgtacagtggtattatttttcaagcaacggcgagccgaaggtgggtccgaagatttctgacgcttcgacgagcaacctggtccgcatcaacaatattacctacttatttaatgagaagggcaacccggtctatggtctgagacgtctggaggtaggaacgagcggtcagtatgcctgctatttcttcggcgcggacaaggcgaccagctcagtcgtaaaaggcaagggaaatgtagtagagggcgacggaacgaccggacagttctatttcactgacagcggcaacaaggctggacgcggctactcaggtgtggaggatggattcctgtactacatgggtaagcttcagaaggcagacagcggtactaagtatgaagtcattgaagtcaatgacaaaaactatctggtaacgacgagcggcaaggtagtgaaatccagcaccgtgaaggatgcgaacggcacaaagtttaagacaagctctgcgggtgttgtcacagaggtggacggcacaagcgacgatggcagcgacgaggctagaaccccggtggaaccgacgtattgggaggattaattaaaaaagctgggagtcttctcgactgagataaaatttctgcatggaaatatattcttgtggataaacaggagtttcttctatataaaaggtgtaattacccaccggaagaagaaactcctgttttttcttgaaaaatatagattttttcttaaaaaaacacttgcatttcccggaaagctgtgttattataacgaagctgtggcatgatagcgatgaaacgagaggttgctgcttatgataagcaggttattccgcggagcgaatgtcaagttaggaaactggcgacaagtcactgtacaagaatagagtatcctgaagacaaatgacggatttggtgtgtggactgcgaggacacacacgggtatgtgtacagtcaccgcttgtcgtgcttaatagtacgaaaaggaggcgactttttttatggcaagtcaagtaatgagaatcacactgaaagcttatgatcatcagctggtagatacatccgctgcaaaaatcattgagactgtaaagaaaaacggatcaaaggtgagtggaccggtgccgctgccaactaagaaagaggtagtaaccattctgcgagcagttcataagtacaaagattccagagagcagttcgagcagagaactcataagagactcatcgatatcattgctccgagccagaagacagttgatgcactgcagagactggaaatgccggctggcgtgtccatcaacgtaaagatgaaaaacaaataattaagaatcctatactagtttagatagagacatctggacagttctaggatgaacgcgggagtttgacgaacgcgttccgctgtagaaaaacaggaggtcagattaatgaagaaagcgattttagctaccaaagtcggaatgactcaaatcttcaacgaagacggagttttaactccagtaaccgttcttcaggctggaccgtgtgttgttacacaggttaagacagaagagaacgatggctacaaagcagtacaggttggttttgtagacaagagagaaaaacttgtgacaaagccggttaagggtcattttgacaaggcaggcgttgcttacaagagatatgtaagagagttccgcttagagaatgctgaagagtattctgtaaaagacgaaatcaaggcagacatcttcgcagcaggcgataaaattgatgcaactgctatttccaaaggtaaaggtttccagggtgccatcaagagacacggccagcacagaggaccgatggctcacggttccaagttccatcgtcatcagggttccaacggttctgcaaccacaccgggacgcgtatttaagggcaaaggaatgccgggtcacatgggcagcgtaaaagtaactgttcagaacctggaggttgttaaggttgatactgagaacaacttactccttgttaaaggctctgtaccgggaccgaagaaatccttagtaacaatcaaagagacagtaaaggtcgctagataaggcttttacgggaaaggaggaacatacagatggcaaacgtatctgttttcaatttagaaggcaacgaagttggcacattagaactgaatgatgctgtattcggtgtagaagtaaatgaacatctggttcacatggcagttgtagcacagcttgctaacaaacgtcagggaactcagaaagcaaaaacccgttccgaagtttccggcggtggtaagaaaccgtggagacagaaaggtaccggacatgcaagacagggttcaacaagagctccgcagtggacgggcggcggcgtagtattcgctccgacaccacgtgattatacaatccgtttaaataagaaagagaagagagctgctcttaaatccgctctgacaagccgtgtaaacgagaacaagttcatcgtagttgaggctatgaacttcgacgagatcaagacaaagaaatttgttgaggttatgaacaacctgaaagtaaacaaagctttagttgttctggatgaggcttgtgacaaggctgtattatccgctagaaacgtggcagacgttaagactgcttccgtaagcaccatcaacgtttacgatattctgaaatacaacacagtagtagcaaccaaggctgctgtagcttctatcgaggaggtatatgcataatggcaaacgtacagtactatgacgtaatcctcaaaccggttgtaactgagaagagtatgaatgctatgacagacaagaaatacaccttcctggtacacaccgaggcaaacaaaactatgatcaaagaagccgttgagaagatgttcccgggcaccaaagttaagagtgtcaacaccatgaacatggacggcaagacaaagagaagaggcatgacattcggtaagacagctgcaacaaagaaagctatcgttcagctgaccgaggacagcaaagagatcgagatcttcgctggtttataattcatcctcaatagacaattatacgacgaacactatgtcgtgaaaaacatgaagaaacgccaggaggcgttgaacgaaaggagtcaaagtcatgggaattaaatcttacagcccatatacaccttccagaagacatatgaccggctctgatttctctgagattacaaaatccacaccggagaaatccttagtagtttctttaaagaagaacgcaggtcgtaacaaccagggtaaaatcaccgttcgtcacagaggcggcggttccagaagaaaatatagaatcatcgacttcaagagaaatgcaaaagacggtatcgcagcaaccgtacttggtatcgagtacgatccgaaccgtacagcaaacatcgctctgatctgctacgcagacggcgagaaagcttatatccttgctccggctggtttacaggttggacagaaggttatgagcggtgcagaggctgaggcaaaagttggtaactgcttaccgctttctgaaatcccggttggtgcacagattcacaacatcgagcttcttccgggcaagggtggtcagctggttcgttccgctggtaactctgctcagttaatggctaaagaaggcaaatatgcaacccttagattaccgtccggagagatgagaatggttccgatcagctgccgcgctactatcggtgtagttggcaacggcgaccacaacctgatcaatatcggtaaggctggtagaaaacgtcacatgggtattcgtccgactgtccgcggttctgttatgaacccgaatgaccatccgcatggtggtggtgagggcaagaccagtatcggtcgtccaggtccttgcacaccttggggcaaaccggcactcggcctgaagaccagaaagaaaaacaaacagtctaataagttaatcgtaagaagaagaaacggtaaacagtaataggaggtatactaatgggtcgttcattaaaaaaaggaccatttgcagatgctcatcttttaaagaaagtagatgagatgaacgcagcaggacagaaacaggttatcaaaacctggtcccgccgttccacaatcttcccgcagatggttggacatacaatcgcagttcacgatggtagaaaacatgttccggtatacgtgacagaggacatggttggacataaactcggtgagttcgtagccactagaacttacagaggccacggaaaagacgagaagaaagcaggacgtaagtaagttacgcttgaaaggaggtttcaccaatggctaaaggacatagatcccagattaaaagagaaagaaatgctaataaggatacgagaccgtcggctaagctgtcttacgccagagtatccgttcagaaagcatgcttcgtattagatgccatcagaggcaaagatgtgaagacagcgcttggtattgtaacatacaatcctagatatgcttctactttaattaaaaaattactcgagtctgctgttgctaacgcagagaacaacaaccagatgaatccggagaacctgtacgttgcagaatgcttcgctaacaagggaccgacaatgaagagagtaaaaccgagagcacagggccgcgcttacagaatcgaaaagagaatgagccacatcacaatcgtgcttgatgagaaataagaggaggcaattatgggacagaaagttaatccgcacggcttaagagtcggtgttattaaagactgggattccagatggtatgcggaagctgattttgcagataacctggtagaggatcacaaaatcagaaccttccttaagaagaaattatacagcgccggtgtttccaaaatcgaaatcgagcgcgcttctgataaagtaaaaatcattctttacactgctaaaccgggcgttgttatcggtaagggcggcgcagagatcgagaagacaaaagctcaggttcagaaattaactgacaagaaagtttttgtagacatcaaagaagttaagagaccagacagagacgctcagctcgttgcagagaacatcgctcagcagcttgagaaccgtatttccttccgtcgtgcgatgaagtccgctatgggcagaaccatgaaggctggagctaagggtatcaaggcttccgtatccggacgtcttggcggtgctgatatggctcgtacagagttctacagcgagggcactatcccgcttcagacattaagagcagatattgactacggtttcgctgaggcaaacacaacatacggcaagaccggtgttaaggtttggatctacaaaggcgaggtacttcctgcgaaaggaaataaggaagggagcgataaataatgttaatgccgaaaagagtaaagcgtcgtaaacagttccgtggtaccatggccggcaaggcgcttagaggaaatgtaatcaactacggtgagtacggtttagtcgctacagaaccgtgctggatcaaatccaaccagatcgaggcagcccgtgttgccatgacccgttacatcaaacgtggtggtaaagtttggattaagattttcccggataaaccagtaactgctaaaccggctgagactcgtatgggttccggtaaaggcgcacttgagtactgggtagcagtagtaaaaccaggccgcgtaatgttcgagatcgcgggtgtaccagaggagacagcgagagaagcgcttcgtcttgctatgcacaaacttccgtgcaagtgcaagattgcttctaaagcagatttagaaggcggtgataacagtgaaaattaataagtatgtagaagatttaaaagctaagacatctgcagaattaaacgaagaattagtagctgctaagaaggaactcttcaacttaagattccagaacgctaccaaccagctggataatacaagcagaattaaagaagttcgcagaaacatcgctcgtattcagactgttattacagagaaagcgaactaattatcatagattcctaaaataggaaaggagatatctaccgtggaaagaaatcttagaaaaacacgtaccggtaaggtagtaagcaacaagatggacaaaacaatcgtagttgctatcgaaaaccacgtaaaacatcctttaatcggtaagattgttaagagaacttataaattaaaagcacacgacgagaacaacgagtgcggtatcggtgatactgtaaaggtaatggaaacaagaccgttatccaaggataagagatggagactcgtcgaaattatcgagaaagcgagataatttctaaatcagaaaggagtattgggcatgattcagcaggagaccagattaaaggttgccgacaataccggtgcgaaagaattactctgtatccgcgttatgggcggctctactagaagatatgcaaatattggcgatgtaatcgttgccagcgttaaagatgcaacaccaggcggtgttgtaaagaaaggcgatgtagtgaaggccgttgttgtacgtaccgttaagggcgcacgccgtaaagatggttcctacatcaaatttgatgagaacgcagccgttatcatcaaagacgacaagaacccgagaggaacccgtatttttgggccggttgccagagagcttcgtgagaaacagtttatgaagattgtttccctggctccggaagtactgtaggaggtgtcagctgtgcataaaattaaaaaaggcgacctggtaaaggttatcacaggtaaagacaaagacaaaaccggaaaagttctttccgttaatgtaaagaagaatacagtcctggttgagggatgcaacatggtaacaaagcataccaaaccgtctgcagctaatcagcagggtggcatcatccatcaggaaggcgcgcttgacatttccaacgttatgctggtagtggatggcaaggctacgagagttggcttcaaagtagaagacggcaagaaagtccgcgttgctaaggcaaccggtaaagtaattgactaatacagagaggaggaacgttaaaattggctagattaaaagaaatgtatcagagcgaaatcgtagacgctatgatcaaaaaattcggatataaaaatatcatggaagtgccgaagctggacaagattgttatcaacatgggcgttggcgaggcaaaagaaaatgctaaagttctggactctgctgtaagagatatggaaatcatcactggccagaaggcagttcttacaaaagcgaaaaaatcagtcgctaacttcaaacttagagagggtatggctatcggctgtaaagttaccctgcgtggcgagaagatgtatgagttcgctgatcgtctgatcaacctggctcttccgcgagtaagagacttccgcggtgtaaatccgaacgcatttgacggcagaggcaactacgctctgggtatcaaagagcagcttatcttcccggagatcgagtacgataaagtagataaggtaagaggtatggatatcatcttcgttaccactgctaagaccgacgaagaagcacgtgagctgttaactcagttcaacatgccatttgctaaataataggaggatttatcatggctaaaacttcaatgaagattaaacagcagcgtccggcaaaattctccaccagagaatataaccgctgcagaatctgcggtcgtccgcatgcatatttaagaaaatacggcatctgcagagtttgcttccgtgaattagcttacaagggcgaaattccgggcgtaaagaaagcaagctggtaagccgaaagcaacttagtgagcgcagcaagcgcgaacttagtgcgaggctcatcgcgaaccttgatgaagcgtaagctgaatctagttgagcgatgcgtcacggcaagaggttgcctgaaaaggcagcccgtcccgagacttagtgagtcagagtcgaagacgatagacgagcttagtcgagtggacgatgcctatattatagaggacacatcctagtgttcccaaaacccaccgaaacccacttacagtaagtggtagtcaaattataaggaggcacactcaaaatgacaatgagcgatccgattgcagatatgcttacaagaatccgtaatgctaacactgcaaaacatgatacagtagatgttccgtcttccaagatgaaattagcaatcgctgacatcctggtaaaggaaggtttcatcaagaaatatgacgttgttgaggacggcaatttcaagactatccgtattaccttaaagtacggtaaagacaaaaacgagaaaatcatctccggcatcaagagaatatccaaaccgggtctgcgtatctacgcaaacaaggaagatatgccgaaggtactgggcggtttaggtgtagctatcatctccaccaaccagggcgttatcactgacaagcaggcaagagaactcggcgtaggcggagaagttcttgcatttgtttggtaagccgaaagcatcatcatcggtttagacaaggtatagatacaactgaaaacagagaagccttagcggcttctccgaaaatctaagtaggaggtaaaaggcatgtcacgtatcggaagaatgccagttgcgattccggcgggcgtaaccgtaacaatcgcagagaacaatttagtgactgtaaaaggtccgaagggaacacttgagagagaactcccggttgagatgaacatcaaagaagaggatggtcatatcgtagttaccagaccgaacgacttaaagaaaatgaaatctttacacggtctgacaagaaccttaattaacaacatgattcatggtgtaacagaaggctatgagaaagtgctggaagttaacggtgttggttacagagcagcgaagcagggcaagaaactggttctcagccttggttactcccatccggtagagatggaagatccggaaggcattgagactgttctggaaggacagaacaagatcactgttaaaggtatcagcaaagaaaaagttggccagtatgcagctgagattcgggataagagaagacctgagccgtacaagggcaaaggtattaagtatgccgatgaggttatcagacgtaaagttggtaagactggtaagaaataattaaggagagtgtgaagatggttagcaaacagtcaagaagcgaaattcgcgttaaaaaacacgttagattacgcaaccgtttttctggcacagccgagagaccgcgtttagcagtgtttagaagtaataatcatatgtatgctcagatcattgatgatacagttggaaaaactttagtagcagcttccactgccgagaaggaagttaaagctgaactggagaagacgaacgatgttgcagcagcagctcacgttggaactgtaatcgctaagagagcgcttgaaaaaggtattaaagaagttgtcttcgatagaggcggatttatttaccacggaaaagttcaggcattagcagatgcagcccgcgaggctggtctggaattctagtaggaaggagaacatacacatgaaacgtacaaaaattgatgccaaccagttcgagttagaggatactgtagtggcaatcaaacgtgtatccaagaccgttaagggcggacgtacaatgcgtttttccgctttagtagtagttggagataaaaacggccacgttggtgctggtatgggaaaagctgctgaggttccggaagcaatccgcaagggcaaagaggcagctgccagaaacctgatggaggttccgttcgatgagaacaatagcatcccgcacgatttcctcggcaaattcggaagcgctaacgtacttctgaagaaggctccggaaggtaccggtattatcgctggtggtccggctcgtgccgtactggatctggctggttacaagaacatccgtacaaaatcccttggttccaacaacaaggcaaacgtagttcttgctaccctggcaggcttaggttctttaaagactccggaagaggttgcaaaacttcgcggtaagtctgtagaagaaattctgaactaataggaggagataaaaatggcagagaaattaaaaatcacattggttaagtctcctattggcgctatcccgaagcagaaagcaacggttgcagctcttggtttaaacaagactggcaagacagttgagcagccggacaacgccgctatcagaggcatgatccagaatgttagacatttagttaaagtagaggaaatctaagatatttgcaaggaggtgcagtcatggatttatccaatttaaagccggcggtaggctctaagcacagcgacagcttcagaagaggtcgtggtcacgcatcaggcaatggtaagactgctggtaagggacataagggacagaaagctcgttccggcgctccgagaccaggatttgaaggcggtcagatgccgttatatagacgtctcccgaagagaggcttcacaaacagaaattctaagaccatcgttggtatcaacgtaagcgctcttgagagattcgagaacgacacagttgttacggttgaaacattaatcgaagcaggcatcgtaaagaacccgcgtgacggcgttaagatcctcggcaatggcgagctgaccaaaaagctgaacgtaaaggttgatgcggtaagtgaaggcgcgaaagctaagatcgaggccgttggcggaacctgcgaggtgatctaatatgttaaaaacgctccagaatgcatttaagataaaagaggtcagagaaaaactcctctatacgttctttatgctggttgtgacccgtatcggatcgcagctgccgattcccggagttaatacaacatttttccaggaactgtttacaagacagtccaatgatgcgtttggtttcttcaatacgattaccggcggttcgttcacgaacatgtcggtattcgcattgagtattaccccgtacatcacttcttccattatcatgcagcttctgacaattgcaattccgaaattagaggaaatgcagcaggagggcgaggacggaagaaagaagattgcggaatatacgcgttaccttacggttgcactggcgctgatgcagtccgtcgctatggcgatcggtttcggcggcaagggacttttagttgagtttactgccctgaatgtgattgtcgctattgtgacaatgacagccggaagtgccatgctgatgtggatcggtgagcgaatcaccgagaacggcgtcggaaacggtatttctatcgtgcttctgttcaatatcatttcaaccatgccaagcgatatgattacgctctatgagcgtttcctgcagggcaagatcgtggcggttgcagttgtaacagccgtgattatcgtagcggttatcgtagcgatggttgtatttgttatcattttacaggatgcagagcggagaattccggttcagtattctaaaaagatgcagggacgtaagatggttggcggtcagtccacaagcatcccgttaaaagtaaatacagcaggtgttattcctgttatctttgcttcatccctgatgtctttcccggtggtaattgctggatttttccaggttaattatgacaccatcggaggaaagattcttctggctctgaattccagctcctggtttaatccggagcgtccggcttattcagttggcttaattgtctacatcgcgttgattattgtgtttgcgtatttctacacatccataacattcaacccgcttgaggtggcaaacaacatgaagaaatccggcggtttcatcccgggcattcgtccaggaaagccaacatccgattatttggatggaattctggagtatattatactgattggtgcttgcggacttattattgtctgcctggttccgatcattgtctctggactgttctcagtgagccgtctctcctttggaggtacttctcttatcattatcgtaggtgtagtacttgagacaatcaaagcagtcgaatcacagatgctggttcgcaactataaaggattcttaaacgactaagataactcgctttctgggcgggagctctctttcttaacggctggaggtggccggagacagctcctgcctggaggcgattctgttgtatatagggagattgtaccattatgaagattgttatgttaggagcaccgggagccggtaaaggaacacaggctgataaaattgcagagaaatataacattccgcacatttcaaccggagatattttccgctctaatatcaaagcgggtacagagctgggcaaaaaagcaaaatcgttcatcgatcagggattgctggtgccggatgaagtaacgatcggcatgcttcttgatcgtattcacgaagcagattgcgagaatggctatatcctggacggatttccaagaacgattccgcaggcagagagcctgacagcagcactgaaagaaaacggagaggcaattgatttcgctctcgatgtagaagtgccggatgcgaatattgtaaatcgtatggcaggccgtcgtgcatgcttaaagtgcggcgctacgtatcatacagagtttgcagcaccgaaaaaagaaggaatctgcgataaatgtggttctgaactggttcttcgcgacgatgataagccggagaccgtacagaaacgtctggaagtatatcatgagcagacacatcctctgattgattactataagaaaaaaggtgttctgcatgcgatagacggtacactgtctatggaaaccgtgtttaaaaacattgttgacattttgggagcataaaagatggcagtgacgataaaatctcccagggagatagaactcatgcgtgaggctggcagaatccttgccaaaactcacgaggaactggcgaagaaccttcgtccgggaatgtccacctgggacattgatcatatgggagaggaaatcatccgaagctacggctgcattccctcattcaaaaattacaatggctatcctgcctccatctgtgtctctgtcaatgatgaggttgtccatggaattcctcataaggaacatttccttgatgagggtgatattgtcagtctggatgcaggtgttatctataaaggatatcactcggatgcagcccggacttatggcatcggtcagatcgacgatgatgcgaaaaaactgattgaagttaccagacagagcttttttgaggggattaaatttgccaaagctggcaatcatctcaatgacatctctgtagccattcagaaatatgctgaaagcttcggctttggtgttgtcagagatctggtaggccatggaatcggttctcatctgcatgaggatccggagattccgaattttgcaagaaaaagaaaaggaattctcttacagcccggcatgacgctcgcgatcgagccgatgatcaccgagggcagctacgaagtagtctggctcgatgatgactggaccgtcatgacggaagacggcggctgggctgcccattatgaaaatacgattctaattacagaaaatgagcctgagattctgtctttatagatagaaaataggaaagaaccttttgtgaaaattgaagcgttgatttggctggttccagctggctgccactggttgtttctccaaactggttgcactttgtgaaatggacaaaaatcgtttgtttcagacaaacctgcatgttttttggatgtttcaggcagagtgggagaaatggcagcgtatctgctggagctgcgtcaatcagcagcgatgttttttagaaagtgtctgtctaagtagaaacggagatcagaatgacggaatatggaatggcctgtctggtccgctcgctggcggggcatgacaaaggcaattattatatcatagtcagagaagatgcacactatgtgtatctggcagacggacgcaccaaaactgccgccaagccgaaacgcaagaagagaaagcacgtgcagttctcccacaagtgggatgaggcgctggcagcccagtttgcggacggcgcggcagtccaggatgaagcgatccgctatttcattcagaaatcattgcagggaggtatatagaatgtcgaaagcagatgtaattgagattgagggcgtagtagcagagaagctgccgaacgctatgtttaaggtagaactggaaaacggacacatcgtacttgctacgatcagcggaaaactccgtatgaactacatccgtattctgccgggcgataaggttacaatggaaatgtcgccatacgatctctctaagggaagaatcatttggagagataaataaagaccaatccatttttctcaataaaaatattgagagaagtgtaaatttcgcttgcattataggattttaaatgttataatgctttagcgaactttgttgaagcatcaggtaagatccgcccttttgtcctctcacggcagagggatggaacgagtctgttgtacctgtaagtccgacacaggactgcaataggttataaaaaattgtatgtccgagattggacggactattacggaaaggagaattgctgtgaaggttagatcatcggttaaaccaatttgcgaaaagtgcaagatcatcaagagaaaaggcagtatcagagtaatctgtgagaatccgaagcacaaacaaagacagggctaatttgatttagcatctattttttcgcgcggctttctattatgaaccactcggatgagttgttcagtagtttaagcaaatttatacattatcaacgaagaagtaagaaaaactaatggaggtgtactacacacatggctcgtatttcaggtgtcgatttaccaagagagaaacgcgtagagatcggcttgacttacatctacggtatcggtagagcaagtgcagcccgtatcctggccgaagctgaagttaatcctgacactcgtgttaaggacttaactgacgatgaagttaagaagcttgcggcaatcatcgctgacagtcaggtggttgagggtgatctgagaagagagatcgctatgaacatcaagagactgcaggagattggatgctacagaggcatccgtcatagaaagagccttccggttcgtggtcagaagacaaagaccaacgctagaactcgtaagggtccgagaaagacagtagcaaacaagaagaaataattaagtaacaaggaaactgaatcaggttaggtttagcaacaggattcaatatttgagaaagtaggttagtttaaaatggctaaaaaagtgtccactggcaagaaagtgacaaaaaagcgtgtaaagaaaaacgttgaacgcggacaggcgcacatccagtcatcttttaataacacaatcgttactttaacagatgcacagggtaatgccttatcatgggcaagtgcaggcggtctgggatttagaggttcaaggaaatctactccatatgcagctcagatggctgcagaaactgcaacgaaggcagctcttatccatggcttaaagtctgtagacgttatggtaaaaggtccgggatccggtcgtgaagcagcaatccgtgctcttcaggcatgtggtctggaagtaacaagcattaaggacgtaactccggttccgcataacggatgccgtccgccgaaacgtagaagagtctaattaggaggtgcaagtaaaatggcagtagatagagttcctgtacttaaaagatgtagatctcttgaccttgatccggtttatttaggaatcgacaagaaatcaacgagaaaattaacgagagccaacagaaagatgagcgagtatgcactccagctgagagagaagcagaaagcaaaattcatctacggtgtgttagagaaaccgtttagaaattactatgcaaaagcatccagaatgaacggtcaggtcggtgctaacctgatgatccttctggagtgcagactggataatgtattattcagaatgggctttggccgtacaagaaaagagacacgtcagatcgtagatcacaagcacgttctcgtaaacggcaagagcgtaaacatcccgtcctacttagttaaggctggcgatgtaatcgagatcaaagagaagtataaatcttcacagagatataaagatatcgctgaggtaaccggcggaagaatggtaccggcatggctggaagttgacgctgagaacctgaaaggtactgttaaagagttaccgagcagagacgaaattgacgttcctgtaaacgaagtgcttatcgtcgagctgtactccaaataataagaagtattactattatgttagtccagaatctcccatgtatctgctttggcagctgcttgggagattccgagactacaagagtatggcagaccctcaaaaatgttcccaaaaggaggggctatcgtgttcgattttgaaaaaccaaaaattgaaattgctgagatttccgaagacaaaagatatggcaaatttgtggttgaaccgctggaaagaggctatggtaccacattaggcaattctttaagaagaattatgctttcctctttgcctggtgcagcagtaagtcaagtgaaaatcgacggcgttttgcatgagttcagttctatccctggtgtaaaagaggatgtaactgaaattatcatgaacatcaagagtctggcgatcaaaaacagcagcgagacgaatgagccgaagacggcttatatcgagttcgagggcgaaggcgtcatcacagcagctgacattcacgctgattctgacattgagattttgaatccggaccaggtcatcgctacattaagcggcggcgcggacagcaaattctacatggagctgacgatcacgaagggccgcggctacatcagcgcagataagaacaagagtgaagatcttccgatcggagttctggctgttgattctatctacacaccggtggagcgtgtcaatatgaccgttgagaacacccgtgtgggtcaggtgacagattatgataagctgacattagatgtatacacaaatggaacgctggcaccagacgaagctgtcagcctggcagcaaaggttctgagcgagcatctgaacctcttcattgacctttccgagaatgccaagaccgcagaggttatggtagagaaggaagacaacgagaaagagaaagtgcttgagatgaacatcgacgagctggagttatccgttcgttcttacaactgtttaaagagagccggaatcaatacagtggaggagctgtgcaaccgcacaccggaagatatgatgaaagtcagaaatctgggccgcaaatccctggaagaggttcttgcaaaactgaaagaattaggcttgcagctcaacccgagcgaagaggcttaagataccgcgtgggtggacgtgctttgcagtgcgtccctttcatgcagatacggggacgggtaagtccgaatggcacaggtccctgcataaccatcaaacaattatattttatatagcagacattcagtaagtccaaagggcatgagtgtcggcttccgcaaatggaggagaaagaatcatggcaggatatagaaaacttggaagaacttccagtcagagaaaagcaatgctgcgcagcctggtaaccgcactgttattcaacggcaagatcgttaccactgaggcaagagcaaaagaagtgaagaagatcgctgagggtctgatcgctctggcagtaaaagagaaagataacttcgagaccgttaaagttaccgctaaggtagctcgcaaagacgagaacggcaagagagtaaaagaagttgttgacggcaagaaagttaccgtttacgacgaagtagagaaagagatcaagaaagataaagcttccagacttcacgctagaagacagatgctgaaggttctctacgatgtaacagacgttccgactgcaagagcaggcaagaagaaaaacactaagaaggtagatatgccggctaagctgtttgatgagcttgcaccgaagtacgctaaccgcaatggtggttacagccgtatcgttaagatcggtcagcgtaagggcgacggcgctatggaagttctgttagagctggtataatttagatagattcgtttgtttaagttgtatcaaatcttcgttcttttacgcaagttttgaatcataagatgattttatacccccggtttgggagacagagaaatctgtcttctgaaccgggttttttgacgttagaatggaatttttcaggttttccatttaccttgagaaaaagtcagggttttaataacacttgaatgaaaaaaatagaaagaatggcgcaaaaatagcagactgaattttacggttttccgcatactaggattaaacgattttatcgaacaagttcttggattcaaacagagtgtacatctgcatttcgttgagattcgccgcagtgcggaatctacggaacgggggaggtacataagagtagaaggaggaaaaaccgtgcgaaaaaactctggtatgtggaaaacaataagtcggaaggaaaaacttcgccgtgttctgctgataatctttggtgcgggggtcattgcgcttgccggtgtgtcttatcaatatgtgaagaacgcggttcccgaccgcatcaatgtggtggtggatcggcaggagcaagttcgctttgggctgccgtttcgggcattgctggaaagtgagagcgaggaggtggttctaaacggcagctctaaaattccgtccgaccagatccatctgcagctcaaccagcccttttccatctattctgaacaggagggaacgtaccgtttaagtctcaaactctttggaatatggaaattaaaggatatcgaggtagatgtgtcggacgtccagtatgcggttccctgtgggctgccggtgggtatttacatgaaatccgatggactgatggtgattggaaccggaagggtgacggcacagacgggggaagtgatggatccggcggacggaatcctgcgttctggagactatatcgaggcaatcaacgggacgccggcgacggacaagaaagatatgatacgggcagtcaaggaagcgggaaatatggctctgacactttcagtgcgccgcgagggagagacgatggatgtacagatgacgccggtacagacgcaggagggagactataagctggggctgtggatccgcgacgatacgcagggcatcggtacgatgacctatgtatgtgctaacggcgcgtttggagcgctgggacacggtatcagcgatggcgacacgggacttctggtgcagacctccggcggcgaactatacgatacggagattctgggcgtggagaagggtagtttcggaaagccgggcgtgatgtcgggcgttatttactatggaaatcagtcgcggctgggaagtgtggaggctaatacggatcagggcattttcgggacggcaaatccgcgctttttaagccgggtaaagaaccctgcaattccgatcggttaccgtcaggacgtcaaaaaaggccgtgcctgcatccgcagcagcgtgtccggggaattgaaagactacgagattgagattcagaaaatagaccactcctccaaccgccacaacaaggacatggtcattcgcgtaaccgatccggaacttctgtccctgaccggcgggatcgtccagggcatgagcggcagccccatcatccagaacggaaaactcatcggagcagtcacgcacgtttttattcaggattcgacgcgagggtatgggattctggtggagaatatgctgggacattgaatctggatgcaaagtaactgtttacaagtgggaattttctggactgaaaattccatatgatacagttctggcagcagattttgccgattttgaatacgcagcatcggcaaaatcctgttgctgggcacacgtgtgtgaacagtaacatgcaaagtacaaagtttttgctctctttattgacaggatataaaaaaagcgtatataatagagcaaattacatatttggcaaaacagttgaaaagctgcgacgcaaagctatagggcctgtaaaatggcagccagttgcattaacacgataacagagtatgttatagttgtatggctatggcgtaactctgtttttttataggaatttatcgaaacttgatctgcaaagatggaattttcatgttcagaaaccggtcgtggaggctttttaattgcgtgtattttgtgtgtctttcgaccggaatcggtaaaacgtggtgataagggatcgttagataggcgtatggcggctgggcggtagaaggtttatagcggaatcttaacagatacggttagctacaatacatgcttatatatagtttgcatcttgtgtaatttattttgcatcaaaagaattgatagacaaaatgagcgttgagtgtcgaactgcgcgatcaaaacgagttgaaacttgttaaaaaaagaatttataattattttaatcatcacaggtgccgaggaggagaatattatggcagaaatgaagattgcgatcgcagaggataatcgtcaggcattggatatgcttggaaatatactggaaagtgataaggagattcaggtggtcggaaaagcggaaaacggaaccgatgcctataatatgatcgtaaagacaaagccggatattgtatttctggacgtagtgatgccgggaatggatggaatttcggttatggagcgcatcaagacaaatcaagactgttcagctgacacttcctttgttatgattacagctgcgagcagcgagaatctgacagcggatgcttttcggatgggcgcctgttattacatagtaaagccattttcgaaggaggcggttttagacaaggtacatcgcctgaagaattacaggaaccgcgcttcgaccctggcgggcagccggaaggtggagccgtatatggtgtcggcggaatatgaaagacagaatctggagagcgatgtgacgcagattctgcatgagattgggattccggctcatattaagggatatcagtacctgcgggatgcgattattttgtcagtcagtgataaagaaatgctcggttctgtgacgaaaatcctgtacccgaccatcgccaagaagcgccagaccacttcaagccgtgtcgagcgggcaatccgccacgcgattgaggtcgcatggagccgcggcaagatggacacgatcaacgatctatttggatataccgtcagcacagggaaaggaaagccgaccaattcggaatttatcgcattgattgttgataagatttgcctggattataagcgggatgtataaaatcgtgcggtgctttttggagccgaaagtgctgtaagcctttttaacacgattgtaacacatttatgaaagtgactgattgcatgggtaaatgtgtgtatgataagataaaggggaaataaaagatgcaggactgaaaaactgcccctgtataaaacagctggacagagaggtcaggaaagcagctaaaagaacggagaattgcctatgaaaaaaaaagtaccggcgtacaatggaaccctgcgggatcacacgattatgtgtccgtattgtatcagtgaatgttcaggaatccgcatctttggaaagcgtatcaaatcgatcgccttctcaacggatgtggcaatcatcaaaaatatcaacgcggatgcgatcatcgcagtttatccgtttactccgcaggcagctatctcacagtcgatcatcagcatctcggatgtgccggtgtttgtcggggtcggcggcggtctgaccggaggaaagcgttccgtccgtctggcgcttcaggcagaacatcagggagcttacggtgtagtggtcaacgcgccgatcgcggatgaggtcatcacggagatcaagcaggtggtcgatattccggtcattgctacgattgcttcggttcacacggatgtccgccgcaaactgaaggcgggagccgatattttaaatgtatcaggcgctgccgccaccgcatcgatggtagccgagatccggaaggagtatccggacgttgccattatcgcgaccggaggaccgactaacgaatcgattttggagacgatcgaggcaggagccaatgcgatcacgtacacgccgccgtccaacggcgagctgtttgcgcggacgatgaagaaatacagggagatcaatccctgattatacaaaaggcgggatcgaagagaaaacataattttcttttcggctccgccttttatttttgtttcataggaaattgcgtcctatgaaacaaaaaaacgctccgcgaggatgcgcactcgcgcgaagcagaaacatgtcgcaagcgaccgcgctcggcgcgagaatgtgccaaggcacattctttttcatgcggtaaaatttataattcatccggtactatgcaaaatatccaattcagaaaatacagtctgcaaatcggaactatttgtcatatatttcccgatttttttctctgtcgcctactttctaattccctgattctattgtataataattttaatagggtgccagatcgcgagcgggcacggttgggaggtagtagctatgaagaatattctgtttattgcatcggaggcggttccatttatcaaaacaggaggtttggcagacgttgtcggatcccttccaaaatgttttgataagcagtattttgatgtgcgtgtcatgatcccgaagtatctgtgcatcaaagagtcattccgcaatgaaatgaagtatgtgaaccatttttatatggattatctgggacagaaccggtatgtgggcatcctggaatatgaatatgagggcgtgaccttctattttattgataatgagagttatttctggggggatcgcccgtatggggactggtattacgatctggagaagttttctttcttctgcaaggcggctctctcatccctgccggtgatcggcttcaagccggatgtcatccactgccacgactggcagacgggacttatcccggtgcatctcaaggacaaattccacggcggcgagttcttccgggatatcaagtccgtcatgacgatccacaacctgaagttccagggggtgtgggatgtgaagacaatccagcatttctctgagctgccggactactattttacaccggataagctggaagcttacaaagacggcaatatgttaaaaggcggcatcgtatacgcggatgcgatcacgacggtcagcaacacctacgcggaggagattaagactccgttctacggcgagggactggacggtctgatgcgtgcgagaagcaacagtctgcgcggtatcttaaatggtatcgattacgatgaatttaatccggagacagataaacggatcgtacaaaattataacgcaaagacattccgcaaggagaaatccaagaataaaaaggcgctgcaggcggagctgggactggcgcaggacgagaaaaagttcatgatcggtatcgtctcccgtctgaccgaccagaagggacttgacctggtacagtgtgtgatggatgagatctgtacggaagatgtacagctggttgtgctgggaaccggagatgaacggtatgaaaatatgttccgccactatgactggaagtacaatgatcgtgtttccgctaatatttattattcggaagatatgtcgcataaggtatatgcagcctgtgacgcattcctgatgccgtcgctgtttgaaccatgtgggctgagccagctcatggcgcttcgctacggaaccgtgccgatcgttcgtgagacgggtggtctcaaggatactgtatggccatacaatgaatacgatggaaccggaacaggattttcctttgctaactacaatgcacatgagatgctcgactgcatccgctatgcaaaatacatctattataataagaagcgcgagtggaataagattgtagaccgcggcatggcggcggatttttcctggcagacatcggctggaaaatatcaggaattgtatgactggctgataggatattaatgacggaccgagtgatttagagacagcggcatatgtgtggaagaaaacagaggaattaagatagtacaggagagaaacatgactttttttcaggaattgacatcaaaccagacgctgatgaccggcgtgaccgggtgggtggtcgcccaggtgctcaagacgattctggacatcgggctgaaccattcgttcaacccggagcgtctggttggctccggcggtatgccgagttcccactcatccactgtatgttcgctggcaacggcggcggcgctgcggtacggagtgggaagctttgaattttccatcagctttattctggcgatggttgttatgtatgacgcgatcggtgtccggcaggagacaggaaagcaggcaagagttctgaaccgccttcttttcgatgatttcctcaagctggacggcgtggtattacaggaaaaattaaaggaatacgtggggcatacgccgatacaggtagcagcaggcgcgattttaggcattttgattgcatttattctcgatccgatgttcatataacgaacatcggatcttttcattttggctgatagatggtataaatatagggataacgtgtatctaagcgttaaatgaaactgaggaaatgagaacagaacaatggaacagagaagagacatagaaaatatcaaaccagcctgccggttaattctggcgagtgcgtctccgcgccgcagggagcttttggagcggattgggctgaaaccggagattcatccgagcactttggaggaaaatccgctctgtacggaaccggcgcaggttgtgatggaactggcgggacagaaggcgcgcgatgtgatggcgcaggtgcgtgaggaggcgcggacgacgggaatcctattttccgggattatcattggttccgataccgttgtcagtgtggatgacgagattttaggaaaaccggcggatcgggatgaggcgcttgagatgatcggacggatccaggggcgcagccaccgtgtatacacgggcgtggcgatcctgactgaggatcgggagagctgctttgcggttgagacgcgggtggatgtatatccgatgagcgatgcggagatcgaggcgtatgtagactgcggcgagtcgatggacaaggcgggtgcatacggcattcagggaagttttgccgcgcatatccgcggaatcgatggttcttacacgaatgtgatggggctgccggtcggaaggctctatcaggaattgaagcggatctgcccggagaagatagaagatctgctcaagcatacggcctgaggtggatggctgatggaaagaaagttactgttcacgggtaggcacttttggaaccgaaagtgccgtaagaaaacgtggtggcagaccgtgaaccagagtggaaggattgacagaacgcagcgctgctggtcatatgtgtgaacagtattcaagtcgaacgtccgtgagacttggcgcgtgattctggtcagcgtaagctgacatattctttacagaatcactgcgcatcctcgcggagcgtttatctcagtcggagacccaactcccactgagacaaatttgctattactcaccacctgaagaggtgggagtcttctcgactgagataaatcagccgctcagagagaatatgtgacaggaattgctaaaatatgcaggagaaagggagtatccatgcagaaacagaaaaggaagacaaaccatatccaccgggcggcgtgtgccctgcttgcggggctggcgctcagcctggggcttttgactggatgcggctcggacggcagcacgatcgtggtgggaaagaagaatgaaaagggttattcccgcgcggaagtgatggtgattgccatgacggagaaaaaacgctatgaggaggtctgtacggatcagatctggggcgtttcagttggagaaaagggcgatgattttgaaacgtatctaaaaaaacagatccgttcgtttatggatgagctgaaaatcatgaacctgctggcagccgatcgggggatttccctgacttcagaggagcgggcggcgatggaccgggcagcagccgagtattttgggcgtctgccgcagtcggcgattgactcgatgggcgtgacagaggcggatgtccagcatatctatgaggattatggtctggcggagaagctggcgggacagctcacggacaatgtggcgctggaggtcagcgacagtgaggcaaaggtgatccatgtcagtcagataaagacatcggatgagagcgaggcagacgccttccagcgggcggcatcgcaggaagatgccgatttccagtcctgtgccgaggaggcggggctgacggtgagtgaccgggtgctggggcgcggtgatgagtcggatgcctatgagaaagaggcattttcccttgccgagggcgcagtcagccaggtgatccatgcggacgacgcgtactatgtgctcaaatgtacggacgattatgacgaggacgagacggcggcgcgcaaggagcgcatctacgaggagcggaaaaaacgcgcctttcaggagatctacgaccggttcagcaatacgatctccgtttcttacagcagcgggctctgggacagtctggatctgacctcggagttcgagaaaaatgacgcggatttctttgagatttacgcggaatatgcgatcaaataggtagtctgtacctggggcgggtggataaaaagtaaacttatttttaaaaaaggataacaattcggaacaaccgcttgactaccggggaaaattcttctacaatgaacggtaatgtccggtcaggcggacatactgtggaggaaaaatacatgaatatcataaaagcggtcaatcttgtatttgattatataagacgcgatgaagaggggcaggtagaggaagtaaagcgcgccctggatcatgtgaatctggagattgagaaaggcagctttgtggcaatcctgggacacaatggttccggcaagtccacatttgccaagcagatcaatggcattttgagcccgactgacggtacgctttttgtatcggagatggatacgagggacgaggcgcatctgtgggatatccgcaaaaatgcgggcatggtctttcagaacccggataaccagatcataggaaatatagtggaagaggacgtcggattcggtccggaaaatatcggagttccgaccgaggagatctggaagcgagtggatgagagcttaaaggcagtcgggatgacgatgtaccgcaagcagtccccgaaccatctgtccggcggacagaagcagcgtgtggcgatcgcgggcgtcatggcgatgaaaccagaatgtatcgtgctcgatgagccgacggcgatgctcgatccgaacggacgcaaggaggttatccgcaccgtccatgagttaaaccgggtggaaggaatcacgatggtgctgatcacccattatatggaagaggtggtcgatgcagaccgcgtgatcgtcatggatgacggtcatatcgtgatggacggcacgccgaaggagattttctcccgcgtggaggaactaaaacaataccggatggatgtgccgcaggtgacggagcttgcgtgggagcttaagaaaaagggaattccgcttccagatggaatccttcgcaaatcggagcttctggacgcactggtaccgcttttgaaagaggaatagagatggcaatacaggtagaagatttgtgctacacctacggcgagggcacggcgttagagcgccaggcattaaagcacgtgagttttgagattcaggacggcgaatttgtcggtctgattggtcacactggatcgggaaaatcaaccctgatccagcatttaaacggtctgatcaagccgaccagcggcgacattaagtatcagggtgtcagcatttacagccagggttataaattaaaggatctgcggagtaaagtggggctggtgttccagtatccggagtaccagctctttgaggcagatatttttacagacgtctgtttcggaccgaaaaatctggggcttccgcaggaagaggtggaaaaacgtgcccgccatgccttaaagctggtcggcatggatgaaaaattttataagcagtccccgtttgaactttccggcggacagaaacgccgcgtcgcgatcgcgggtgtactggcgatgcgtccggagatgatgatcctcgacgagccgacggcgggactcgatccgcaggggcgcgatgagattttaggtcagatcgagcgcctgaaccgggagcacgggctgacgattttggtggtttcccacagcatggaggacatggcgcgctacgtggaccgcatcatggtcatgaacgacggcgtgaagatgtttgacgatacgccgaaggaggtattccgccattacaaggagttagaggcgatcggtcttgccgcgccgcagatcacttatgtggtgcagggacttcgggagcgcgggattccgatcgacgacacgatcacgacggtagaagaggcgcgggaggcgattctggcgctgtataacaagcggagggagaaacaatgatacgggatatcacaatcggacagtattatccggtcgaatcagtggttcaccggctggatccgcgtaccaagctgtttggaacgctgatctacattatttcattatttttcgcggacaacctgctctgctatgcagtggcaaccgtatttctggcgatggcggtccgcacctcacgcgtaccatttaaatttatcgtgcgaggactcaaggcgatcgtgttcctgttacttatcagtatcagctttaacctgtttctgacgagcggacgggttattttccagattggatttttaaaagtgacgcatgagggcttgcggctggcagttttcatgggtctgcgcctgatgtatctggtgattggttcctctgtcatgacgctgacgacgaccccgaaccagcttacggacggcttggagcggagtctgggatgcttgaaccgtctccatgtgccggtgcatgagatctcgatgatgatgtccatcgcgctgcgctttatcccgattctgattgaggagacggataagatcatgaaggcacagatggcgagaggcgctgattttgaatctggcaatctcgtacagcgggcaaagagcatgatcccgattctggtaccacttttcgtatcggcgttccgccgcgcgacggatctggcgatggcgatggaggcgcgctgctaccggggcggaagtgggcgcacgaagatgaagccgctgcattatgagaggagagaccggattacctacttgattcttctggcttatctgggaattgtgattgtactgcggatcgttttttagcgaaaaaggggttactgtccgcgggtgggcacttttggaaccgaaagagaggtgcataggctgtgcaagctgtgtgcctcttgatttttgtattttggttagttacagctaacataaggtggaatggagaacaacagaaggaggacttcaatggaattaaaacagcttgaatattttatggttgcctgtgaaaaaggtagttttaatcaggcagcagaatgcctatacacatcccaaccgaatgtcagcaaggtgatcgggatgctggaacaggagctggggcgtgcgttatttgagcggacaagcagagggctcagggttaccccatatggagaaacggtccgggagtatgcacacaatattttaaatcatgtgagtcttattaactcgctggcagaagatacgcaggaacggaaatttaccgtttctacctacccgagcaacatgattgcgaggcttctgacagatttttataagaaatatggctgcgagtgccagatttcccaccgggaaggcagtgtggaggagattagtgatcaggtatcccagggaatttcggagttggggattgtgtatgtagcacagaaacaggttccggcattccggcatattttgtcccacaaaaaattgtcttttcaggaactggatgtcaaacctgcctgtgtttatgtgggaccaaatcatccgcgttatgaggatgagagtatcgattttaccgagcttccgcagttaaaattcgtcagcggaatccgggattttttctcaatggagcatcatttaaaccatgtgagcctgggagcgatcagcacggatatgctgaatacggttgtacataccaatagcgatcatatgacaatgaatctcctgatgcagagcgatatctgcagcctgggaattgattttttatatgaggattataaacaatatccaatccgtaatctgaagatccggaatagtgaaccatttctggtaatcggatatatttaccagaatgaagaaaagctgagtgcggaggcagcgtggtttttagaacatttcaaaaaaatgctttaattgtttagatataacaaatcgttatagcaatccccctgtaaaacgatagtggttagttgtgcgtaactatgttatccttttatctgccggtaaaaacgaattgttttaacaaagtagataaaagagatgcaggctttcaaacctgcgtcaggcataacaggaggacatatatgaaaaaaagtaaaagactcatagcggcagctggtgttctttccgtggctgtcttggctggatgtggcggaaacgcttcaaacagtacagaagggacaaaatcagagcagagtgcatcggcagagagcacgaaggatgaactggtatttgttaattatcgggatatccgtgatctgaatccacatctgtatgcaggtgaaatgtatgcacaggaaatgctctacgagaccttagtcaatattacagaaaatgggtatgagggctgcctggcagagagctgggatatcagtgaagatggaaagacctacacgttccacatccgtgatggagtgaaattttcggacggagaggtgtgtgacgccaacgcgatcaaggcaaactttgatgcaatcattgaaaacaaagatcgtcacacctggctggaaatgatgaatcttctggttggggtttcggctccggatgataaaacctttgtgatcgaactgtcggagccgtactatcctctgctgacagagttgggagttacccgtccgtttgcaatgatttctccgaaggcgatgaaggacggaagcacaaaggatggcgtaaacgaatacattggaacaggtccatatgtcctgaccgattttgtgacagatgagtatgcagtatttgaagcaaacgaaaactattggggggagcagccgtccatcaaaaagattacggtaaaagtaataccggataatcagacgcgtatcatggcactggaaaaaggggaaattgatctgattttcggtaaaaatatgattgatgcggatgcaattaaccagtatacgggaaatgacaattttacggttgcgttatcggatccgacctcgacccggcagattgtactgaatacaacccgtgatattctggatgagaaggaagtgcgtaaggcacttcagcatgcgacaaacaaagcagcgatttcagaaggtattttttatggtctggaacagccggcggatacactgtttgcatctaccgttccttactgcgatatcaatctgaccccatatgagtatgatgtggaagaagcaacgaagatgctggaggaagcaggctggacgttggctggagacggcgtacgtgaaaaagacggccagaaaatggaactggagctgctttataacagcgatagtgtgacggaaaaagcgattgcggagtacctccagagcgaataccagaagctgggtgtctccctgaacattcatggagaggaagaacagtcttaccgtgatagtatgaaggctggaaactttgacatggtatttaatatctgctggggaactccgtatgacccgcagtcctccctggcggcgatgcgcgctccggtttatggagattttgcggcacagcagggactggaagataaggcagatatcgatgatgcgattacagagatcctgatttccacggatgaagagcagcgtcaggagctgtatacatttgtgctgacccgtctgcatgaggatgcggtctatattccgcttacttatgagtgcaataaggcaatctaccgttcggatctgcagggctttcattttacacagactcagtatgaggttccgttcgctgatttctattttggagagaagaaataaaggaaaaataaatgaaacaatatatcataaaacgaatcctgtcggcaattccgcttcttattatcatttcgtttgtgtgttttgtgtttattaacctgataccatccgatccggcggaggtggcactgcgcgtccgccaggtaccggttattacagaagaagcggtggcacaggtaagggcggaacttggattggacaaaccatatctgatacgatatatttcctggctggctggctgactgtctgaggggagattttggaatcagttatgtcaatccgagccgtacagttgcgggcgaactgatgcgctgtcttccggcgactctgcagcttgcgggtgtatcgtttgtgatggttctggtactgagcattccgattggagtgctctgtgccgtttataaggatggtgtgtttgaccgcatcatgcgggcgattgtttttatgacaacggcgatgcctgcatactgggtagggcttcttctgatctggctggtttcgatcaagctggatctgcttccaacgagcggaagcgggagctttaaacacctgattctgccatcgtttacggtatcattgagttatatatcgacttatatccgcctaatccgcaataatatgttggaaaacatgaaacaggattatgttctctatgccaatgtgagaggcattccaaaccggcagattcttcttaaacacattttgaaaaattcgatgcatacttgtattgtagcgatcggaatgagcataccgcagctgatttcaggaacgatcgtcgttgagaatgtatttgcctggccggggcttgggacactctgtatcagctcgatttttaaccgggattatccggtgattcagacgtatgtgctattgatcggagtactatttgtcggatttaatttattatttgatattcttcagacaatttcagatccgcgtcttagaaaggagagtcattgatggtaggacgattgattcgaaaccgggcggccgttggaacgattggtctggtgcttatcgtggcgctcatagggatctttgcaccgtttatcgcaccgaatgatccgtatgcaacggatattttaaataaatttgccggattcagccagcagtatccacttggtaccgataatctgggacggtgtattttgtcgagaatgatttatggaatccgtccgacgctggggctggcagtcctgaccatgcttggaacgattggcctgggagcgttgatgggacttttggcaggttatttccgcgggatcgtggaagaggtgatcatgcgaaccgtcgatgtaatgctttcatttccgagccagatcatggtgtttgcagtggtagccctgttgggaatcagcgtgcagaatgtaattctggccaatgtgtttattaaatgggcctggtatgcgcggatgatccggacaggtgttatgcagtatcgtgaccggaactttgtgcgcttttcacgatgtataggaacaccagaatcttttatattatttcgccatcttgtaccgtcaattgcggcagatctggcagttttatcctctctggatgtcggatgggcgattatcaatatttcaaccctctcatttctgggactgggtgtacaggcaccgacaccggaatggggagcgatgctgagcgaggcgaagaatgtcctcaccagcaatccggtacagatgctggttccgggaattgcggtggtaattctggtagcagcgtttaacctgatgggagatgccctgcgggatgtgctggatccgaaggaggtgcagaaatgagcctgaatcatgagcgggtgcagccgattctgcgggtggatggactgaatgtagaactgaaaatcagaaataaacagaaaaaattggtcgagaatgtaagctttgaggtagagccggggcagtgcctgggtattctgggagaatccggaagcggaaaaagcatgacggtaaaagcaattctgggacttctggaccgccagttccggatagaaggacaggcatggtttgagggaaaggatctatgccgggcaggacgggatgaactgcggcggctgcgtgggcagaagataggcatggttctccagaatccgatgacctgctttgatccactttaccggattggaagccagatggccgagacctttgcagcccatacagattgggatcgggcaaagatccgggagatttccctggaagtattggaaaaaatgagaattcataatccggaggaagtgctggggcagtatccacaccagctttccggaggaatgcttcagagaatcatgattgggctggcactggcgatgaagccggcacttctggtggcagatgaaccgacaacggcaatcgatgccatcacccaggctgaaattttgaaggaatttcagcggatcaaggaagaaagtcatacggcgatgatatttatctcccatgatttgggggcggtttcgaagattgcggacgagatcgtcgtgatgaatggaggaaaactggtcgaacagggcgattttgaacatatcttaaggcatgcaaaggatccgtatacacggatgcttgcagagacacggcgctcggtcatggagcgctaccggctttgcctggataatcaggaggaattatgcttgaattaaaagatatatgtgtcagcttccggagtgagcgtcaggataaattgtttggaacctccagggaccaggtgctgtttgacgtatctttgcaggtggaaaagggaagctgcctggggatcttaggagaaaccggaagcggaaaatcgacggttggacgtgtcctttgcggacttttaaaaccggattccgggcaggtgcttctggatggggaggagatttatcgaaaccgtcaggggagaaagaatctgcagaagaaaatcagtattgtttttcaggattatacaacctcggcgaacccgcgtttccgtatacgggatattctggcggagggacagcgggcagcagcacgtaaaaagggaatccggaagctttcaagagagaaaataaaaaaaggtgccggagagctgatggagatggtgggactaagtgcagattttctggatcgatatccccatgaattgtccggcggtcagctccagcgagtctgcattgcccgggcggtagcctgcgaaccggagataattctgttcgatgaggcgatttcatctttggatgcacatacgcaggtgcaggttatggagctgcttatagatttaaaggagaaactgaatctgacgtatgtatttattacgcatgatttgacgtcggttacctatctgtgcgatgaggtgctgtttttataccgcggacatatcacagaatgccgtccggtccgggagctgggaaagacaacggatgaatatgcgcgcaggctgctgcaggcgatcgtttagatggaattgagtaaaaggagcagaaaagttctcagaacaggaaatagaacatgaaaatatatgaaacgaaggtggaggcaggcacgaagcagtggctgaaaattccggtggatgaggaatgcagcctgaaagcggcggctttctgtggttcaagaccgggaaaacggttgattgttacagcgggggtacatggctgtgagtacataggaattctggcagtttcccgtctgattcaggaactggatccgaggcagatgaagggagaggttgtatttcttccgattgctaatgaaggtggattttataaggaaatcaagcagctggtaccggaggatggtgtcaatttaaatcgggcatttccgggaacggaaatgggaagccggtcagcgaagatagcagcagctgtggaaacgtatctgtatccagatgcggacttcctcgtggatctccatagtggagatattcacgagatggtagttccgtttgccttttttccggtggcagcaggcgagacggtagaaaaaaaggcggctgcagcggcaagagcgatgtctttgtcgtggagagtggcatcaacggcgaaaaatggtctgtacagctgggcagcacagaaaggaatcccggctcttctactagaacggggcggactggggcgttggacagaaagggaagtggatgcatatcggataaatctgtatgaactgttggttcacctggatattttgccagaaagtattctggaatcagtcaaaggaatgaatttaaaagattcagaaagctccccggaatcagaggtgcttccgtccgggaaaatagagcaaaaggagattcggaccatgcgctatctggaggcaccgggaaatggattctggtatccggctatccgggaaggaagctgcctgaaaaaaggagatttactgggagaaatccggcggcttgacggcagcctgatgtatcgttatgaatcagagcttgacggtatggtcttttactataccttgtcactgggggtaagtgagggagaaccgctggtagcatatggcgaatgctaagaaaaaagcatctttggatgaaaggatccaaaggtgctttttgcataggaaaagacggtcaatgaaaaaatatctgtcaaagaaaggggattatatggtatgataaatagcagaaaatagatttttgaggataaataacagaaatagaggaatatatatgagacgaattaagctagtggtttcctatgacggaactgcctactgcgggtggcagctccaacccaacggagtgaccattgaggaggtgctgaatcaggcactttcttctcttttaaaagaggatatccaggtcatcggggccagccggacggattccggagtccacgccatgggaaatgtggcagtttttgatacagaaagccggattccaggggataagatctgttttgcattgaaccagcgtctgccggacgatgtgcggatccaggcatcggaggaggtgccccttaccttccatccacgcaaggcaaactgcgtgaaaacctatgaatacaagattttaaaccgcaagatcgatatgccgctgcagcgcttatacagctatttctgctatttcaatctggatttagagaaaatgcagaaagcggcatcctatctcatcggcgagcacgattttaagagcttttgtacggtgcggacccaggcggaggagacggtgcggaccatctacagcttagatatcaccaaggtaaatgaccttattaccatccggatcagcggcagcggctttctctacaacatggtccgcatcatcgccgggacgctggttaagatcggcatgggcgtttacccgccggagaagatggaggagattctggaggagaaaaaccgagcggcagcaggtcctacgatcccagcacgcgggctgacgctcgtaagcctggagtatgaaaaagagctggcaccgtacctggagggcgaaaataagcactggcactatgtgctcgatcagagaaatgtcccggagaaagggcttgcatacctcacgatcgagcgctgtgagccggaagagcttgacggcgtgctgcgccgcgtgatccatcaggcataccgaaacggcgcgaaacgggtgtttgtgcgggatacgtttggagaagaggggagcatctgcggatattaccggctgagacggcagccggagacggaagaaggctggctggaagccgtctacgagggtgaacatcggtgagcatgagtagaacatttgattatctggtctgtttcagcgtctattcgctgattatcctgattataggaaaatcatcgttcggtgagagcgattcgatagggaaattttttatcggagaacggaaatgcgggttctggcggctgttttccaccttcgtcgggacctgggtgtccgctgcgaccattctgggatacacgggcaatgtttttgaaaatggaacctccgtgatcgctgtgacggttatcccgtggttcatcggcgcggggctgctgtatctcatcagcggccgtatctatgactgcgacatgctcacgatcccgcagtttatcggggagcgctaccattcccgctttctgcgtacctgctgtgcgctgctgctctcgggcggttacgttttttatctggtgatccagatcaagggatttggaattgcggcggcgacgcttttaaatatcgattataaagttgcaatttttttggtttatctgtttattctgtattctacctttggaggattcaattcggttaccaagacggatggcggaaaccttatcatgctcacgatcagtatagtggttgtctattttgtcgtggtcggaggaatagagggaagcggatttctgacaaacgcggaggtgttcagccgaaatgcggcgggcagcgggacggacagttttggaaatctgatgaaagattacagccttaccatgtacctcacgatgttttttggctggggtatggggctggcagcgaacccacagtatctgatccggattgtggcggcaaagagccgtgagacggcgcggaaagtcctgatctgttcgctggtgttcttgacatttttttatttctgcctgacccagatcggtctggggcttcggatcctgtttccttatctgtcctattacttcggatcagacgatatttttgtctacgcaattaattatttgctccgatcacggttcagcggatttttcttaatcagcgtgatcggcgcgtgcatgtcgacggcgaactcgcagctgcttctgattggctcgatgatgtcctacgatgtggcggcgcagtatggaaaatggaagaaaacagaggaccgtatcctggggctgacgcagctctttatctttctcggcggaacgctggcgcttctgctctccttaaatccaccgtccaacagcctgtttttcggcgcggatatctggggattgttttcagcaattctgacgccacttctctacggtacgctttattataagcgggcaacgaggacgggcgcatgggcggcatttgtgacaggggtaaccgggacggtgctgcttcagccacgcgagctgccggtttactgggggtttccggtgacgctgtgttcgaccctggtttttgtccttgtcccggtgctggagagtatatggaaaaaacgtgcttgctaaaggcgggcatttggaaacatgaagctgtcagacaacagcgagaaggaggcgaaaacgagcgatgaataaatggctgaaacgtctttcaaattggtttttccagattgaaaatgaggtcatgattccctttgttctggtgggaatccttgtcatcggaagtttcagcgtgatttcctattataatggctacacgatgcagaaaaacagtgagatggagctggcggatacgctgtttgaggatgtaaaccgcgatctgcactttctggaaaagcgtctgccggaggaggagatcgcggaaaaataccggaattttgagcgcgggcggatccggattctggatcgtgacggtgaggagatcacggctggaacccgttgggaaaacacatcggtactggcagtcagcaagggggacaatccatttggctggcggctggagtaccggatgaatgagagaatattcggggaacgcatcttagagcagcagagctatctggtagtcggcgccatcgcgtcgctgattctcatctgccaggcaagcattttcatttcccatagtatcacgcgccccatccgcaggatgagccatacctgtaaggaaattgaggaaaacaagggcagttatcagaaataccggtttgaggcggtcagccgccacgacgagatcggacagctggcggttacctttgaggggctgctcaaaaacatggataattacacgaaaatggaatataccagccggatggcagcgacgctggcgcatgagatcaagaacccgatcgcgggcatccgctccggcattcagcttttaaagggcaggacggtcaaggacggcgataaaatgctctgtgacagcatgatccatgagatcgaccgtgtcacggcgctgatcatgaaccttctgactttgtcaatccggcgtgaatcaccgaaaacggagatttctgtgaccggtgttttaaaggagatcggaatgatctatgcgaaaggaccggacagccgccgcgcatcgctttttgtggaggcagaagagggactgagggcgtgtctcaatgaaaatgagtttcgccagatcattcacaacctgatcagcaacagcctgagggcgctggtaccggaccgcgagggacagattaagcttatggcagccgcgcaggagaaagaagtgattgtgacggtgcaggacaacggaaaaggcatgacggaggaagaagtctccaaggcgctggaaccattttatacaaagagcatcaacggaaccgggcttgggctctcaatcgtgagccgcctggtggagtcaaatggaggaacgatggagatcgtgagcaagccgggggtagggacagacgtggttttaaaatttccggggaaaatggtatagtgtgaccatttaatgaggtatttcacgaatttagtatttagagtataatgttatgaaacagggaggaggatgcacatggatcgaattttgattgtggacgatgaatttctgattcgctatacactggaggaaggactgaaagacaggggatatgacgcctattcagccgcaaccgtcgaggaagggctggagtttgtcaggaaatatcatccgggtgtgctccttctcgacaatctcctcgaaaacagtgtcgggatggatgagattgtcaatttcaaaaatgcagatgaggaactgcaggtcatcatgatgacggcgtacggttccgtctcccaggcggttgaggcgacgaagcgcggtgcatatgattatattttaaagccgtttgatgtggatgagatcgatatgctgatcaagcggtgtctggagcagaagcgcaaccgggattcactcgtcttcctgaaaggcgatgtgccgcagtttttaggtgtcagtgaggcagctgcccggatccggcaccttattcaggtgcttggggaaaatttgtcggtcaatgtactcctgcgcggggagacgggaacgggcaaggaagttgtggcgcggcagattcatgcgaacagcgcccgcaaggataacctgatggtacgcattaactgcggtgcgattccggaaaatctgatggagagcgagctctttggctacgagcgcggcgcgtttgcgggggcgctcaagacgaaaaagggcttgattgagctggcggacggcggtacggtctttttggacgagatcggcgaattgccgatggcgatgcagacgaaacttctgaccttcctggatgaccggaaatttaagcggatcggcgcgctggaggacacggcggtcgatgttcggatcattgcggcgacgaatagaaatctcgaggaggcgatcaaggcggggcaattccgggaggatctgttctaccggctgaatgtcatgcagatcgagattccgccgcttcgtgaccggcgcgaggatatcccggtgctctgtgactattaccttgactattataataaagcctttgcccgcaatatcgaaaaagtggatccggatttcatgcgggagctgctcttgtacgactggaaaggcaatgtcagggagcttaaaaatatttttgagcgttgttttctcttcagccagggaaatatcctggaaaaacacgtggagctggcgccggtcgagcgggaggcaaggccggagagcggggactgcatctatctgaaagatctgaaaaaaggaccgatcgacctcgagcaggaggtcgcggcgctggagaaacgatatatgtcggaggcgttgaaactttccggcaataacctgacgcgggcggcggcactgctcggcgtcacccggttctcgatgaaacggaagatggagcgggaagacggggagaagtagaaaaagcagaaaaactgtatcaggaggaaggacgaaaacggttgtctggtaaaccgggtgcaggaatgaatggtaaaagagtgcaaaaaatcacatcgtgcaaaaacgcacgcctaaaacgtgcgttttt

SEQ ID NO: 11000 - DNA, 29402 bp, Unknown
  gut microbiota DNA sequence
ccgccgccgggaccgcgcccgggaggaccaggaaatccgtggggaccgccgcccccgccgccggaaccgcgtccggggagaccggggaatccgtggggagcgccgcttcaggattttcttcaggttttattaatgaatgagctgcaggagcgaagacggtgtcggaagtgctgaaattgcggtttttgggtgcaaattttctgaatcaaaatgcggtaacatccagttgtgacacggattttgccgatttggaaaaagaacaatcggagtgaaaaatcggagttcttacaaatcatagaaattctggaatttgaagcctgcttgtgttatactgagacaaaggctgccgccgggacagataggtgcctgcggcagtttttggcgtacatgacaaaacaaaaacagttcgacgggtagattttcctgtacctgtgaagatacggaactggtatggtggagagataaaaggaattgatttgatatatgaagaaaaacctgaaaaagatactgattttactgatcttatttgtgctggcagtagccggttattttacctggtcctggatgcagctgcgggaggatggggcagtctatacttcgattgaggacgcgaaccttccagtcgcttatgtgaatattctggggcggcggatgaacgagctggacggtttcgtggaggacagccagaaagcggctggacgcggggatctgacgctgcttccggcagaccggaaactgtcggtgacgatcgacaagctggactcccagattacggggatgcagtatgagatccgcagtctggacggcgaacgtctggtagaacggacaacgcttgaccactgggaacagtcaggggaagaggtttctgcggagcttccgatccagaaccttctgacggaggaaagcgaataccgcttaacgattgcgatcacgacggaaaagcacccggcgatctatttttacacgcgcgtgatgtggcagcaggagagccgtgtgcaggagatggtcgatctggcggtgtccttttctgaaaagacgtttgattatgattcagcgagggagctgacgacctatctggagacggatccgaatgcggacaacagttcgttgggacatgtgacgttaaaaagcgatttcagccagctgacctggaaagggctttcgatggagcgggtcagcgaaccggaaattcatctgcgggagctgcaaggcatcattgggacgatcgatttaaagtatgttgtaagtgagatgaaggatggcaaggcggctgcttattacgatgtgatcgagagcttcacgatgaagctgggcgcacagcgcatctacatgatgaattatgaccgccgcgcggaccagatttttacgggggagagcagcgcctattctggcgaccggattcagctgggggtttcggatgcggaggatctgcagtcgatgcaggatgaagcgggaaaataccgtgcctttgtggcaaaccgggcgctctggatttatgatacaggaaaaaaagagagcacaaaggtatttgcgttccgcaagagcgagaatgatacgagggtcaattatgatacctacggaatcaagattctggatgtgagcgaggcaggccagattgattttgccgtgtacggctatatgagccgcggtaaccacgagggaacgacgggaatcgcgctgtaccgctatgagactgcgggaaatgccctgacagagcggctgtatctgccggcatcgaccgattacggcaacctgcgccaggatatcaaccagctgtgctacttaagcggcgggcagacgctgtatgtgctgatgaaccatgcggtttacagtgtcgatctgacgggaaaagagtacatggtggtggcagatggcctgacggaggaaaattttgcagtcagcacggatgcctcccggattgcgtggcaggatggggcggatatttaccgttcgaccaagctgcatgtcatgaatctggagacaggcaagaaggatgagatttccttccaggagcagaccgtgatccggctgatcggatttgtcggaaccgacttagtctacgggcttgcccatccgaacgagcagcttacgatggacggacgcgtgacggggcttccgctgtatgcggtcgagatcgtcggcagcaatatggagatggagacccgctatgagaagccgggtgtcagcctggtggatgtgcggattcaggacagccgggttcatctgtcacggatgcaccagataggaagcggctatcagccgatggacgaggacacgctggtctgtaatgaggaagtgtcgaaagatccactggatggaatcgctacattaaatgacagcgcaaaggggcgtctctactgcgtcaagctggatgcaggcaagacggcacggagcacgaaggtgcatgttccgaagcaggtggcagcagaagaaaatgatgtgattgtgcttcagaacaatggcgcggctgcacagcggatttacagtgcctacagcgagggacgcctgaaaggctcgtatgcggaattttccagcgcggtgcaggcagcttacgatggcatgggactcgtaacggatgaaaatgaccgggttgtctgggtgagagcaaaccggagcgacgcgaagacaatccgcgacgtacagaatatggcgggaaccgtcagccgctatctgtcggatatggcggacggaaagacgacctcctcggatggcacagagttaatcgacgcacgcgggctgacgctgaaccagattctctactttgtctacgcgggcatgccagtggtggcatatctgggagacggaagctatggtttgatctgtggatacgacgcgtacaacatctcctgtctctggtatccgggcacggaatttgcctacacggataagatgggactcaacgatgcagcagcatttttcgagggaaatggaggcaatgatttcatctgtttccttgctaattaaggagaaaacggaagttactgttcacggggaggcacttttggaaccgaaagtgccgtaagaaaacgtggtggcagcaggaatttgccgtattagaatgcgaagccacggcaaattccattactgggcacatatgcgtgaacagtaataaacggaaagccagtgctttacaaattgagatgttatgatataatcatgtagataacatgatataaatttaagaaaatattaaagatttgaggcgccgtctggcgcgtgtaagtatcgtaagataatagattttgaggtgcagaatggaacaatttattatgaagggcggaaatccgctggtaggcgaagtgactatcagcggagcgaagaatgcggcgctgggaatcttggcggcatcgattctgacggacgaggatgttttaatagaaaatctgccggacgtgcgtgatatcaacgtgtttctggaggctgtttcggagattggcgcgatggtagaccggattgaccggcacactgtccgcatcaatgcgaaggggattcatgcgatccatgtggatgacgagtacatccgccggatccgggcttcctactattttattggcgccctgcttggcaagtataaaagcgcacaggttccgcttccgggcggatgcaacatcggcagccgtccgatcgaccagcatttaaagggcttccgtgccctcggtgcgaaggtacaggtggaaaatggcgcggtgctcgcacatgcgattgatttagttggtacccatatttatctggatatggtgtcggtcggcgcgacgatcaatatcatgatggcagcgacgctggcagagggcgagacgatcatcgagaatccggcgaaagaaccacatgtcgtcgatgtggcgaacttcttaaacagcatgggagccaatgtcaagggtgccggaaccgacgtgatccgcatccgcggcgtccacaagctgcatggaaccgaatattcgatcatcccggaccagatcgaggcaggtacatttatgtgtgcggcagcgatcacccgcggcgacgtgatggtacagaatgtcattccgaagcatctggaagcaatttctgcgaagcttatcgagatgggctgtgaggtgacggagtttgatgaggcggttcgtgttgtgggacgcccgagccatgtgcataccgatatcaagacacttccgtatccgggatttccgactgatatgcagccgcagatcaccgtgacactggcactggcagagggaaccagtgtagtgaccgagagtatttttgaaaaccgttttaaatatgtggacgaacttgcccgcatgggtggacgcatcaaggttgagggcaataccgcgatcattaccggcgtgaagaagctgactggagcacaggtggaggcaccagatctgcgcgcaggcgctgccctggtcattgcggggctggcagcggaaggatatacgaccgttgatgagatcggttatatccagagaggctatgagcattttgagaagaagctgcagggacttggcgcggtgatcgagaaagtcgattccgagaaagaggcgcagaagttcagactcaaagtgggctgataaaaaagaatgcggtgtcacatattgcttgacagacaccgcggagtatgttatcgtactgttgaaacttttaacaattaaaaagttcgtatatatcccttattcagagtgatggagatacaaaggatctatgaagtcacggcaaccccgttacatgggactgaaaattggtctcagcagggaacggaaggtgccagcctgagcgaggaaccgggagatcggtttatcgagcaataagaggatttgatcgagataatcaagtccgtgttgctgcggactttttttatgtcttacgacaaacttatcaaaggaggaaatatggagagattactttttacatctgaatcagtaaccgaaggacatccggataaaatgtgtgatcagatttccgatgcgattctggacgcgctcttagagcaggatccgatgagccgtgtggcttgtgagacggcgacgacaaccggtctggttatggttatgggcgagatcacaacgaaaggctatgtggatatccagaaggtagtccgcaataccgtccgtgagatcggttatgaccgtgcgaaatacggttttgactgtgatacctgcggcgtgatcgtggcactggacgagcagtccccggatatcgcgatgggagttgataaagcgctggaagcaaaagagaacaagatgaccgacgaggagctggaggcaatcggtgccggcgatcagggtatgatgtttggttatgcgaccaacgaaacggatgaatatatgccatatccgatttatctggcacacaaactggcacgccagctgaccaaggtccgcaaagacggaaccctgcgctacctgcgcccggacggcaagacacaggtaaccgtagagtacgatgagaacggcaaaccatcccgtctggatgcagtggttctttccacccagcatgacgaggaagtaacccaggagcagatccataaggatattaaaaaatatgtatttgacgagattctgccggcagagatggttgatgagaatacaaaattctttatcaatccgaccggacgtttcgttatcggcggtccgcacggagacagcggcctgaccggacgtaagatcattgtggacacctacggcggcatggcgcgtcacggcggcggcgcattctccggaaaagactgcacaaaagtggatcgttctgctgcatacgcagcccgctatgttgcgaaaaacatcgtagcagccggactggcagacagatgtgagattcagctttcctatgcgatcggtgttgcacagccgacctccatcatggtagatacattcggaaccagcaagttgcgtgaggatcagctggttgagatgatccgcaagcattttgacctgcgtccggctggcatcatcaagatgcttgacctgcgccgcccgatctacaaacagacggctgcatacggacatttcggccgcgacgatctggatcttccgtgggagaagctggataaggtggatgaattaaaggcgtatctgtaagagtaggaaacgctgctgggatatctgcccgtaaaaaatcataagatcagaacgagggggctgccgcttttgcggcagtctcttttattatacaaaaaggcacatgcttttttatttataatacttttagagacgtaatctgcaaaatatgatacactatttgtggaagatatcaggagcaaaagcgcagaagtccgacgcagttttgcgggaggatttttgtaggggcaatctggtatcagaccgggcaatgactggaggaaataggatgaagatacgcacacgtctggcgattgcttttgtgacgattacggtcgttccgattgtgctcatatttgtggcggcgttcggactcgtaaactatcaggagcatctgtttcagaaaacatacgggctgtcggagcagatcgatctgctctccggcaatcagacacaggtgtttaaccgactgacgcagggaatccaggaggagatccgcgaggcagtcggggaaaatacagatttatttgaagaaccggcttatttgaacaaggtcaatgaagaactgcgcgataaatattcgtatctggtcatccgcaagggcaaggacatcacattctgcggaagcgaggatggacgcgagctctgcgaacggctggcgccgtacggtgatcagggaagtatggcaggcagtatttacatggatggcgaggaacagcatctggtcaaacagatcgatttccggttttcagatgattcacagggcagtgtgttcatcgtgacgaacgtcggggattatgtgccggagatcaaggcgctgctcggagagatgctgcttctcggcgtgctgattatcagttttatgggcggtctgctgatcatgtggatctaccgttctctgctgcgtccgctgcacaagctgcaggaggcgaccaagcagatccgggatggaaatctggactttacgctcgatgtggatgatgaagatgagatcggaatgctctgccaggatttcgaggagatgcgtctgcgtctcaaggaatcgcaggaagaaaaactccagtacgacaaggagagcaaagagctgatcagcaatatttcccatgatctgaagactccgatcacggcgatcaaggggtatgtggaaggcattcaggatggcgtggcttcttcacctgagaaattgaataaatatattcggacgatttataataaagcaaacgatatggatcgactgattgacgagctgacgttctattcgaagattgatacgaacaagattccgtacaacttttcaaagatcaatgtggcggaatattttggtgattgtgttgaggaagttggtctggatatggagacgcgcggcatcgagctgggatatttcaactatgtggacgaggatgtggtcgtgatcgcggacgcggagcagatgaagcgagtgatcaacaacattatcggaaattcgctcaaatatctggacaagaaaaagggtattttaaatatccgcatcaaggatgacggcgattttatccaggtcatcatcgaggacaacggaaagggaatcgcggcgaaagatctgccgtatattttcgaccgtttctaccggacggactcgtcgagaaattcgtccaagggcggcagcggcatcgggctttcgatcgtaaagaagattatcgaagatcacggcggacgcatctgggcgaccagcaaggaaggcatcggaacggagatccatttcgttttgcgcaagtatgtcggggcatagtgatttgaagtttggtcgtttaaataaaaacagcaggaggaattcacagatgagcagaatattaatcgtagaagacgaggagagtattgcagagctggaaaaagactatctggagctttctggttttgaggttgagatagaaaataatggagaaacgggactgaaacgcggcatggaggaagattttgaccttctgattcttgatctgatgctgccaggggtcgatggcttcgagatctgcaagaagatccgggaagtaaaaaacacaccgatcatcatggtatctgcgaaaaaggacgatattgacaagatccgcggtctgggactgggcgcggacgattatatcacgaaaccattcagtccgagcgagatggtggcgcgtgtcaaggcgcatctggcgcgttatgagcgcctgatcggcagcggtatgccggaaaacgagatcatcgagatccggggactcaagattgataagactgcccgccgcgtttacatcaacggcgaggagaagaacttcacgacgaaggaatttgacctgctgacctttttagcacagaacccgaaccatgtatttaccaaggaagaactcttccgcgagatctgggatatggagtcgttgggagatatcgcgacggttaccgtgcatattaagaagatccgtgagaagatcgagttcaacacggcgaaaccgcagtatattgagacgatatggggcgttggataccggtttaaagtctgatgactggataagccacataaaaacgacccttgggaaacgcaaacaggagcgctttccaagggccgttttatatttcataggaaattgcgtcctatgaaatataaaatgctccgcgaggatgcgcactcgcgcgaagcagaaacatgtcgcaagcgaccgcgcgagacgcccgaatgtgccaaggcacattctttttcatcccaacaggatttggtctgcctgtttcagatcgttctcgtccgggatacggatgccggacagggaatagggaatgccaagcgtttcccatttatagatgccgagcgtgtggtaggggagaatttctaccttttccacatttgaaagtgtgtccagaaatgcacggattccatgcaggttggctggatcatcggtaatgccggggactaaaacatgccggacccacatgggcttatgaatctggtctaaaaaccgggcaaaggaaagaatggattcgttggagtgcccagtcagaagacgatgtttttctggatcgatgtgtttcagatccagaataacaagatcggtgtgctctaaaagcgtggtcaggcgggaaaagaaaggttcggcggtggtaaatggctgtcccgcggtgtccagtgtggtgtgaatgtgctgttctttggcaagctggaaaaattcacacaaaaagtcagcttgaaggagcggttctccgccgctgacggtgatgccgccgcccccgcgccagtaactccggtagcggagtgcctggcgaagaagtgcttccgggatgatttcctgcgaactggtgtgtttagatggacaagaaacaccttcggaaagagcggatgcgccggaagtgcgggtggaggcgtccgggagggaaagtccctttggcagtacccatgtatccggattgtggcagtagcggcagcgcatgagacagccctgcatgaataccacgaagcggacaccgggaccgtctacggagccgaaggtatcgatggaatgaatataaccggtatgcatcgttacagcacctcatggcaggtacgggcgatcacgtcgagctgctgttctctggtcagattgataaatttaacggcatatccggaaacacggatggtgaagttggcatattccggtttttccgggtgttccatcgcgtctttcagtttttcgattccaaagacatttacatttaaatgatgcgcgccctgatcaaaatatccgtccaggacgtgaaccaggttgtttttccgttctgtctcggagtgaccgagcgcccccggtgcaatcgtttctgtgttggagatgccgtcgagcgcatattcatatggaagctttgcgaccgagtttaaagaagcgagcagaccgttctgctctgcgccgtaggaaggagttgcgcctggggcaaacggggtgaatgccggccgtccgtccggaagtgcgccggttgccttaccatatacaacattggaggtaatcgtgaggatggaggtggttgcctcggaattccggtaggtgtggtatttttttactttatgtaaaaaggtttttaacagccatacggcaatctcatcggcgcggtcgtcatcatttccgtagcgtgggaaatcgccctctgtctcaaacttgcgggcgatgccgtattcatcacggatgaccttcacttttgcataccggatcgcggagagagaatcgaccacgtgggagaaaccggcgattccggtggcaaaggtacgccggacatccgtgtcgatcaacgccatctcagcggattcatagtaatatttatcgtgcatatagtgaatcaaattgaggatattcacataaatgcccgccagccagtccagcatctgatcgtatttatgcatgacttcctgataatcgaggtattcggatgtgatcggcgcatacgccggaccaacctgcatcgggcgtccgtctttggtagtgtatttctcgtctctgcctccgttgatggcatagagaaggcatttggcaagattggcacgggcaccgaacaactgcatttccttgcctgtctgggtggcggagacgcagcagcagatactgtagtcgtccccccagatgggacgcatgacatcgtcgttttcatactggatcgaggatgtgttgatggagattttggcagcatatttcttaaatgcctctggcaggcgggaagagtaaaggacggtcaggtttggttccggggacggtcccatattttccagcgtatgtaaaaagcggaaatcgtttttcgttaccatcggacgcccgtcttgtcccagaccggcaacctccagcgttgcccagaccggatcgccggagaaaagttggttgtaggatggaatccgggcaaattttaccatgcggaatttcattgtcatatggtcgattaattcctgtgcctcggcttcggtcagtgttttttctgttaaatcccggttgatgtagatatcaaggaaggtggaaacgcgtccgacactcatggcggcaccgttctgggtcttaacggcagcgaggtaaccgaagtagagccactggacggcttctttggcattggaagccggacgggagatatcaaaaccatagatggcagccatctcctgaatgccctttagagcgcggatctgctcggcgagctcttcccgctggcggatgatgtcatcaaacatggcaccatttccgcagcgttccagatcctttttcttttcctgaattaggaaatcgattccgtacagggcgatccggcggtagtcgcctacgattcggccgcgtccgtaggtatccggaagcccggtgacaatatggcagtggcgggcggctttcatttccggggtatatgcatcgaagacggcctggttgtgggttttgtggtattcggtaaagattttatgaaattttggattgacatggtagccgtaggtttcagcggcttcctccgccatcttgattccgccgaatggcataaatgcccgcttgagtggtttgtcggtctgaagtccgacgatgcgttccagatctttaagctccggatcgatatatcccggaccgtaggcggtcaggctggatacgatttcagtttcgcattcgagcacaccgcccttttcgtgctcttccttctgaagcttttgaaggcgttcccagagcagatgagtggcactggtcggggcagcgagaaagctttcatcgccatcatattgcgtatagttgttctggatgaaatcgcggacgttcacttcgtcggtccatttggagcccagaaaatctctccaggccgtttggaagataggtgtgttttggaatgtttgatacatagcagacatgtgtttccctcctggttgaaaaatttcgatcccagcagagacagtgagagtgaaaaaaagtaaaaaaaatacccacggtctgtgctgtgacgcccagacggtcggcaatttccagtcatacttcatgtggttaatccacttatccgtcagttgtatgactgctatgtttaagatatatcagaaccgaagaggaatgtcaagctatattttggggaagaggtaacggttcaaatccgtagctgttcatagtaacaaaaagagtgccggaaagagtggacatttggcaaatgacttgataaaatgagtaaagttttagggcagatgggaatgaaaaagggataaaaagttgctgggcacgatgcttgaacagtaatgatgaaacctgaatttgacagaaatgacagaagtgaggaagaaaatgctggaaaaattttgtgtcgggctggtgcggattttgttgggaggaattctttttttcatgacactgctcagcgcggttgtgacctgccgggtctatggaggttctgagattgtacagtatggaagggacagtctgtttctgcacctgttttttggtgcgggtgtgattggactgacggtgttttacaggcggagaaaggaacgaaagtgccggaagaaccagtggcttcttttagcggctgctgcctatcttttttggattctccttgtcccgtcctggggcggttctgactcccatcagtgtatggcgtccgcgcaaggacttctgcagggcgatttcagcgcctgggagccggtggcgtattcatatgggacagcggaaggaccgcttgggtatgcgtacacttacccgtctcagaacgggctgattctctatatggcagtgctggcatttttctttggagatgcggcgtatgtagttttccagattttaaatatcggattttttattctgggaatcgtgagcctgcagcggatgacggtctggggaaacgaaaggtgcagcttgcttttgtggatggcgtgctgtctgccattttctttctatatcctcttcgtgtacggcacgatgccaggatttggactttcgtgtctggcgatggaacgtctggtgcggtatgtggaagaggggcggggaagagacttctggattggcgcggcagcagtagcggcggcggtgatcctcaagtcgaattatgagattgtgctggtggcgctgtttttgtatctggcatcctcgggagtctttcgaaggaaagcacgcctgctggtggcagcggtgcttctgattacagtgtatgtgattggaaaccgggggattcaaacaggaatttcttctgtgaccggacgcacggtatcggacggtgcgccgatgattgcctgggtgcagatgggactggaggagagcaaacgtggaccgggctggtacaatggctatcaggtaaaactctttcagaaggcagatggggatgcggatctggcggccgcatgggcgcaggcagatttgcggaaaacgatttcagatatggcagaggaaccggcgaaagccgctgatttctttgttcggaagatcgagtcaatctgggcggaaccgacctttcagagtctctggatccaggaggtgggaaatacctcctgggcggagggaagcccgccatgggagcttttcaaggaagaagggggtctgaaccggctctatgtttttgcggcgaatctggtgcagacgtttgtgtatgcgatggcatgtgtatgggtgattgccgggatgagtgccaaaggaagccgaagtaagcatgtcctgatgaaccgaacatgggaaaagaggatagaagcagaaaaggcagaaaaaactgtgaaagctgtgaaaaaacagggaatggaaacggtctgggagaggcaggaacgtggagaaacggacagatgggggatgctgcttccgggaatcgtgtttattgggggattcctgttccatctggtctgggaggcaaaggggcagtattcggtggtgtattttatgctgctgctgccgtatgcgtatctggggatggaaagagtggcggatgtatttttagatgtgacaggtgccgggaaagaatgatgttttgagataaaaaagatactgggaacagcctgaaataagccgttttcagtatcttttttatggtttaaaagagctatgatttctaaaaatccattaaaaattgcaatgataaatccgctccgccgcctgatagaacacagtttcccagtatttttccggaatcagccgtttcgtaatttcgatgtaatcttcatagttggcgagcggccagtcggtgccgaacatgagcttatcatagtcgcggatgtaggcaagccaggttttcagggtgctgatatacccgctctgctcttccagaaactccggaatgtcaaatttgccctctaaaagcccagagaggtcggcggcgacattttcatttttctcgacaacggcggcggcatccatcagccacgggttgccgaagtggcacatgacgaactggacatccggatggcggacggcggcttcatcgagggtcagcggatggctgtatttgatgaatgctttggaaccggcggtctgtccggtgtggatggcaaccggctttttatacgccttggcgaggtcgtagatcggttcgaagcgctcgtcggtaacgtagatggaatcatatcccggatagagtttgatgccgacgcaggtattccgttttaagttttcttcgacaagatcgcatgtcttctgaatcttttccggcgtcagttttcgtgcttcgacgccgacgcaatagcgcagaaaatccgggtatgtgtgattatccgggtgaacgccgcggtttcccatgacgatgccgccgacgatattatatttctgaaagcattcccgcagatgctcttcattattgatatgaccggcttcgatggcaatctcatcgaaatgcgggtaaccgggacaaaagtgcaaatgtgaatcaatgattttcataatgataacaggcgcctgtatcaaaaaccttttggaaaaagaacggcgctgtcctcctttctgctgtgatgtatgtctggaagttttgagaaaatccggtgcaacaaaacttcgggtgtatataaataagaaatgcagtgacagtccggcaggttcatagagcatgcagcaactgtatgaaatcaactgttagtgtagtcccaaatggggtggatgtcaaatttttctccatctgtttgacatccacactatgatctggtatagtgatagctatgcgtattgcaaaggggcaaactgcctctttctttttttgtaaatattccggaagaatgcaaaaaagataactaatatgatatatgaaatgtatctccggaatgtgcagaccgttaatcagacaatgaaaggaatagaatggaaacaatcagatttgaagatttagagttagatgcaaagatcatgcgtgcgatcaccgatatggggttcgaggcggcttctccgattcagggacaggcgattccgctggaactgcagggactggatatcatcggacaggcacagaccggtaccggtaagacggctgcgtttggtattccgctgttacagaagatcgatccgaagaataagaagccgcaggcgatcattctctgcccgacccgtgaacttgccatccaggtatctgaggagatccgccgcctggcaaaatacatgcacggtgtcaaggttctgccgatctacggcggacaggagatcggacgtcagatccgttccctcaaggatggtgtgcaggttatcatcggtacgccggggcgtgtgatggatcacatgcgccgcaaaaccgtcaagatggatcagatccacacggttgtcctcgacgaggcggacgagatgctgaacatgggctttttagaggatatggaaaccatcttaagcgcactgccggaggagagacagacgctgatgttctcagcgacgatgccgcaggcgattcagcggatcgcgacgaacttccagaaagatccgcagattgtgcgcgtggtcaagaaagagctgaccgttccgaaggtaacccagtattattatgaagtaaaaccgaagaataagctggaggttatgtgccgtctgctggatctctatgatccgaagctctcagtggtattttgcaacacgaaaaagcaggtcgatgagctggtacagggcttacagggacgcggttattttgcagaaggacttcacggcgatctgaaacaggagcagcgtgaccgtgtcatgcgtgcattccgtaccggacggacggacattctggtggcaacggatgtggcagcccgcggtatcgacgtcgatgatgttgaggcggtattcaactatgatgtaccgcaggatgacgagtattatgtacatcgcatcggacgtaccggccgtgccggacgcgagggcaaggcgtttaacctcgtagtcggcaaagaggtttacaagctgcgcgagatccagcgctactgcaagacccgcatcattccgcaggcgattccgtctctggacgatgtgacctccatcaaggcagataagattctcgaccaggtgggcgaggtgctgcaggacagcgatctgagcaaggtgatcgatattgtagaaaaacgtgtgctggaagaggactacacgacgctcgatctggcagcagcgctgctcaaaatgatgatgggcgaagagggcgaggagctcttagaggagaaccgcccgctgcgtgagctggaggatctcgaggatgagagccgccgcagccgtggtggaagaaacggcagaggaagccgtggcagaaatgaggacgtagcgcgtctcttcatcaacatcggaaagaaccagggcatccgtccgggcgatatcctcggtgcgatcgccggagaatccggcatgccgggacgtatggtcggaagtattgatatgttcgataattacacattcgtcgaggtgccgagagagcatgcggacgttgtactgcaggcgatgcgcggtgcgaagatcaagggcaagaacgtgcatatggagaaggcgaaccggaagtaaagagcatattgaaattatatttggcatatgctataatgccattaggcgaaaagacaaaagtgttcaaagtggcacaaaaacaaatccctcaggtgcgggcacacctgagggattttattccatttgggcgaggtggcttaagcctctggctgactacctaacgatgtccgtccaaccacttgcatatgtaataggcgattacacttgccacgacggacacaagaaaagacagaaatatattcaaaatggcacaccccctttctgcacctgtctaggggtggtagctgtattagtatatcataaagataaaattataaaaagtcatctttgagatgttttgtttgtctcaaagatgactttttatcttaataactttaaaatttgctcttacagctccgccgtaataaaaatatcataaatcgctttcacagccgcctcgaaatctgcgttcttcacgccgatgatgatgttgagttcactggaaccctggtcgatcatcttgacgttgatgcgggcgtgtgccagagcggagaagatgcgtccggcagtgccgcgggtggacttcatgccgcgtcctacgacggcgatgagtgctaaatcggactcaagctcgatggaatccggctgtaccgcgcggtggatgttggagataacgaactgctcatgctgttcgaattcggactggtgtacgaagatggtcatcgtgtcgattccggacggcatatgctcgaaggaaataccgcagtcctcgaagacacccagaacttttctcccaaacccaatttcggagttcatcatcgctttctcgatggtaacagagcagaaaccagtctttccggcgataccggtgatggtgtatttcggcttccggcaggtattctcgacgatgagtgtacccggatcctccggcttgttggtgttgcggatgttgatcgggatgccctcgcggcgtaccgggaagatggcatcctcatgaaggacgctggcacccatgtaagccagttcacgcagttctttgtaggtgatggtctcgatcggaaccggattttccacgatgcgcgggtcggttaccaggaaaccggatacatcggtccagttctcgtagaggtctgcgtgaatcgcgcgggctacgatggagccagtgatatccgaaccaccgcgggagaaggtgtgtatcgtgccgtccggattggacccgtagaagcctgggatgacggcgcgctcagtgtgcgcgaggcgttcggacagctcttcattggttttctcggacaggaatgtaccattctcgtcaaagaagattacctcggctgcatcgatgaactcatagcccaggtaatgggacatgatgataccgtttaaatactcaccgcgggaagctgcgtaatcgctgcctttttttgcgataaagttttcctcgatggtcttgaactcataatcgaggtttaaattcaactccagaccgtcgatgatctgctcatagcgctctttgatggcggagagaagcttgccgtagcttgcgccggtggaagctgcctcgtagcaggcatagagcatatcggttactttggtgtcatttttgttgcgtttgcccggagcagacggtacaacgtagcgtctggatttatcagcacggataatatctccgacttttttgaactgttttgcgctggcgagggaacttccgccaaactttactactttcttcatgatgttctttgttccttcctaaagtaaatattgggttaattcagtttctggatcttcggaaaatactggaacagtaccttggcaaccagtttgtcgcgcttgacgtatttgtgcgtccagcggcgggcgtcgttggaatagttccggttgtcgcccagcatgaaatagcagccatccggcacttcgtagtgctgcggttcctccggttccatcggttcatgcagatacggttcgtcgagcggtgtatcggaaccatttaagtataccttgccgtctacgatgtcgatcgtgtcgcccggcataccaatgatacgtttgacatagtacgttttgatgcctttcgcttcatcatccggataaatgaaaatggcgatgtcaccccgctgcggatctccgaatttgtagcttaaccgtgagccgatgacgcggtcgccagccatgatggtcgtttccatcgagctggtcgggacttcgctgttggcgatgatgaaatggttgacgcagaatgcgataatagcggcggcaaccagaacctgaatccagcttatgacctcgtccttgagattgaagccttccttgcggctcttgcccttcttggattttgcggcatttccggtacctgaagcgttgttgttctcttcgggcgtatcttccaaatcgtgttccgaagagttctggcctggctggttgatgccgatttttccggcgcggagttcatcgagcatctcatccagttcctgatcggaacgcccggagaaattgcttcgggacgaaatatggtctctatcttgatcttccatatatatctcctctctctgctgttgctgtctgtgtgacgttatcttatggcactttcagttccaaaggtgtctgctacggcagtaacgtttgtgcaacgcatgagcagtaataggctactgtaaatggtaaccttctgacataatagtgtatatgagatgccttgatttatcaagttttttcacgaaatttcgggaaaattcataaatgttttgaagtgtatgattgtattattgggcgcgggatgctaaaatgaagctaaaaccaaaaaccacaaaggaacgcaagggggcgtatgtatggataaaacattatacgatctgatggactgggctggaattgaagaaattgtctattcggaagcggcaaacccgcaccggatgctgggagcccatatgacgccggagggaatgctggtacaggcgtttattccgacggcgcgcgatattacggtcaaactttcggcaaccggcaagcaataccagatggagatggcggacgagactggcttttttgcggcgctgattccgcgcaagactctggcggattataccctccttgtgttttatgataatggtacgttaagcgagatacacgatccgtattcctttgcaccgcagtttacggaatcggatttgaagaaattcgaggcgggcgtccactacagcatttataataagatgggcgcgcatccgatgacggtcaaaggtgtgagcggcgtctattttgcagtctgggcgccggaagcgatgcgcgtgagtgtcgtcggtgatttcaacctgtgggatggcagacgcagccagatgcggcggttgggagattcgggcgtgtttgagatttttatcccggagctaaaaaagggcgctgtttataaatatgaaattaagttcaagaacggcgacccggcgctgaaggcggatccgtatgcgaactatgcggaacttagaccgaacacggcatccatcgtctgggatctggacgaatataaatggaacgatcaggactggatgaagaaacgggcggcgctcgacacgaagacggcgccgatgtcgatctatgaggtacatctcggttcctggatgcgaaaaccgaccgaggtggataagagaggacgcgagattgtcggatcggagttttacaattaccgtgagatcgcggtcaagctggcggaatatgtgaaggaaatggggtatacccatgtggaacttctgccggtcatggaacatccgctggatgcttcgtggggttatcaggtgacgggatattacgcaccgaccagccgcttcggcacaccggatgatttcatgtattttatggattacctgcacggacaggggattggcgttatccttgactgggttccggcacatttcccgcgtgatgcatggggcatggcgcagtttgacggaagctgcctctatgagcacaaggatccgagacagggggcgcatccgcactggggtacgctgatctacaactacggcagaccgggggtttcaaacttcctgattgcgaatgcgatgttctgggcggaccgctatcacgcggacggcatccggtttgatgcggtggcgtcgatgctgtatctggattatggcaagaatccgggtgaatggattgccaatatgtacggcggtcatgagaatctggaggcggtcgagttcttaaagcatctgaactctgtcttcaggggacgcaaggacggcgcgattctgattgccgaggaatcgacggcatggccgaaggttaccggtgacgtgaagaacggcggtcttggctttgattataaatggaacatgggctggatgaacgattttctgggctatatggagcaggatccatatttccggtgccaccactacaatgagctgaccttcagcatgatttacgcctacagtgaaaatttcgtcctcgtcttctcacacgacgaggtggttcacggaaaaggttccctggtcaataagatgccgggacagacgtttgaggacaagtttgcgaacctgcgggcggcatacggttttatgatgggacatccgggcaagaaactcctcttcatgggacaggatttcgcccagatggatgagtggaatgagaatgcatcgatcgagtgggagctgctgcagtatccgatccacagccagatgaaggagtatgtgaaggagttaaatcacttttataccagccatccggcactctatcagaaagattatcagacggaaggcttcgagtggatcaactgcatggatgcagcggacaatatcattgcatttctccggcgcggcgcggatgagacactgctctttgtctgcaactttgccccgcagctgcatgagaagctgacggtcggcgtaccgtttaagggaaaatacaaagagattttcaacagcgatgcggagaagttcggcggaagcggaaaggtcaatccgcgtatgaagtcctcgaaggcagaggaatgtgatggaaaggaaaattccatcacgatccagctggcgccgcttggcatcagtgtcttcagctgcacgccgacggagccggagaagaaagaaaaaccggcgaagacgaaaaagacgacccacagcactaagagtgtaaaagaaaaggctgaaaccgatctccagagcatgatggcggatgcagcggcggcattcaatggaaaagccggggggacagctgctgcggcagcagaacgcctggcgggtatttcagataagctggcagaggcgaaggcggggctttcctccaagattatcagtctgtcctcgattgcgagacgacaggcgggattggaagaaggtctggataaaaaggtgggaaaagagtaagtacaggaaggaatgaaatagatggcaacagcggcagagctgacaggcgaggagatcgcggcggtagcagagtcactatcggatccggcaaatttgaacgtggatacgatggctgcgatcatgcaccggattggcccggggcttatggcattgggacagaaggtactggtggcgctcatcattttcctgattggacgtaaggtcatttcgatgatcgagaagatgctgtcccgctcgatggagcatgccggtatggatgtgggtgtgactcgtttcctgcgggcgctgacccagtttgtgatgaatgtattcctgctttttatgattgcagggcagcttggcatggacagcgcctcgattgtggcggttcttggcgcggcaggtcttgcgctgagtttggcgctccagcagagtcttggaaactttgcgggcggactcttgattttaattatgaaaccgttccgggtgggggattatatcatttccccgtccggggagggaagggtttcgatggtcgggctggtttacacgactatcctgacaaccgataataaagcaattaccatcccgaatggcaccctttcaaactcaaccgtgaccaacgtgacggcgatggacaagcggatgctggagctcaaggtcggtattgcctatgaggcggatatccggacggcaaaggcggtgttagagcgcgtttaccgggagcatccgatggtgaagaaggacgaggacatcaaggtatttgtggacagcttgggcgacagcagcgtggtgcttggtatccggggctgggtagagacggccgattactggcagacgagatgggacattctggaacagatcaagctgtcatttgacgaggcgggcatcgaaattccatacaacaagatggatatacatttgaaacagtagcaatcgtttaaacagtataagcaatatagacagaggaacaaccatgattgacagagcggcaaaattcgcagaacaggcgcataagagcgcacatcggaagggaaccagaattccgtatatcgttcatccgctggagacggcgctgattgcgtcgatgctgacgaacgatgaggagatactggtagcggcacttctgcatgatacgatcgaggacacggatgtgacctacgaggatttgaaacaggagtttggcacccgggttgcggatctggtcgcggcggagagcgaggataagtccaaaacctggattgagcgcaaggggcacacgctggaacatctgaaaacagcgagtccggcggagaagatcctgacgatggcggataagctgagcaatatccgcagcatggcgcgtgactatctgttggtcggggaggagctctggcagcggtttaatatgaaggacagagagaaacaggcgtggtattacacgtcgatgatagaccttttgaaggatttgaatgagacaccggaatatcaggaatatgtgcgtctctgcggcaaggtatttggcgggatcgcagggtgttgtagtttacaaaaaatatgaacggcagcataaaaacaacataggatgacaatgagaaactgcagcagccaatcagaaagaatggctgtcggagaagagaaggacgataggttctgagattttgcggaaacggaaaggtcattcagttcagtaaaaggggaagagacatgattttaaaagatatttggatggatgtaaaagcggttcaggagcgagatccggctgcgagaaatgcattggaggtactacttttatatcagggcgtacatgccctgatctggcaccgggtggcgcactggttttatgagcaccatatgtttttcattgcgcgcctgatttcacaggtggcacgtttctttacattgattgagattcatccgggtgcacagctcggacacggtattctgattgaccacggctgcggcgttgtcatcggtgagacggcggtggtcggtgacaactgtacgatttaccagggtgtgacgctgggcggtgtcggaacacagaagggtaaacgtcatccgacgctgggaaataatgtgacggtcggttccggcgcaaagattctcggttctttcgaggtcggtgataactgttccgtagcggcaaatgcggttctgctccgcccgctcgaggaaaataccacggctgtcggcattccggcgcgtccggtcaagaaggacggcgtggcgctgccgaagaagcagaagatgatcatcggcgaggacgatcagcgtattttagagcagatcgacgcgctccggaaagagcttcaggaacttagagaagagtcggcaaatctgcggaaggaactggaggcagtgcgggcaggacaggagaaagcctgacacaaaattattcataacgcccctttcggctgcataaatttctttgagagaaatgcgtgcggtttggaaaggggcgttttttatgatagagctgatcaaaaaagagatacatatgaaccggcagagggggacggcggtgtcgcagctgacgctggatgatgattttattgtgccggatgcgctggatgatgcggtgcagatactgctgtcagacggggaggttcagatagaaaattcacggattcagggggaaaaggtgctgatccggggaaagcttgtgttccgggtgctgtaccgccgggagtcgggcgggctgcaggcgatgggcggggagatcccatttgaggaaacggtcaatgtgccggagctttcggagcgcgactatacgcagatcgtatggaatatcgaagatttgaatattaccatgattcattcgcgcaagctgagtgccaaagcggtgctgacgcttacggtgcgggcggaaagccgcgtcgatgcgcaggctgccgcggacgtcgagacggacgatgcggggctgcaagtcctgaagagaagcgttccggcagcgacgcttgcagtgcggcgcaaagatatctaccgggtccgggaggaagtaagcgtatcggcaaataagccgaatattgagacgattctctggcaggagatgcgtcttcgggatgtttcggtgcgcccgttggatggaaaactgcatctggacggtgaattgtcggtgttcctgatttacagcggcgagggcgagcacacgccggttcagtggttggaggagagtattccgttttccggtgaagtggaactctcggaggcggtggaggagatgatcccggcggtcggggtccggattcttcatgcagaggcggacaaaaagccggacagcgatggggagatgcgcgaagtggaagtggaggcggtgctggagctggacatccgactttataaagaagaatcagtggaacttttaagcgatctctattcgaccggctgcgaggtcgtgagcgagcagggggaggtgtgctttgaccggcttttgacgcgcaacagctgcaaaatgcgggtgggtggaagcgtttcttttcagaaaccggagcgaattctgcagatttgccacagcagtgggattgtccggctggatgagagccgcccgtcagaaaacggtctggcgatcgagggagtgctggaagtcagtctcctgtatctgacggatgatgacgcggcgccggtcggggcaatttctgaggttctgccattttccggcacggtcgaggcggaggggatccgggaagactgcgtctggcagttgaatctggggctggaacagctcggcgcggtgatgctgggcggcggtgaggcggaggtcaaggcgcagctcacggtggaactgcttgtattccagccgatgcaggaagaggtggttacatccgtgcagacacagccgttcgatttaaagcgctgggagcagcagccagggattgtgggttatattgtgcagccgggggattctctgtggaaaattgccaaaaaattccacacgacggtggatcaggtgcgggaaatgaatgaaatcgacggggaggaagccggagcaggggcgcggctgcttctgatcaaagaggtaacggcgggtaactgttcataggtaggaattttagagagaaaaaatcgtttctgttcacgggtgggcacttttaggaccgaaagtgccgtaaggaaacgtggtggcagcaggaatttgccgtattgaaattcgaagtcacggcaaattccgttactggacacgtatgcgtgtacagtaacaaaaaatccagccggaatggttgcatttgggggaaaactttatatactattattgtaacggttcaatatctttacagttacaagcaaaaatccatgcagatttgactttgacaaaggatttttgccttgtaagccaggaaaacgcatccggccggtgcttgatgatagatccggggaaggagtttcccgaaccgggcggtgcccgtgcattgcaaggcgcggcgccgtttacatagggcatccggatgcgttttcctgtgtactgagaaatttttgtcgggagtgcgaaccataaaggcaggatgaggcatgaattatacatatcttttgcgctgcgcggacggaaccttgtactgcgggtggacgaaccatctggcagcgcgggtggcggcgcacaatgccgggaaaggtgcaaaatacacgaaaacccgccgtccggtagtgctggcatactatgaagaatatgcgacgcgcagcgaggcgatgcgccgggaggcagcgatcaagaaactgaccaaaaaggaaaaagaggcgatggcagcgctgggacggacggagcttccggtggatgacgagacgtagatatatcgcgccggggcagattatgtacgaagaattggtacaaacaatagcggtaaaggcaagaaacagcagtagaaattggtaactgttcagtaggtctgcacatttactgtgctgaccgtacgaaaacatgggccagcaggcaaaaatcccattgccgtaggcaatttttaatggatttttgcgcgtgactgtgaaggtactgaacagttacagaaattgaaagatggagagaaaacaggagcggataggtacagtgagaaaaggtagaagaaacaaaggatgtatagtgatggcaacagtccttctggcagcgctgcttggcggctgttcgtttctatcgaaggaggcagacgcgacggaggtttccagcgaggcggaaacggaaagtccgggtgccacacaggagtcggagactgagacaactgagacagaggagacacaggagagccatgaggctgccgaagacgaagaaagcggggaagaggaaaccgaggaccatttcgtggaaaagaagatcgtggtggcaacggatatgcactattttgccgagaaactggcaggaaaccgctgtgattcctttgtcggaatggcgaggggcggagacgggcgcgtgctggagtacggctgggaggtcatggacgcctttctcgatgatatgaaggaggaagatccggaccttctgattctgagcggagatctgacgctggacggagagaaagcgagccatgaggaactggcagaacttctggaaggactcagcgaggcgggaattgaggtcgcggttataccgggaaaccacgatatcaataacccggatgcccgccgctatacggcggatggagcggaaaaggtggagtccatcacagcggacgagttccgggatatctatgcggattttggctatgtagcggcggacagccgggatccggcatcgctgagttatctttataagatagacagtgcaaactgggtgctgatgctggattcctgtcagtatgaaccgaaaaatgaggtcggcggcatgatccgccgggaaacgtatgagtggatggagccgattctggaagaggcggagcgggaaggcgcccgcgtgatatccgtcagccatcataacctgctggatgagagcggagtgagccggaccttttatgacaactgtacgatcgagcacaacgaggaactggtgcggatgctgtcggatcatggcgtgcgcctgcacttgagcggacatctgcatatccagcattataaggaagacgaggacacgggcatctatgaggttgtgacgggttccatggtgatggctccgtgccattacgggattgtccgcatctggaacgacgggacctaccagtatgatgcgaaacctgtcgatgtggacggctgggcgatacgccactcgtaccacaaccgagatctggcagattttacggcttattcggagtcgatcctgcgtcgggcggcaatccgcgatgcaattcgggatctgaatcgccatatcgaggatcgccatgcattttttacggacgagaagaaacaggaaatggcttcgtactacgcggatctgtgcgtgaattattatgaaggacggatgtatcagatcgaggaagccgcaaaggaaaatccagtgctggaagattggaacaagatcggctatgtcagcgaactgagcgattttctgcagaatatcctggaggacgaggcgaaggactacgggcatctgaagattccgagcgtacattaaataaaaatggaggtaccaggaggcatgggagagacaaaaaaacagcgttcgccgctgacaacgctctgctacattgaaaaagacgattcatatctgatgctgcaccgcattaagaagaaacaggatgtgaatgaaggaaaatggattggcgtcggcggacattttgaggagaatgaaagcccggagaactgcctgctgcgcgaagtgaaggaggagacagggctgactctgacttcctggcgcttccgcggaatcgtgacgtttatcgcgaaaggctggccgacggaatatatgtgcctgtacacggcggatggatttgagggaacgcttcgcgaatgtgacgagggcgagcttgcctgggtggcgaaaaaggatgtatcggctctgcggctctgggacggcgatcggatctttttgaagcttctgattgaaagggatacgtttttttcattgaaattgtcatatgatggggacgagctgatagaaactgagctggacggggtaaaaattacatacaaataagcacgcaactgcgggttggttggggaacgagggttctgcagtgcgtgctcatgaggaataatcaatatatgggaaccgattttggggaaaatcggggtggttggctatgccagaaagataagaagatgaattattttctcttgttccttatctttaacttgattatatatca

SEQ ID NO: 11001 - DNA, 3201 bp, Unknown
  gut microbiota DNA sequence
ccggcggcgggggcggcggtccccacggatttcctggtcctcccgggcgcggtcccggcggcggactccatggacggcgctcctgcgcggtcagattcggctcatccgcctcccacaccatatatccagcgtttccgcccttctgttcgccccgaagtggtccataccatacatcatttccaggaagatgcggctgtatgctggttcccgccagattctcttctctttctccaccaggagaatctattttcagggaattttccaccatcgccgttccttcttctgtggatacggtacccacgtccgccgcctttatataggtcgtcagtgtatccgtcctttccgttccagccggataaaccttctgccatttttccagtgcccgttttgtcagtttttccagaaagatccgatccggatattcatcatagatgggactcccctcatactccagctcatcacagaccgcttccacgcaaagctgcatctgcttacatgcagccggataaagactcttaaaatatgcaaaatcctgcatcggactgccattcccccttaattcaaggcttacatggtatcctatgcaggatttatgcgtatcatgttattctcacgtaccgtttttcacgttatcctctgcacagccgaatcaactgttcctcaaattatcaaaacagtttttccgggtacacgccctcacggatcagcgcccggatcgactccgtcacactctccttatcctcacggtaggtcacgccaaaccagcggtcatgcgtctccagaagcttcacccgtgcgcgtccgtcgtggatcatctgatcgatgatcgtcggaagcaggtactccgacttcacgtcgccctctttcagccccgcaagaaactctggaaatcctttttccagctcctccacaaagcccggtgtgagtccccacatattcatcgatacatgctggttctcctgaaccgaaaccggactcccctctttatccgtcgccgtcatgccgtccgctgtcttctggatattgtaggtttcggttacgcgttttaaaatctctccctcacccacctcacagacgccgcgtgtcacgccgccgttctcgctgagcgtatttgccagaataaagccacccatacagatatcatacaccggtgcgttcacgtccatctgttccaccatgtatgtatgaatctttcggaacacttcttttccataataatcatccgcattgatcaccagaaatggctcttcgaccagtccgcgaatgctcaaaatcgcctgtccggttccccacggttttttccggtctgccgggacactgaatccctccggtacatccgaaagctcctgaaatgcgtatgtcaccggcgcaatcttctcaatccggttcccgatcacttctttgaagtcctcctccaaatcatggcggatcacaaagataatccggtcaaatcccgcttccagcgcgtcatggatggagtaatccataatgatctccccattcggacccaccggctccagctgtttgatccctccgccaaaacggcttccgattccggctgccataatgacaagtgctgtttttttcatcttccctctcctcgtccgtatatttgctgccatctgaacattatgtgaacaacaacatttttactgcaatcgtatatccagtatagcacagaacccctgtggttgcaatcatccacaggggttcccatttacacaacaaggtatcatggttaccgttcacgggtaggcacttttggaaccgaaagtgccgtaagaaaacgtggtggcagcaggaatttgccgtatttaaatgcgaagccacggcaaattccgttactgggcacgtatgcgtgaacagtaactatcagggagcacttaatggaacagcgccgtcacattcgccacttcctccgctgccgacgcacgcgtcagagacggtaaatcatagaagcagtaaccgctcacctgtccggttgcccgtccagcctgcacctcgcgcttcatgatatcatgataccgctgccactccggcacctcgttgccgtccactgcatctgttccggtcttatagagcgccagaccgacatacagcttcacattgcccttctttttcagcgtcacccactcattcaggcagtttgcaaacgcatagcccgctgcctggccgttctgcttcgcctcaaatccccagtaaatctgcggcatcaggtaatccacatagccgctctgggtcatccacgcatccacatctgtaaactggcgggtatcttttcggaggttctgtaaatatccctccgggctgataccgaacaatgcctgcggacggatcgacttgaccgcactgtaaacgccccttaccagctcattgacattattccgtctccacgccgccacactcagcgatgtgccgcccgcctggtactccggataatcaaaccatgtttccgccttgctgtcatcgagattcggatagaaataatcatcaaaatggatgccatccacctcataattcgtcacgatctctttcacaccgtcaataatcagctggcgcacctgcggaatcgccggattgtaataatactcaccattctggcacaatacccaccggtcattcgaactgtccccgtccttcgcccacgcgatcgccggatttgacgcacacagatccgaataacggttcagataccccgtgatccggtacggattgatccacgcatgaagctgcaagccccgctgatgcgccgcctgcaccgcatatgccagcggatcataccccggattctttccctgttttccagaggcaaatttcgaccacgggaaatactgtgacggatacatcgcatctccatccgggcgaacctgtaggaaaaccgcatttaaccccttctgtacacagaggtccagtgtctgatccatcgctttcttatatccagcctcatccttcgcccatccattccagtccagatacgaaacccagacacctctcatctctccacttccaggactgccgcccgataccggacccgcatacgccttcgaaaccggcaggaacaacatccccaccgccaaaagaaatgctgccacccagccgatcgccctctgtacctgctttgccatgcaaaattcctcccctcatttcctcctattctaccaaatatttaagctaaattttatatctgatttttgattatcc

SEQ ID NO: 11002 - DNA, 33552 bp, Unknown
  gut microbiota DNA sequence
ttggtaaaaatcgaacctctgacttaccgcctttcttagcaaaaggccaaatctcgttagcaaatgttagcaaaccaaggttttttgcaaaaaagccacaaaagccgcagaaataagaaaagccgaaaaccctgataaatcaaaggttttcggcgtgtttgctggcgtccctggcgggattcgaacccacggcctttcgcttaggaggcgaacgctctatcctgctgagctacagagacttatattaaattgagactggcaacgatcacttttccccgtaaggcagctggtagagcacaaccttaggaggcgcttgttatatccatttaactatgggaacaaatgccgtattttcgggctttttcagccttttcggtcacggcgaccaactttatgaactcaatcactttcgtgatgaattatctctttcttatctcttctaatttttcagatttcgcttccttaagtgaccctcaaacgctaccctttttcttcaaaaaggttccgccatggttctaccttaggaggcgaatactctatcctactgagctacagagatttatatgtttcacgtgaaacatatatcgtattttcatactgcattttattataattcattttcatgtgttccgcaactattttctcttcctgcctgctccgtatgtaatttctgtgtaactgttcacgggtaggcacttttggaaccgacgattttttatagacctttacgcaaaatgagccgttcccatcatccatatttttcctttaaaccgacgtcccggaagcggttctccaagcaggtccatcttattgatacccacacggaaatacagatcgttgcattccaccttgagatcatagatttcctcgccggtaaaccggtttttcttacatataacctctttgatctcgcctaaaatcgaatactgatcgcactcgatcccgcttggcataaaagttgtatcgacgatcgaataaatatcctctctagtcgcccggcgcgatgccatcgaatagagatccagatcctcgattgttaaggactccatcgcatcctcgtcgccattttttgccgcttccaaaagttcatcccggtttttcgccgccactttggctttttcaatctgcagcgccgtctttttgatcggaagaagcaccttgccccgattggcaaatcctgccaggctgaccgaagtcacctgtaagcgctcgcgctctttccggtaacactccctgtattcgatcggattcaagagataaaagatcagcgaaagccctaccttatactcatccagaagccctgcataggtttccttctccgtatgacgctgaatggaacattctgcccgcgaggttacctcatcgttcaggatatagggataataatactctatctccatctcatcctgctcattcagctccccatacatcgccacgccgatccccggcgcaacttctgtcttgatctcatataattcggtctccctgtcaagctgaagacagctggaggttcccgcctctctcgccagacagcgaagcagggcacggatgtccttcttcttctgatacatactaaatccggcagctcgcaaaaaacgatgcatattgactccttctaactacaatccgcagctgctgccaatacatacagccgcctcatttctatcctttattttccttacttatacccaagcgcacgctccagtgcttccttctcttcacttcctaaaagcacctcggtcttgccctctacgacatccttcagatacaggtaacagccttcacggctgtgaacagaattcagcacaaatcccgtgttgttatcatccagcatggcaatgacaaaactcagattgccgcccatgcccttaaacgcattgtacttgacaataccggttttctggtatccagcctgcgccttggagacaaccgaatccaccaggcgttttgtatctccgtcctttgcccgcagatactcggtctcatccaccagttccatgatcgtgtcttcgagcgtctccgcatcttttccccgcataaacatatcatatctgcgatacaacttcctatactgcgaaaaacagatgacggatgcaataaatgatatgagtgtcaggatcgccagaacgatcacgataacccccggatcgatgccaatcccgctaaaaatactgctctccatctttcattcctcatttcccatcatccgtcccctgggacgaattttgtgtgattactgtcttaatgactccaaaagctcaatcagacgttccagttccgctgatgaatagtattcgatctcgattctacctttattcttatccttgcggttgatcgaaaccttcgttcccataactcctttcagcttctcttccagatccttgaaaaagacctccatatcgcgttccggctctgctttctttttcgcctttttcggcttcaaaagctctttcaccagacgctcgacctcgcggacgctcaaatgattttctactgttttaagcgccaactggtactgtttttcaccatcttccagcgaaagaagcgctctcgcatgacctccggtaagccggtcctgaatcagcatctcctgcactctctcatccagtttcaaaagacgcatgctgttcgtgatcgtcgcacggttcttcgctacgcgctctgccacatcctcctgacgcagcccaaactcctgaatcagcatctggtaggctttcgcctcctcaatcggatttaaatctgcacgctgtacattctcgatcagggcgatctccatcgtctgctgtctcgtatactcgcgcacgatcaccggaacttcccgaaatcctgccaatttggcagctctccaccggcgctctccggcaatcagctcataacgatcgccctttttctgaaccagaagcggctgcagcacgccgtaacggcggatggattctgccagctctccgagctgttcttcatcaaacatcttacgcggctggctgacatttggctcaatctccgaaatatttagaaatttctctttttccacctcaacgatctttacgaccggctccgcttttgccgtctgtgtcttcgattttgccgccgtctccccggctgtgcgggtttttccttctgccgtcgtctttccggatgcctttgcaactcccacgcggctgccttttcccactgttttcgcagctgtctttccggcagacgccgattttttctgttttttagatcccggaagcaccatatccagctcttccaggctctttttctctatctcctgttccgtctcacgaacggaagtcttttttccggcttcatccgatggctttgcgctgctttttcccgcttctgcattctcgtaatcatttccaaaaaaagctcccagtcctctgccaagccccgttctctttgacatttccttcctcctcacgaacctcccgacgcccccggcaggcatcctttctgaatttcacttcaccgttattttcctgcctacagctcttctccccggctgatcacctctgctgccagcagacggtagctctctgcaccggtcgaacggctgtcgtacaggttgatcggcattccgtggctcggcgcctccgccagtcgcacatttctcggtatgatcgtcttgtaaatccgctcatttaagttctgttttacattctctacgacctgcagggagagattcgttctcgcatcatacatggtaaataccacgccctccagctccagcgacggattcatctttttccggaccagaccgatcgtccggagtacctggctcagtccttccagcgcataatattcgcactggattggcaccagcaccgtatctgccgctaccagcgcattgatcgtcaaaagactcagcgacggcgggcagtcgatgataataaaatcatactgatcgcggattgtctccagataaccgtttaacaccgactctttattttccacatccagaagttcaatctcagctcctgccagattcgaatccgaaggaagaacatccagattttcctgaacatcgcgcatcagacagtcctccagtgtgcaatcgcccaaaagcagctcatagactgtatcttcaatctgttctttttccaatcccaaaccagtggttgcatttccctgcggatcaaaatcgatcgtcagaaccctctgtcccgcctctgccaggcatgccgacaggttgatcgccgttgtcgttttacctacgccgcccttctgatttgcaatcgcaatcgttcgtcccataccgtattccttccatttcctcggttttatctcacatgaaagacaggaaaaagccttcccgcaagcatccgcacagcgatttccagctttttcccgttcttgtcttgcctaatagtataacacacttaaaactcatttcctacttttttagaaaaatttcatttaaaatgtttcacgtgaaacatcggctccaccgtctcccccagagcacaccatttatctgccagacacacaatccatgcctcgcggcactgaggcggcaccggtatcagcggaaacatatgacgtgcgatgatatttttttccttccaatttaaatggtaatctctctgtgcatttccaagcgctgttttcgggtgacggaagccgtgcaggcggtgcgcggaatccttctgatgccagtcatacaaaaaataatcatgcagcagtgcccctctcacaagtgattttggttccaagcgaatctgccaccgttccatcatccaaaggcttgtgtaggcaacattgaggctgtggcggtaaatggatgtcgtaccatgctgcatcgccagcttctcctcgtctaagcgcccttcctgcttcagttcgcgtatcgtttccgccagcagccgctgcctgcccgccgacaactgaaaagatttctctgtcttccgttccatacgatgctgaaagcataacttattttccttctttatcatatcgcgcatttctttccccatcgattgattttttgatacgtgaacattataatgaatttaatatcgattttcaataaaattttgtttacataaaatggcatattcataactgttcacaggtagaaattttctgaactgaaaattccgaacgctaccgttctggttgcagatttttccgatttgaaatgcgaagcatcggcaaaattccgttacttgggcacacatctgtgaacagatattctgtgaaaaccacgctggaaatagctgaactgtaatacaggaaaatatgatataatgagcgcaagtgaaccagaaagctgcttgcagatttatggcgaacggcaaatggcgatcacgatagctgcgtcagcagcggtaagcatcgaagatgcgaatcgtgatataatgagcgcagaagaaaagaatgcggctgcgaagcagacatattcttttcttgcgccattaaggaacgaacagccatgcgaagcagggcggtagagcgcgatagcgcgggttcgtgagtggacgggtgagaatacgttcatatgatatatatgaacacttagcgatgcattttcgatcctagtgcgagtcatacctaaatacttaatgaagccaagccaaaggcgatagctgaatttagtatttatggtataatagaattacttgatgagatattttcgagtttaatttttcgattcaaaaggagctttctatatgaacacaaaaaacaagatcatgacctgcctgatgctgtccgccggcggcgcagtttcactggcacttttaaataaatatattcaattttctgccacctcccgcggtctgacccgggaagagaattctctctgctacaaatggcggctgggaaatatctactatacaaaatgcggttccggcaaaccgcttctgttgattcacgatctgcactttgcatcgagcggctatgagtgggaatccatccgcgaacagctcagccgctcctacaccgtctacacgctcgaccttctcggctgcggacgttccgagaagccgaacctgacctacacaaattacctgtttgtccagctgatctgtgattttatcaaatctgagatcggacatcggaccaacattctctccaccggtgattcagctgcactgtctatcatggcgtgcagcaactctccagaactgtttgatcagatcatgctcatcaacccgagcagccttaccgactgttgtcagcttccgggtaaaaatgccaagctttataagcttcttctggatctcccgctggctggaacgctcatttaccacattgcgtgcagccgctctatgatcgaagaggcattccgcaccaaatatttttacaatccgtataccgtaaaaccggttcagatcgaccgcagccacgaagccgcacatctcggtgaatgtccgaaagcgatcttctccagtattgaatgccgctataccaagtgcaatatttccaatgctctcaggaagatcgacaacagcatcttcatcatcggcggttccgaggaaccgatgatcgaggcgacgattcaggattacaagatttataattccgcaatcgagtcctctatcatcccaaagaccaaacatctgccgcagttagaacagccggatgccgtgatggatgcgatccatatgtttttttcttaaaaaaggataatgagtatgcataccgcggagcgtttttttcgtcataggacgaagcttattactgttcacgcatacgtgcccagtgacggaatttgccgcatttaaatacggcaaattcctgctgccaccgcgttttcttacggcactttcggtttcaaaagtgcctccccgtcaacagttactctctctttcccacatctccataaaaattgctttttcatactcttaccatgatgcagataccatttttccagtatctttcatattcacagcgtcatccttccgtgcgccttgtttgtttcttcttgataggaacggtcctaatgtttcatccaggtcccgccgtactatctatatacaaacaaaacccccggaatgctcctctttattctgcattattcccactcgatctcctcggctttcgcacaaaaaactatattctgtaacgaaaactcaaattttataaattttccctattatttccagctctgccatcgcctctacctgtttctccagatttcctctgccatatgcctgatacggcttctggaacacaatcttccaggacaaatgttcagtcatacatttttgtttaaaccccgcctatatgaaaaagaaagactgcataccctacgtgttccatatacagtctttctctatccaccttttgattgctttatttcaacggctcccgcgacggcgttcccgcttttctcggatacttctttcccgtcttctctgtcttacgaatccggaccaggttacgctcatcctcattggcaaggtggaaggaaatcacatcctccagctcgccgcccagcttgcggattgcaccttttcccgtcttcatctcttcctccagtttgcctgatttgtacggtacaaaccagcctcccaccttgacaaatggcaggcagtattccgacagcgtggacagatttgccaccgcgcgtgaaacgcagaaatcaaatgtttcacgtgaaacattatcatgtgccgcatcctccgcccgtccgtgaaccgcctgaattttttccagttccaatgcctgaattacctcgttcagaaagttgatccgcttatttaaagaatcgagaagcgtgacctttaaatttggaaatgcaatctttaacgggatacccggaaatccagctcccgttccaacatcgatcaacgtatactctttctctgccagatccggtaccgctttcacaagtgccagactatccgaaaaatgtttggtcacaacttccttctgttccgtgatcgctgtcagattcaccatcgtattccaatgaatcaacagttcatagtaatcgtagaactgcttgatctggtgttcatttaacgtgacgcccatctcctgcgcttctttctgaagctgctcggtaaagtctgccggaggcagaaccacaccgctttctactttattttcttctgccataaatatatccttcatgatatgttttattttttctcaggttcttatctatcttacactttgagttgctgcaatgcgtttacctgtttccatgcagtctctgactcgttactgttcacgcatacgtgcccagtaacggaatttgccgtggcttcgcatttaaatacggcaaattcctcctgccaccaggttttcttacggcactttcggttccaaaagtgcctgcccgtgtacagtaactctgaatccgctcgtttctatatttacagttctttcttctcttccccatgccccgcatggcggctctgctctaagtgtaccagcagcaccgaaatatccgccggtgacacgcccgcgattcgggatgcctgaccgatatttgccggtttatagagatttaatttctgtactgcctcacggcgcaggcttccgaccgtggaatagtcgaagttttcatccagcttccggctctccatcttcttgaactgtgcaacctgctgcagctggcggcggatatagccgtcatacttgatgttgatgttgatctgctcgatcacatcttccggaagttccggacggttcggatccagctctgccagtgcttcatagcttaactccggacggcgtaccagctctgccagcgttgccgcggtcttgagcggggtgcttccgtggcgctctaaaaattcctgcacttcttttccagcgccaatgttgatcttctccagacgctttgcctcttcctcgatcattttttctttccagaggacacgctcatacatcgcatcactgaccagtccaatctcatgcccgatcggggaaagacgcagatccgcgttgtcctgacgcaaaagcaggcggtattccgcacgcgacgtcatcatccggtacggttcatggttttctttggtaaccagatcgtcgatcaagacaccgatatatgcctgggaacggtcgaggatgatcggttcttttcccagcacttcgcgcgccgcattgacacccgccataaagccctgtaccgccgcttcctcataaccggagcttccgttaaactgaccgccgctgaacaatccccggatctccttaaattccagcgatgcctttaactggcgtgcattgatacaatcgtactcaattgcatatgcatttcgaacaatttttacattttcgagtcccggcacggtacggtacatcgcgtactgcacatcctccggcagggaactggacataccgcccagatacatttcattcgtataaattccctccggctcgacaaaaacctgatgacggttcttatctggaaattttaccaccttatcctcgatcgatggacagtaacgcggacctgttccctcgatcgcgcccgaaaagaggggcgatcgatccaggttgttgcgaatgatctcatgtgttttctcattggtataggtcagccagcaggacacctgctccttctgcaccgactccggatctgtggaaaaagaaaatggcacaaccctctcatcgccgaactgctcttccatcttagaaaaatcgatgctgcgcttatcaacacgcgccggtgtgcccgtcttgaaacggaacatctcgattcccagctttttcagggaatctgtcagatggtttgccgcctgcagaccattcggtccggtcggattgctcacatcaccatagatacatctcgctttcaggtacgttcccgttgccagcaccaccgccttgcagtaatacgtcgcgccggagtacgttttcagtcctttgatctgaccttcttccacgatcagctctgccacctctccctgacggatcgtcaggtgatcggtattttccatggtacggcgcatctggcgggtgtattcctgcttgtccgcctgcgcgcggagcgaatgcaccgccggtcccttagactggttgagcatcttggactgtataaaggttttatctatattttttcccatctcgccgccgagcgcatccagctcgcgcaccaagtggcccttcgagcttccgccgacattcgggttgcacggcatcagggcgatgctgtccacgctgacggtaaacacgatcgtctcgagtcccagtctcgcgcttgccagcgccgcctcacagccggcgtgtcccgccccgacgaccgctacatcataattttctgttaaacagggcatgtttcctctttcctctctatctctgtgttctattcaagtcgaacgtccgtgagacttggcgcgtgattctggtcagcgtaagctgacatattctttacagaatcactgcgcatcctcgcggagcgtttatctcagtcggagacaaggcttccactgagacaaatttgctattactcaccacctgaagaggtgggagtcttctcgactgagataaacgctgcggctcatgcgccgtatgtttcgcagccgattttactgcagctgcacatttcaattcgatcaaacgccttatattctttcttgttttcagatccaccctatcataccacaaggaaagaaaccttgcaaaaaaattgatctatttccccatacaaaaatggctgaaaatttcatttaccagatcctcttccagtgattccccaaggatcgttccaagatgttcataggcatccatcagatcaatcgagaaaaaatcctccggcatcgcattgtcgatgcttgtctcgaccagacgcaggcttttcagcgcctgctccatcgccgtcttgtgacggacgtttgtcagcatgacctgatcgttgaaattcaggtttccctgcaagaacatcgtctgaattttttcctccaatcgatcaattccctgctgttccttcgccgataccgggatcacttcctgcccgcacgcttcgcgaagcgcttcttctgtgagaaccggttccagatctgtcttatttaagaggacgatcaccttccgtccccggatcaaatcgaggatctgacggtcattttcatccagctcccttgatccatcgaccacatacaagatcaaatctgcctcatccgcaatctttctcgcccgttccacgccaatcttttcaacgatatcctccgtttcccggatgcccgccgtatcgatcaaatttaagctaagcccgcgcagacggatattttcctccagcgtatcgcgtgtcgtaccggcgatctctgtcacaatcgcgcgctcctctcccagcagtacattcatcagggacgattttcctgcattcggcttacctaagatcacggttttgatcccctccgtcatgatacgcccgttgtcaaacgtcccgatcgacgcctccagttccatctcaatcggctgcagcgtctcccgaaggcgctccgggtatccgtccagggaaatatgctccggatcatcaagtgcggactcaataaaggcgatctcatagattagtttttcgcggagttcccgcactttccgcgacattgaaccgctcaactggctgaccgaagactgcagcgcatactcatttttcgactggatcacatcgatcacggcttccgcctgcgaaagatcaattctgccatttaaaaacgcccgcttcgtaaattcgcctggttccgccagccgcgccccacattttaccgccagctccagaatccgcttcatcaccagcacgcctccgtgacagtcaatctctaccgtgtcctccgccgtataactgtgcggaccgcgcatcaaaagaagcagcacttcatcgatccgttcctctccatcccgaatatatccataatgaatcgtatacgttttctgctccgaaagcctcttccccgccaccgccggttcaaacatccgctccgccaccgcaactgcgtccgaaccgctaatccggataatcccaatccccgaactcgaaagcgccgtcgcgatcgcggcgattgtatctgtatataccatatatatataaatccttccttgctttttatcttcttattctataccatatggaagcattttcccatctttatttacaaatctagtctaatatttatttcttttttcatgttttcacgataaacctctcgcgctcgatcccccacaaaaaagaaggtctagatacctccagaccttcttcgtcatacttatttacttctcatatctcccatacccgtcacttctctcgcgtctgccctcacgcttcagcgaaataatcacatgccggaacggatcctcgccctcgctgcgggtggtgacatacttgtcattctgcagcgctgcatgaatgatccgtctctcatacgggttcatcggctccaaagatacggaacgtttcgttctctttaccttgtaagcaatgttctttgccagtgtctcaagcgtctctttccgtctctcgcggtaattctcggtatcgagcttcacgcggacgtaattctcgctcttcttgttgacaaccaggctgaccagatactggagagaatccagggtctgacctctcttaccgatcaaaatacccatgtcctcgccggagaggtcaatgttcatctcgcactcttcctcattgaaagccgctgcgatcttcacatctaagttcatcgcatcaaatacctggcttaaaaagtcgatcgcacgatcctcgagcgtctcttttttcttagcacggatgatcgccggtttcgcgccgatccccagaaatccggcgcttcctttttcgaccacttcgtactctaatttatcactggtggtttccagttcaatcagtgcctttgttactgcctcatcgactgtcttagcggtaaccgtaatcatatccatcctgcgccctccttctattttttcgcgtgcttatcgttgtacttctgcaccatcttggccttggaagccagactgcccggcttcggatcggaattgtaaaatgcttcagacgcctccatctgctttttattgcgggagatcttgtcctctttcgccttgctttccgcatcctcgcgtgcctgaagcgcctttaaattcacgcttgccttctcgctgacattggccggcggcagaccttttctcgctctcttcttgttcatcttctccacgttgcggcggatcagatcatcgacatcgatcttgttcatatgtgcatttacgatcagctgctgaacgagctggaatgcaccctgaacgacccagtagataccgatcgcggacggcagggagaaacagaagaatacggacatcagcggcatcgtgatcatcatgctgttcatcatgctcgcgcccggcgcgtcctgatccacctgctgtaaattggaaatcagcttggtggagagccactgggtcagacctgcgaggatcgggatgatccatgcgatcgtgatgtggttaaaaccggtaaacggcggagttgccagattgatgccgaagaaatagttcatctgctcaatcttgcccgcattttctgcgatcgtcgaagagatctgcgggaataaactttccagcgtatcccatccagccggtgtcaacttatataacatatctacgactttgtttgccacggtgtagtctaccttgtccaccgccatgccgacaccgcttgccagctcggaaatcttgttgacgtaatccggctgctccatcagcgggttcgctacgttgtcaaaaaagacacgtactgacggtacgtatgccggaatgttgtagataacccggtacaaagcgaagataatcggaagctgaatcgccatcggcagacatcctgccatcggattcgagccatatttctcataaactgcctgcatctcgacctgttgtttagccatcgatgcctgatcggtttttcccttatacctattctgaaccgccttgatttcagggttcataagcgacataagttttgacgattcctgctgtttgatcgtcagaggaaataacagtaactttgtgataatggtaaacaggatgatacacagaccgatattcatgatccccatgctgctggtaatccggaataaaaagtccatgatataaccaaacacgctggcgatcggtcccatgatcgaacctgcctttgtcgcaactaaaacgctaacgtccaatgaactacctcctcatcctttacggaactggatcataaccgccttctgcaaatggattacagcgaagaatccgcttacatgccaaaatcataccttttacagcgccgtactttttaagtgcctggatggcgtactccgagcacgtcggcgtgtacttgcagtgaggtcctgtcataggggaaatatagagctgatatccccgaatcatctttatcaagatcttcttaatcaatattctcacttcgattctccagaatgttatgcagtccgcataagtgcaggtatgcactctcaatttttttgaagtctgcttctttcgctgccggtctggcaacgactacgatgtctaatccgagtctgactctgtccttatttaaccgatagctctcccgtaccaaccttgtcacgtgatggcggaccacgctgtttccaacctttttgctgacggagataccgatccgaggctccttcccgtcatccacccgcttcacgtacataaccagaagcttattggcataggatttccctgtcttgtaaaccttttgaaattcgctgttcttcttaattgaattaaaacgcttcattaaaatcaccaattcccctgcaccgagtgtgcatcgcagagcttttcttaatattcttagaactttttctatgaatattaagaaaggccacaatctataactcgattgcggcctcgttcattaagcagataattttgctctaccttttgctcttctggcagccagaacttttcttccacctgcgctgctcattctcgcacggaatccatgaacttttgctctctgtcttttcttcggctgaaatgtcatcttcatgtctgcatacacctcctcatccataatatagtaagagaaatccacgcttcctccggctcacgccgaaatccgcattcttctcaacatagttagactattgtaattaaacatcttctccattatatagaagaattccgcattcgtcaaccactattttgatctttttaatccccatagaacaaggaatttctgtggtttttccaccatttcgatcctgcgtccccacagatcgatcgtcgattgctgtcgaggcaccttattgtatacagtatacacaccgggacgtttccattttgtggataaaaaaatccttattttatcagcattcccgccacctattcacagcttatcctccacttatccacattttggggataacttgtggaaaagccgtggaatacgatctggataagcttctgattgttcacacccattcaccaaaaagccttatttttcggcgttttttccacgtggataactgaatttcacttattcacattgcgggtttttattgaaaaatgtggacaaatcatgtagaatagaacttagattgggttattttgcagttttggctgctttttacgtttaggagacacagtatgatagagaaaattaaggaaaaatgggatgaaattctcctccatattaaagaagaacacgaactgacggacgtttctttcaaaacatggctgcttccgacgcagccttattccatgaaagacggcacccttcagatcctggttccggatgtgcagtttctcggctatatcaaaaaaaaatacggacttttgatccagattaccatcgaagaactaaccggaatcgagtgtgaggtcgattttgtcaccatcgaacaggtcgatgagccgcaaaaagagacggacaaaagccatctgatcaaccgcccgtccgaggtcagccgccagctcatccaggatgcgaacttaaatccgcgctacacattcgacaccttcgtcgtcggcgcgaacaataacttagcgcacgccgcttccctcgccgtggcagaatctccgggtgagatctacaaccctctcttcatttacgggggtgtaggtctgggaaaaacgcatcttatgcactcgatcggacattttatcttaaaaaacaatccaaaagcgaaggttctctacgttacaagtgagaagtttacgaacgaactgatcgatgcgatccggaacaaaaacaatatttccaccacggagttccgtgaaaaatacagaaacaacgacgtcctcctcatcgatgatatccagtttattatcggtaaggaatcgacacaggaagaatttttccataccttcaacgcactctatgaagcgaaaaaacagatcattatctcctcagataaaccgccgaaagagatcgagacgctggaagaacggcttcgttcccgtttcgaatggggcttgaccgtcgatatccagtcgccggattatgaaacccgtatggcgatcctccgcaaaaaagaggaactcgagggctacaatatagataatgaagtgatcaagtacatcgccaccaacgtcaagtccaacatccgtgaactcgagggcgcccttaccaagatcgtcgccctttccaagttaaataacaaggagatcacgacggagctggcggaggaagcgctcaaggatctcatttccccgaacgcggagaaagaagtgaccccggagctgatcatccaggtcgttgccgatcatttcggtatcactccgcttgacatttcctcccagaagcgcaacaaggagatcgtattcccgcgccagatcgtgatgtatatctgccgttcgatgctcggaacttccctgcagaatatcggcaaatatttaggcggtcgggatcacacgacgatcatccacggtcacgacaagatcgctgccgatatggagaaaaacgaatcgcttcgcaatacagtggaaatcttaatgaaaaagatcagcccacagtaggtttcttccacaatttcgcgtggaaaagtggttgaaaacctgtggataacttttcccacattttgctccatttcagggctgtggataattcaaaagttatccagccggttccggacagttttacacagcctttttaaccattcaaaaggagtctgaacccctgtattttcggggctgtccggagaattccacatattcacagcccctactacgattgcgacggaatatatatatatcttttctttccgttccacgttatttttagcaaaggagttatcaacaaacatgaagctttcatttgaaaaagatcatttaatgaacggcatcaacattgttctgaaggccgttccttccaaaaccaccatgccgattctcgaatgcatcctgatcgatgctgtttcggatgagatcaaactgaccggcaacgatatggagctgggaattgagacgaaggtcgaaggaacgatcctggaacgtggaaaaatcgctcttgatgccaagcttttttccgatattatccgcaagctctccggcgaaaattctacgatcacgatcgaatcggatgaaaaatacaacacgacgatcacctgtgacaaggctattttccagattcagggcaaggacggcgatgaattttcctatattccccacattgagcgggataaattcatcacactttcccagtttaccttaaaagagatcatccgccagacgatcttctcgatctcgccgaacgacagcaacaagatgatgaccggtgagctgatggaggtcaccggcaatgaacttaagctcgtttccctcgacggacaccgcatgtcgatccgcaaagttgcattaaaagaacagtacagtgatataaaagtcatcgttcctggcaagactttaggtgagatcagcaagatcttaaacggtgacaacgactctgaggtacagattttcttcagcaccaaccacatcatgtttgaatttgacgacacgatcgtgttatcccgcctgattgagggcgagtatttccggatcaatcagatgctttcctccgattatgagacgaaagttaccttgaaccgccgtgatttcatggatgcgatcgaccgtgcgagcattctcgtccgtgaaaatgataagaaacctttgatcttaaactttaccgatgaagaaatggagttaaagatgcattccgccttcggtacgatggatgcccgtctggcgattaccaagtttggaaaagacctgatgatcggcttcaacccgaagtttttgggtgatgcgctgcgaatcatcgatgatgaggaagtgactctgtacatgatgaatccgaaatccccgtgctttatccgggacgaggaggagacttacatctatctgatcctgccggtcaatttcaatgcggcagcgatctaacctgccatttttagacatggcaggtgcaggcagacagtgacagaaaggatctgaaataagatggagataaaactgagagatgaatttataaaactgggtcaggcgcttaaggcagctggtctggtagagtctggcgtggatgctaaatttgcgattcaggacgggcttgtgaaggtcaatggcgcggtggagatgcagcgcggcaagaagctttacgacggggacaaagtcgagtatgacggagagaccgtaacaatcaccaaataaaggatggtttcatgtttatcgaatcgatcgaactcaaaaattaccgcaattacggggaattacatatggattttgatccggggacgaatgttctctacggggacaacgcgcagggtaaaaccaatattcttgaagcggtctacgtgtgtgcgacgaccaagtcccaccgcggcagcaaggacagggagatcatcgaattcggagaggacgagtcccacatcaagatgcagcttcgcaaggacgatgtgccgtaccggattgacatgcatctaaagaaaaataagacgaagggcgtggcggtcaacgggatcccgatccggcgggcgagcgagcttttcggcattgttaacgtggtgtttttttcgccggaagatctgaatctcattaagaacgggccggcggatcggcgccgttttattgatctggaattatgccagttaaaccggctctacgtccattcgctggtgcagtacaaccgggtggtgatacagagaaataagctcttaaaggagctgtttttccatcccgagtacgaggagatgctggatatatgggatatgcagcttgcttcctacgggcgggaggtgagccagtaccggcgggaatttatcggtgaattaaacgaattgatccgtccgatccatcagaaattgtcgggtggaaaggaagaactcgtcatccagtatgagccgaacacggaggcagatcagttggaagcggcagtcaaaaagagccgcgaggcggaccggaagcagaagacaacgctggtcggaccacaccgggatgacttaagtttctatgtcaacggaattgacatccggcgcttcggttcacagggacagcagagaacggcggcattatcgctcaaactggcggagattgagctggttaaaaagatcaaaaaggagtatccgatcctgcttctcgacgatgttttgtcggagttagatggaaaacggcaggatcatctgctcgccagcatccgccacatacagacgatcattacctgtacgggcttggatgattttatcagccacagcttccagatagataagacctttcgggtcgtgagcgggacggtcacctgtgaacgtccaaacaagacaactagtcagacataaaacagcaagtgaaggaggaactatgggttcagaatacagtgcagatcaaatacagatattggagggattggaggcggtcagaaagcgtcctggtatgtatataggcagcacatctgtaagaggcctccatcacctggtgtatgagatagttgacaactccgtggatgaggcgttagccggattctgcagtcacatcgaggtgcagatcaatgcggacaattccatcacggtacaggatgacggtcgtggtatcccggttgatactcagaaaaaagccggacttccggcggttgaggtcgtatttacgatcctgcatgcgggcggcaagttcggcggcggcggatacaaggtatccggcggtctgcacggcgtaggcgcatcggttgtaaatgctctttccgagtggctggaggttgagatctgccgcgatggaaaggtatataaacagcgctatgagcgcggcaaaacgatgtatccgctgaaagtagtcggtgagtgtgctccggataagcacggcacacgggtcgtattcctgccggataaggagattttcgaggaaacggtctacgactatgatacgttaaaagtacgcctgcgtgagacggcattcctgacgaaaaacttaaagatcaccctgcgggatgacagagaagtgaagcatgagaagacctttcactatgagggcggtatcaaggaatttgtcacctacttgaaccggagcaatgagaagctctatgaaccggttatctactgcgagggcatcaaggacaaggtatttgtcgaggtggcgatgcagcataacgattcctacacggaaaatatctacaccttcgtcaataatattaacacaccggagggcggtacccatctggccggctttaagagtgctctgacgaagacttttaatgactatgcgaagaaaaataagcttctgaaggaaaatgagccggcactcagcggtgaggatatccgcgagggccttacagcgatcatcagcgttaagatcgaggagccgcagtttgagggacagacgaagcagaaactcggcaacagcgaggcccgcgcggcggtcgatgcgatcgtgagcgagcagctgacatatttcctggagcagaatccaacggttgccaagatcatctgtgagaaatcaattcttgccaagagagcccgcgacgcagcccgcaaggcccgcgagatgacgagacgtaaatcagcgcttgacggcatggcgcttccaggaaaattagccgattgttccgacaagaatccggaaaactgcgagatctacatcgtagagggagattccgcgggtggttctgcgaaagaggctagaaataaatccaatcaggctattctgcctcttcgaggcaagatcttaaacgtagaaaaagcaagactggatcgaatttacggcaatgcggagatccgtgcgatgatcacggcatttggtaccggtattcatgaagattttgatatttcaaaacttcgttacaacaagatcattatcatgaccgatgccgatgtggatggtgcacatatcagtaccctgcttctgacgttcctgtatcgttttatgccggatttgatccgggaaggacatgtatatctggcacagccgccgctttataagatcgagaagaataagcgtgtctggtatgcatacagcgatgatgagctgaattcgattctgactgagattggccgtgacaacaacaataagatccagcgttataaaggtctgggtgagatggacgcggaacagctttgggagacgactatggatccggagcgccgaattcttctccgtgtccagatcgacagtgagactgcttcggaggttgatctgacatttgctaccctgatgggggatcaggttgagccgcgccgtgagtttatcgaggcaaatgcgaagtacgtaaagaacctggatatttaattaaatttaagtcacttaaatccttttgaggacgaaaggagtatagatggaaccaaatatatttgacaaaattcatgacattgatctgaaaaagacaatggaaacgtcttacatcgattatgcgatgagcgttattgctgcccgtgcacttccggatgttcgggatggcttaaagccggtacagagacgtgttctgtattccatggtcgagctgaataacgggccggataagccccaccgtaagtcagcccgtatcgtcggtgatacaatgggtaaataccacccgcatggtgacagttcaatctatggtgcgttggtaaatatggctcagaaatgggcgacccgttacccgcttgtagatggacatggaaacttcggttccatggacggtgatggtgccgcagcgatgcgatataccgaggcgagactgagccgtatttccatggagatgctggcagatatcggcaagaataccgttgattttatgccaaactttgatgagactgagaaagaaccgacggttcttccggctcgttttcccaatattctggtaaatggcggcaccggtatcgccgttggtatggcaacgaatattccgcctcacaacctgcgtgaggtgattgctgccgttgtcaagatcatagacaaccgggtggaggaagaccgcccgactaccatcgaagaactgatggagatcgtaaagggacctgatttcccgacaggagcaaccatccttggaaaagcaggcatcgaagaagcgtacagaaccggacgcggcaagatccgtgtacgggctgtatacaatatcgaggccatggcaaatggcaagagccgtatcatcgtgacagagcttccttatgcagtgaataaggctcgtttgatcgaaaagatcgcagagcttgtaaaggataaaaagcttgatggaatcacggatctgcgtgatgaatccaaccgtgagggacttcggatctgcattgaactgcgccgtgatgtgaatgccaatgtcatcatgaaccgtctgctgaagcatacacagctgcaggacacctttggtgtgattatgctggcgctggttaataatgagccgcgtatcttaaatctgcagcagatcctggaatattacttaaagcaccaggaggatgtggtaaccagaagaaccaaatatgatctgaacaaggcagaagagagagcccatattttggaaggtcttttaaaggcactggatcatatcgatgaggttattaagatcatccgcggttctgccaatgttcaggcggcgaaagctcagttaatggagcgttttgatctttcggatgcacaggcacaggccatcgtagatatgcgtctgcgtgctctgaccggtctggaacgtgagaaactggaaaatgaatacaaagagctggaggcaaagattgcagagttgaaagcgattctggcagatgagaagaaacttctgtgtgttatcaaggaggagatctccctcatcgctgataaatacggagatgaccgccgtaccgccatcggatatgatgaatacgatatgtctgcggaggatttgatcccggatgacgatatcgttgtgaccatgaccaattttggctatattaagagaatgtccagcgataatttcaagagccagaaccgcggaggcaagggaatcaagggcatgcagactattgaggaagattatatcgaagatctgctgatgaccacaacccatcattatgtgatgttctttaccaacaagggacgcgtataccgtctgaagggatacgagattccggaggcaggacgcactgccagaggtactgccatcgtgaatctgcttccgctgatgccaggcgagaagatcacatccatcgttcctatgaaggagatcgatgatgagaaatatctcttcatggcaacccgcaatggtatggttaagaagactccgatgaaggaatacagcaatgtccgcaagaacggtcttcaggcgattgtacttcgtgatgacgatgaattgatcgaagttaaggctaccgataataccgaagatattttcctgatcacaaagaaaggtatgtgtatccgattccatgagaccgatgtccgcgtgacaggccgtgtttccatgggggttatcggcatgaagtttgatgaaggcgatgaagtcatcggtatgcagatggccagccagggagaatgcctgctggtagtatcggaaaatggttatggaaaacgcactccgattgatgaatttacagcccagaaccgtggcggcaagggcgtgcgctgctataagatcatcgacaaaaccggtgatttggtgggtgcaaagctggtagataatgagcgcaagatcatgctgattaccaatgaaggcattatcatcaagatggcagtcagcgacatctcgattatcggacgcaatacctccggtgtgaagctgatgagtattgatgctgaatccggcatagcagttgcaagcatcgccaaggtgcgggagagcgacaaggatgaggatgaagaagatgaacttctggaggagcaggacggagaagaaaccgaatctgagaatacagaagatgtcatggctgaactgtaacgaataaaaagtaaaaaagatcagatatccttgatctttgaaaagaaaatcataaaaaagagaacatccggcaattcataaactggaattagcgggtgttctctttttgatctttataaggcgcagtattttaacagcgtcacagcgtcgtttctctctgaatgagtcggcacctgaattcctggtaggtaaattcagattcacggttttcgatcatagcaagaagaagtttggcagcatactcgcccatttgatcgtagggaatatcaatgccgctgatagaaggatagtccatttcatagaaatttacctcgttcaggaagatatggcgaattctctgagggatggaaaagcctgtttttaatatttcacgctgcagcagcagtccaatgtcgtagttttgagaaatggcaagatcaaaactgcggttttccatgtatttagctaaaaattgctgcaaatgaatcagatcacgatccttgatagggcagatcacgtgctccagatggcagttcggtgccgtccggcgaagcagggattcaaaaagcggatatttattattaactaaaagaccgtcattgctgatggaaaaataccgcacttcgcggattcccttttccagacagaaggaggcacattcctgcagggcatattcaaatgcatgggggaacggtgttttttttgagaaaaccccgtccatacagataaccacatagggaatatgattttcatcggccggttttgtaaaagcagcgtgatcatcgttggaaataaaaatgagtccatcgatcacgttggaataatagcttttgacataatccggagaagaatctatatcatccatttcattgaaaatcgtgatggtatagtcgatctgggacaggtactggctgattccagtaaaagcatttaagaaagcctggcggctgtaatcctttgcacatacaattccgatggacgtgcagtttttggtccgcatgcttttggcggaagcattgggatagtagtgaagtgcttcaacggcatctaaaaccttgcgtctggtttcctcactgatcttctgattctggcgattattgatcacataagatacagtcgcctgggagactccgcagagttttgcgatgtcttttgcagtaacattttttttcataattttgtagactccttataacacttttacagtttattaaatttctctaaaaatgtctatagaaattcactaaaatacacaataatttaatattactaaaaaaacaattgaaatgccgatccttttgtgatattctaacaatacaaaatttacttatacgtataagttaggaatggaggaaaaaatgggaaaagcaaacgaacaagcaaaagataagccttcgttattaaaccgctggctgaacggaattgagaaagtcggaaataaacttccgcatccgatttctatttttgcaattttagttctctttgttatcgttctttctgctgtctgtgagatggctggagtttcggcaacaggtgaactggttaaccgttctaagggagtcgtagagactcagacggttcaggctgtcagccttttgaatggtgaggggcttgtatacatgctgacacatgcaatcactaactttacaggattcgctcctttgggagttgtcctggtagctatgtttggtatcggacttctggaggacagtggtttaatcggaggcgcattaaagtctgctgtagaggttactccggctaagttaatcactccgatgatcgtattcttaggcgttatgtccaacctggccgatgcagttggatacatcgttctgattccgattgcagcactgatgttcatggcatacaatcgtcatccggtagttggtatggctgcagcatttgcaggtgtatccggtggtttctctgcaaacttattaatcggtactctggatccgcttctttgcggtattaccaacgaggctgtaaagatggtagacccgacttatgtagttgagccgaccggaaactggtacttcatgatggtgtctaccttcctgatcacaattttaggtactatcatcactgagaaagtcgttgcaccgcgttttggtgagtatcacggcaatggggaagagaatgaaacaagctctgaatataaattaaacgaccaggaaagaaaagctctgaaagtagctggtttaaccttactggttatgattctggttctggtagctttctgtctcccggctaactctgttatgagagctgaggatggaacactgttaggaaactctccgtttatggagggcatcatcccgattatcactgtacttttcttcgtaccgtctgttgtatatggtcatatgactggtgtataccacggagagaaggatgtctgcaacgctatgggacgtgccatgggaaccatgagctcctacatcgctctgacctttgtggcagcacagtttattaacttctttggttataccaaattaggaacgatccttgcattaaagggagctgagttctttagaaactctggtattggaactatcccgaccatgatcttattcgttctttttgcagcattcatcaacctgttcatgggttctgcatctgcaaaatgggctctgatcgctccggtattcgtaccgatgttcatgctgttaggttacacaccggagttcgctcaggttgcttaccgtatcggtgactcctgtacaaacgttatcactccgatgatgtcctatttcgcaatgattatcgtattcatgaagaaatacgataaagaggctggtatcggaactctggtttccaccatgcttccgtacagtatatgcttcctgattggatggagtatcctgttagtattatggatcgtacttaaccttccgttaggaccgggcgttggaatgtttcttggctaatggggttgaatcgttacgataatttaaataactagaattaagatgtactctgggaatgttttatgcggaatgcatagacattccaggagtacatattttttcaaaaaaatcgtatgaaggaggaaataatgaaccagacaaatgtaaaaattggacaattaagagatcgcatgaaagaactgggaatcgatgcatacctggttccgactgcggattttcatgaatctgagtatgtaggcgaattctttaaatgccgtcacttcctgaccggtttcaacggaaccgctggaacggctgttatcactatggacaaagccggactctggacagacggaagatactttgtacaggcagaagagcagctttcaggcagtgagatcaaattataccgcatgggtgaacctgaattcccgactctggacgagtttttagaggaggagcttccggttgatggatgccttggatttgatggccgtgttgtaaactctgagctggggtatggtcttcagaacttactgcaggaaaaaaatgtaacaatcaactgcagcaaggatctggtaggtgagatctggacttcccgtccggctatgtcctgcgagcctatctggagcctggatgtaaaatatgccggaaagagtaccgtagagaaactttcagatcttcgtgatgccatgaagaaaaataaagcacagattcatctgatgacggctctggatgaaattgcatggttattcaaccttcgtggaaacgatattgtaaataacccggtatttctgtcctatgcacttattacacaggatgaagcctatttatacgtacagaaagaagctatcaaagaagatactaagatgggaaaagaggtttgtgcggctttagctgaggcaaaggttcaggtaaaagagtatgcggaattcttacaggatgtggcagccctgaagaatgagaagattcttctggaacgcaagaaagcaagctttgctgtatgcgagagcattgatgcttcctgccgtatcatagacgagatgaatccttgtgcgaccatgaaggctgttaagaatgcgaccgagatcgaaaatatgcgtagggcccatttaaaagatggcattgctgttaccaagtttatgtactggctgaagcataccatcggaacctgcgatatgacagagatgacagcggctcataaaattgaagaactgcgagcagagcagggcaattatatcgagccaagtttcgtaaccattgcagcttacaaggaaaatgcagcaatgtgccattatcatccaagcgatgaggtatgcaagaaattaaaaccggaaggtcttctgctggtagattccggcggacagtatttagagggaactactgatatcacaagaacctatgcgttaggacctctgaccgagaaggaaaaagagtactacacaatcgtagcagccgctatgctgaaggtatcaaccatgaagttccttcacggctgccggggaatcaacttagactacaccatccgtgaagcattctggaaacgtggtcttgattttgcacatggtaccggacatggtgttggatatctttctaacgtacatgagagaccgaacggactgcgctggaaggttgttccggagcgtcaggacagcgctgtgatcgagccgggcatgatctgctccgatgagccgggtctgtactttgctggcgatttcggaaccagaacagagaacctgatcttatgtgtcgaggatgagaaaaatgagtacggacagttcctgaagttcgaattcctgaccaaggcgccgattgacttagaggcactggatacacgtttcatggatgacgcggatatcgagcgcttaaatacataccataaagacgtatacgaaaccatttctccgtacatgaatgacgaagaaaaagagtggttaaaacacgtgacaagagaaatttcaagataatatgatgttacagttcagccatgcgctggtttgaatgaatatggaaacaagaagatgtcatggctgaactgtaacaatataatacctcctgaatagatagagataaattcaagtcgaacgtccgtgagacttggcgcgtgattctggtcagcaaagctggcatattcctatcagaatcactgcgcatgagatcaaaatctattcagggggtatttttattacatctattcagaaatgattgcaagattatttaatttctattatgatgatataagagtcattaatgattaagagatgcggttctgtcagcaggggcagataaaaatttcatggaagaagggtagttttcaaatgagaagaatcaatgttgaaaccattacacagaatatcaaagaaatgtgcattgaggccaaccattttctgtcaccggatatgaaaaaggtgtttgatgaggcggcagcgagtgaagaatctccattgggacgtcagattttaggccagctggaagaaaacttatgtatcgctggtgaggagatgattccgatttgccaggataccggaatggcagttgtgtttatcaaggtgggacaagatgtacatttgatcggcggttctctgactgatgctatcaatgagggcgtgtgtcagggatatgtagacggatatctccgtaaatccgtggttaaggatccgatttaccgtgagaatacgaaggataatacaccggctatcattcattatgagatcgtagagggtgagcaggtagagatcacggtggctccgaagggatttggaagtgaaaacatgagccgtgtgttcatgctgaaaccggcagatggaatcgaaggagtcaaggatgctattctgacagcggtgcgggatgcgggaccgaatgcctgtcctccgatggtagtaggcgttggaatcggtggaacctttgaaaagtgtgcagagatggcgaagcacgcgctgaccagaaatctggaagaggaatcaccggttgagtatgtgcgtgatctggaaaaagaaatgcttgaaacgatcaataaccttggaatcggtcctggcggtttaggcggacggacaaccgccctggctgtcaatattgaaacctacccgacccatattgcagggctgccggtaggcatcaatatctgctgtcatgtaaaccgtcatgcgcacagagtgatttgatgaatatttttaggattgcgaaagtgcgaagcacgtagcaatccggtatcaaaaggggaaaaatctcttgtgacccaaacatcatttgatagtataaagaatgtactctcggagtctttcctgcacaaaaagataccgagagcacataagatagatttggaggaaaatatggatagaacaatcacagctccaattgacagggagacattaaaaagcctgcatgcaggtgattatgtatatataagcggaaccatctatacggcacgtgatgcagctcataagcgcatgatagagacactggatgaaggaagagaacttccccttgatctgaaagataatgtaatttattatatgggaccgtcaccggccagagagggccgtccgattggttctgcaggtccgaccacagccagccgtatggataaatatactccaagacttctggatctcggcatgggagccatgatcggaaaaggaaagagaagccaggcagtcatcgatgccatcgttcgcaatggtgccgtttattttgcggcagttggcggagctggagcaattctttcaaagtgcattaaggaatcggaagtgattgcatacgatgatctgggaacagaggcgatccgaaaattgacggtagaaaatatgcctatgatcgtggtaattgattccgaaggaaacaatctttacgagaccgcggtaaaggaatatcagagataggataataagatatcagatgtgggatgactcccatcccgcagcaagaatgcagatgcatttttgagttttatgaagagaggttatttgctgttttgcaaataacctctcttttgtcttgaagaataaagttataattgatagagataaaccatgattggcatggttatcatacaaagcagagtggtaattacgttaatggcaccagcatagcgggcatcttttccatatacctgggccatctgcgtgattgtggaggcggatggggtgattgtggctaacagggtgacaagcagaatttgtgaaccattctcagcaaaagaagcaaggtcgctgaatttaagaagtaaaattgtcaaaagcggtacaccgatgagccgcagaatcgtgacaagtccaatatggggaaaagtcagaatttcctggggcgtggttccggcaatcagcattcctgagatcagcatggccaaaggaccaatcatgcttcccagggagcggacagcgctgtccactggaccgggaagtgaaatctgtgccaagaatagaaaaataccgaataaaatggcaatcatatttgtatttgttatgatttttttaaaatcaggcttcttttcttcacagatcatcatttttccatgactccagagaagaaaaagctgtacagagacgtaggcgctggaataaataacccagtctggtcctagaatagaggaaacaagtggtataacaagatttcctgcattagagtagatgatagaggctttttcaactccgttaagatgaagaagaggtcctataaagtaaaaaaggacaatcaggatgagatggatcaatacagcagcagccaccgccaaaagaagcccatttaggatggaagggctgcagctgacctgaaaagcagataaaatcgaacaggggactacgatatagacagacaggcgtgaaagaatgcggctgtcatctgagcggcaaatgccagtctttaccaaaacaaagcctaaaaacatgatgataaataatgccgcaattttaccaactaaaattccaatggacataatgcgtttgctacctcctcataacagggcatagagacagaatatttttttgcaagtcggagtggctccatgacaagtccgtccagttccgatggttttccttccattatgtcacgctgcatggaagtggtggcatcggcagataagttggaaagaatctccagatttatttttacatagtctttttcaaagggatatcccatggcagcagccagagcgctgatttcacgaatcatggatttaaataattcacgggcaggtccttccttttgaaaatctccggccacggcatgaaggtagactccggaagctccgataggggagacataggaaaatttctccaaagcatccctttggatatgggtggataaaactccatcgataccgctttcgcaaagatccgattgaatggctgataaaatcggagaaatataggaaggatccctgggaccgaagacaacccttaagataggaccgtgctgaaccagaacaccgggatgttctaaggatgcagaaacatagatgcatccatccagaacggtacaatccggtaattttttctgcatcctggcaccggttccatatatatttaagatgggaataataattgtgcggggaccagcggtctgtcggataaaaggaaggacggaatcaagggaatattcttttacgcatataaagataacctccggagccagggagagagcacaggattcttccatggataatgcacgaacctcaagatgttcttccgtctgatcccagagatgacgaatgatgagaccgttattacgcatagcatcaaggttggaaccacgggcaatgaatgtaacatcctttccagcttttgtaagagcagagccaagaattccaccagtaccgccggctcccaggatcatatattttaaattcataaaaaaactcctttctgaatcctaatctggattgctgcgtgcgatgcgatgcactcctgcaatccgccaaaacatctatagtatcatatcataaaatatattgaaaaatggtggtttaaaggaaataaaaaaaaagaaaaaacttggataaatttgcttgacattttaaattttctttgatacaatgagatacgcgtctgacaaagaaatgcgttaagatgcaattgaatattttttttattactgcggagaaatactcaagaggccgaagaggcgcccctgctaagggtgtaggtcgggcaaccggcgcgagggttcaaatccctctttctccgtttctttttttaaaaaaagctagaaaaaataaaaacaaaaaagtgcttgacactgatgaattttcgtgataaactagctgagctgttgaagaaacggcgcttttgaaaaagaaaaacaaaaaataaattaaaaaagttgttgacaagcaagaatgcttatgatagaatatatgagctgtcgctgagacaacaaagaaccttgaaaactgaacagtatgtagaaccctgaaaattctaagaacaaaggcttttggttaagcct

SEQ ID NO: 11003 - DNA, 2994 bp, Unknown
  gut microbiota DNA sequence
gtagtaatacgtgaagctgactgttactaatcggtcgagggcttaaccaaaaggatatggttaagaattggataggtaagaggaagttatttcctgaaggatgaaagatagagagtagaagaaattcagtgtgcagttttgaaggtatataaacattcaagaaaatcaaatataaacgtggatgacggggtgtggctcagcttggctagagcgcctggtttgggaccaggaggtcgcaggttcgaatcctgtcaccccgattcttacaaatatgcgcgagtggctcagttggtggagcgcgaccttgccaaggtcgaggccgcgggttcgagtcccgtctcgcgctcttttttattattgcggaagctttgattcatcagggtttccgcttttttgcattttcatttttatgtagacagttgtagacacttgaagacaatatatacgcttacagactgtttaaaagcaatttgttggaataaatgtatcgcagagtaaaaggaggaaaccaaatgagcaaggtattaattctaaacggaagtccacgtgtaaacggcaacacatccattgccatccgggaaatagagaatgtatttcgaaatagtggggtagaggtaacaaccatacagattggaaataaagatatccggggctgtattgcctgtaaccagtgcagcaaaattggaaaatgtgtgtttgatgatatcgtaaatgaactggcacctctctttgaggcggcggatggtctggtgattgccagtccggtctactatgcatcggctaatgcgacgctgattgcctgtcttgaccgcttgttttacagcacgtcctttgataagagcatgaaggtgggtgccagtgtagtctgtgcacgcagaggtggctgctcagcgacttttgatgaattgaacaaattttttaccatcagcaatatgccgatcgcatccagcagatactggaacagtattcacggctgtgagaaaggggaggcagagatggatgaggaaggcaagcagacgatgcggatgcttgcaaagaatatgacatttcttatgaagtccatcgagcttggcaagaaagaatatggtcttccggaacaggaggagcggacggcgacgaattttattcggtaagtttaagggagtcagagcatttttgataaggtagtccatgcgccggctggatggagatacgatttcgaaaatgagatcgggagcgccggaacagccgcagtcggtcaatttattcggatcacagataagagagatatccggctcaacccaatctttatcatccgcatccagattgacagcgaaaggaggcggataaacgcggcattctccgccgttggactcgatataatttccaagaaggtgagaaatctggtaggaaatttcctgatgaatccggcttggaggtgccatattataaacttgcccgtcgatcagctctgcacgctgcccgtcgggcaagttccagtaatcttttgaaatataggtatacctatacctaaaagtatattacaggaagaaattattttcaatcatccgtgcgtattcgcaaccaatcccagataacctcagcgtcgtatccggtcatatggataatgatgacctgataatcgcgaaccgtctcatacggaagtttaccggaaccgtcatacatccatcacaggaaaagactgtagcggacgatggcatactctaacgcgatccccttcatctgtagaatcatatcttccagtccgctgcctggttccagtagagcggaaaagaacgcatttgccagaaaatgacgaagaggcatctgatagagcaccgatgcatttcgaaatttttcccagggtagtttaatatcgcagatcagtgagcgtagctgcgggagagtctttcggaaaatttctgtggacaggatatgcatgaggggagattcccgggagattttgagcggaaatatggttggatggcaaaagttcacgcgtcatttggacaaaatcctgcatgacaggagacagaaacttgctctgatgccacgccagatgaacggtattttgaaaagaaaaatccgaaaaatagatccgggaaatggcactgagtctcagctcagcttcgatcatagtgcttggaagaatcgtgacgccaagccccaggcggacggcttcgagaatggcctcttgcgaggtgctttcccaggcaggggtgacctcacagccggtctggcggatggcattttgaaatacttcataggaggtgctgccgacttcgcgaaagagcagcggttgtttcataaatgtattgatggaaacggtttttcctgccatcgggtgtcccggcgcgcagatggcggtgtagtgttcctgaaacaggggagtcagggcaatctgttcggagtggatggttccgccgacgattgcaagatctagcgccccatttaagagcatggcttccgtctgtgcggtcgtctgtatatggacctgcgtgtgcacctggggatatgtctcttgaaatagctgcatgaaacgtggcagataggaaatccccacgttggtgctggcaccgatgcggagaactccgctgattccggaattggaaaatgccagttccatttcatcgtacatctggataaaatggcgtgcatagtcgagaaaacgccgcccttcgccggtaattcgcagacgctggttgatccggtcgaaaaataatgttccgtagtgttcttcgagctcccggacggcggtgctgacggttggctgcgtcaggtagagattgcgtgccgcctgtgtaatgcttccggcggatgctacttcgataaaaattcggaaatgccgcagtgtcatgaaaactcctttcctgaatgtttcataaggagtgggaaacattcgtatttgtatgtttgtcctgcttttttcctgccgtcagaaatattatttttgacggcgttgcttttatagagaatcatagatattttaataagaactatatataaattatagta

SEQ ID NO: 11004 - DNA, 158917 bp, Unknown
  gut microbiota DNA sequence
ctaggatttatgcgggttccgaggttttcggagcccgcttttaatttacatagaattgctaaaagtttttactgaaggttttgtattatcattccgtatatgcttgctggaagaaattcaagaaacgaagaaaaatgaaggaaaatgcgtgatttttttaatttccacttgcatgtataccgtgcctgtgatatagtataaaggctgaaaattcacgccgatcggatttacgcaggacggtgctcattatgagtccccgcggaaagcatgagaagacggcggaagaaaaaccaaaattggaggaaagaaacatgagcgttatttcaatgaagcagttactcgaagcaggtgtacattttggacaccagaccagaagatggaacccgaaaatggctccgtacatctacaccgagagaaatggtatccacatcatcgaccttcagaaatctgtaggtaaagtagatgaggcttacaaggcagtatccgatatcgcagcagacggcggcacaatcctgttcgttggtacaaagaagcaggctcaggacgctatcaagaccgaggctgagagatgtggtatgttctatgtaaacgagagatggttaggcggtatgctgacaaacttcaagaccatccagagccgtatcgctagattaaaacagatcgaggctatgtctgaggacggaactttcgacgttctgccgaagaaagaagttatcgagctgaaaaaagagtgggagaagctggagaagaacctgggcggtatcaaagatatgaagaagatcccggatgctatcttcgtagtagatccgaagaaagaaagaatctgcgtacaggaggctcatactctgggtattccgctgatcggtatcatcgataccaactgtgatccggaagagctggattatgtaatcccgggtaacgatgatgctatccgtgccgtaaaactgatcgtttccagaatggcagacgctgttatcgaagctaagcagggcgaggctgaggcagctgcagcagagggcgaagcagaggctacagaggcttaattaaccccaaaattaaaaactgaaaccaaaagaccaggagcacgccgcggttttccgcataaaagcgtgctccgcgcgggtatacgaacgtgtacctgaatttatatacacggagggatttaagatggcagttacagccgcaatggtaaaagagttacgtgaaatgacaggcgctggtatgatggactgtaagaaagctcttgcagctacagatggcgacatggacaaagctgttgagttcctgagagaaaaaggacttgcaggcgctactaagaaagctggccgtattgcagcagagggtatcgttatgactaaggttaccgctgatgaaaagaaggcagttgtagtagaagtaaacgcagagacagacttcgtagctaagaacgagaagttccagaactatgtatctgatgttgctgagcaggcgctgaacacaagcgcagcagatattgacgcattcctggctgaaaaatgggcaaaggatccgtccctgacagttgcagaggctctgtcttcccagatctccatcatcggcgagaacatgaagatccgtcgttttgctcagttagctgaggagaatggtttcgttgcttcctacatccatgcaggtggcaagatcggcgttctggtagacgttgagactgacgttgtaaacgatgcaatcaaagagatggctaagaacgtagctatgcaggctgcagctctgaaaccgctgtacaccaacgacagcgaagtagatgcagattacatcgcaaaagagaaagagatcctgactgtagcagctaagaacgagaagccggatgcaaacgacaagatcatcaacggtatggttatgggtcgtattaagaaagagctcaaagagatctgtcttctggatcaggtatatgttaaggctgaggatggcaagcagagcgtagctcagtatgtagctcaggttgctaaagagaatggcgcgaagatcactgttaagaagttcgttcgtttcgagactggcgaaggtatcgaaaagaaggaagagaactttgcagaggaagttgcaaagcagatggcacagtaagcaaagtacttgttataacttcatataacttgttaaaaagtgctgaaccctagtatttatgctgggtttcagcactttttttgtgtactgttttttgatacttttttatataacttgttgcaatttattctatcttcttatgcgaattgtgtaaaaaagtgtgtagtgagttgtgtagaggttttgggggatttgtgtaataacatgaatggaacgcctcagctgattgcagacgcacctttgcagtctgctcagcattacatttaccggtctcaggatcccattagcgattcttttgggtggcattatgggactcaccggaatctggcgggcgcttacgctgaccttgatcgtgaaaggataggggataaaagtgcaccagaaagtcgcacttgaaaatttcgccagatgcgctataataagtctggcgatggttcagcatggaaacattgcaaatttgataaaaacaggggagctcgttagcgggctgagaggaagtaatcgaacttcgaccctttaacctgatgcggataatgccgtcgtaggaagtcatgagatgaatttttacaggagatatccgcaggggtatctcctgttttttcatataacaggaaaatccgttgaaatttcctgttatataaaaagtcctaccgggcgggatcgcactgcggcggaagggaatcatgtcgcaagcgaccgcgctcggcgcgggaatgtgccagggcacattcttttaaaattaaattctttgaaagggggaacgtattccgcatgtgtgcggcgagctgagggggagcgccctgagctttgtaggcagcgatgggaagccgtgttccggcgtgagaggataccagagagtatcgaccgaatttcatgcagaaaacgtaaattgttcgtaactgttcaagaatatcaaagaaacagaacagttgcaaattttcaaagaaggagaagaaaaatgaataagacaaacacgaaaaaactagcgattgcggctgtattctgtgccgttgccatcgtaggaagtttattttccgttccggtgttcggaagcaagtgttccccggtacagcatatggtaaatatcctgtgtgccgttcttctgggaccgggctatggactgggagcggcctttgcagcggcgctgatccgaaatctgttaggacttggaagcctgatggcatttccgggcagtatgtttggcgccctgatctgcggactggtttacaagaaaacgcagagtgtgttcgcaactttgatcggtgaggtgcttggaacgtccattctgggcggatttgcagcatatccggtggcagttttcctgatgggaaagagcgcggcgggactggctgtctatgcctatgtggttccgtttttgatctcgaccgcgggaggcgcgatcataagcgcggttctgattttaagtttaaagaaagccaatattttagcaggaatgcaggaagcactgagagaggagaagccagcacatgtttaaagaaatatttgataatgtaagagaaaaatgtccgttaatccacaacattacgaactacgtgactgtcaatgactgtgccaacgtggtactcgcatgcggcgcgtccccgatcatggcggatgataaggacgaagtttcggatatccagaccatctgcggcggactgaatatcaatatcggcacattaaacagccggaccatcgaatccatgctgcttgccggaaagcgggcaaatgagctgggtcatccggtagttttagacccggtaggcgccggtgcgtcgaaactcagaacagagaccgccaatcagcttttaaaggaagtcaggtttaccgtgatccgcgggaacatttcggagatcaagacactggcacttggaaatggaacgacgaagggcgtggatgccgatctggcagaccgggtgacgaaggaaaatctggacgaggcggcagcttttgcgaaggcatttgccggaaagatgaatgcggtcgttgcgatcaccggtgcgatcgacattgtggcggatgcggagaaggcatactgcatttacaacggtcgtccggagatgtcttccatcacgggaaccggctgtcagctctcggctctgacggcgacctttgtgacagccaaccaggaacagccgcttgaggcagctgctacggcagtctgcgcgatgggactggccggggagacggcatacgcccgtttaagtgaactggacggcaatgcgacttatcggaattatattattgatgctatttatcgcatgaacggagaagcgctggaggctggagcaaaatttgaagtaagataatagagctttagtgtccgtttttataagaacagctgagagaaggaggaaatgcagatgaactgcagaccggaagatatgctgctttacgcggtgacagatcgcgcatggctgaagggggaaactctggagagtcaggttgagaaagctttgaagggcggggcgacgtttgtccagctgagagaaaaggagcttgacgaggcggagtttctggaggaggcaaagaagcttaaaatgctttgcagaaagtatcaggttccgtttgtgatcaatgacaacgtggagattgccctggcggtggatgcggacggcgtccatgtgggacagagcgatatggaagcgggaaaggtccgggaaaagctgggatcagataagatcatcggcgtttcctgcaaaaatgtagaacaggcgcttcttgcgaaaaagcatggggcgaattatttgggagtcggagccatctatccgacgggaaccaaaaaggacgccgatgccgtgacgccggggatgcttgccaagatctgtcaggcagtcgatattccggttgttgcgatcggcggactgaataaagaacatctggaactgttaaaaggaacaggtgtggacggcattgcagtggtcagcgccttgtttgcggccgatgatattgaaaaggcagcagaggaactgaaggaagctgtaaaaaaggtcctgtaaagatgaaaacgttgtcattttgtcaaaaaatggcatgaaaaagtttataagaaaaagcttgtgaaaaaagcttcattaaaaaatggtaagaaactttgcaaaaagttttttatggcggcacattgggggcaccaccttgtgtcgccttataaaagttattgatgcctgaaaggagttaattatgaagacagcattaacaatcgctggaagtgattgcagcggaggcgccggtatccaggccgatttaaagacgatgatcgccaatggagtatatggaatgagtgcgatcacggcgctgacggcccagaacacaaccggcgtccaggggatttttgaggtaaccccggaatttctggaacagcagattggcagcgtatttacggatattcgtccggatgcggtaaagatcggtatggtttcttcaaccggactgatcaagtcgattgcgaagaagctttgtgagtaccaggcagaaaacattgttgtggacccggttatggtggcgacgagcggagcaaagttaatcagcgacgacgccatcgacaccttgaaagaatcgctttttccattagcggcggttctgacaccgaacattccggaggcggaggtcttatcaggaatggaaattaagtctgccgacgatatgattacggcagcaaaatggatcagtgaaacgtaccattgtgcggttctctgcaagggcggacatcagttaaatgatgccaacgatcttttataccgggacggcggataccgttggtttaacggaaaacgcatccacaattccaacacccatgggacgggctgtaccctgtccagcgcgattgcatccaatctggcgaagggctatgatctcgacaccgcggtggaacgtgccaaggcatatatttccggcgcactgggagcgatgctggatctcggcaaaggatccggtccgatggatcatggatttgatttccggggaaaaggatttgcggaggaacgcgtatgacaatgacagagaggcttttggaagccacaaaggagatctgggctggttacaatgaaaaaccgttcgtaaaaggcattgcggacggcagtctggatcatgataaattcaaatattatatgatacaggattatctgtatctgattgattacacaaaggtgttttccatcggggcggcaaaatcaacggatctcgcatttatgcgcctgtttgccggatatacccactcgattctggatggggagatggatattcaccgtgcttacatggaacgtttggggataaccagagaagaggcggaacagacgccggtcgctctggataacctttcttatacttcttatatgcttcgcatcgcttatgaggggggcgcgccggaggcggcagcagcgatattgtcctgcgccctcagttatgaatggattgcgaagaaaatcgcagcagacagaccggatgccgacaaacatccattttatggggagtggatccggggatacgcttccgagtcttaccacaaggaaaatgaagtccttgtagagtggatgaaccgtctggcagaggatctgtctgagaaacaaaagaaacatctggtggatatttttgtggcctgctcccgctatgaagcggcattctgggatatggcgtgggaaatgaggcggtaaatatgcttacatttgacaacgtgcgtttccaatatgcggtagaggatttttcgatcattgaccatctgtcgtttgaagtccaggatggggagtttgtgtccatcatcggcgcttccggctgtggaaaaagtacgatcttccggctggtaaataagcttcttaccccggcttccggtgtgatccgggtggatggggaatcgatcgaaacgaagaaaaattactgtggatatatgccgcagcaggatctgctgtttccatggcgtaccgtgcgggagaatctgatgcttccgatggagattcagggcggatattcgaaggaacagatgcagaaaaaagcggatgatgcgcttcaatcggttggacttgcagactggggagataagacgccgaaagagctttccggcggtatgcgccagagagccgcctttgcgagaacggttctgacgggttcagaccttctgcttttggatgagccgttttcagccctggattatctgacaagactgtctatgcgggagtggcttctggaacagtgggaaaaggagaaaaagacggttcttttcatcacgcatgatgtggaagaagcggtgtttctgtccagccggattctcgtggtggaacagtcaccgatcacacatctgcgctccatccaggttccggcgggatatccgcgatcccgggaagagcttcgcagaccggagattctgtccttaaaggaagaactcatcggaatgcttaagaaggagaaggcgtgatggaacagaaaaaaacaaataaaatgggaagccggatgaatgcgaatcttccagccctgattctggtggcggtgcttctgtttgcatggcaggtggcggctatggggattgatgcggcctatattctcccgtctccggttcaggtggttgtacggctgtgggaacttcggggtccattatttacggcacatctgccggcgacgatgtcggtagtcgtgattggacttttgatctcgatcgtgctgggcgtgggactggctgtgctgatggatgccagtgagacggcaagaaaggcgctgtatccgctgatcatcgcctcccagacgattccgacgacggcgctggcaccgctgtttgtcctctggtttggctacacgatctggagcaaggtgctggtaacggtgctgattacgtttttcccgatcacgatcacggtatttgacgggttccggtcggtgaagacggaaatggaagaacttttgtttacatttggcgcggataaacgtcagatctttttgaaattaaagattccggcgacgcttccgtactttttttcagcgatcaagatggcggtaccgctgtcgatcatcggagcggcgattggagaatggctgggcgcccagagcggactcggatatttcagccggagaatgatgacccagttagatggagccggtgtatttgcaccgattctgctcttatcggtagtggcgatggcggcaacgtgggttgtctcgctgcttgaaaagcggatgattttctggaggaatgagtaggaaattgtgatataggatgaaattttgaagtatgtgtgcggatattgaaaagtctgtatttttgaaatgtgtgctgcagaccgaaaaaagtgtattcacaaaaaagctactcgtgaagaagtgcagatctttgagattggtatgtgaatccagcaagtcatatgccaaaagaactggaaaacaggtaagtgatagggaaatataaacggaaatttgtaaaaatgaaaggatatgagatgaaaaaacgaatgaaaatggctgccgcagtgatggcagcagtgatgggaatgataacacttggcggatgtggaacggccagcgaaaagagtgagacagctgctcaggcagagggcacggatgcgaaacagacctcggaagatggaaaaagtcaggatcttaaggagatcaatgtggttcttgactggtatccgaatgcgatccatacctttatttatacggcgatcgagcgcggttattatgcggaagaaggactggatgtgaaagtgcgttttccggccaatgcgaacgatgcgttatcactggtagcggctggaaaggcggagatcggcatgtactatcagcaggatgtgatccaggcggttgccaatcagggaacgaagatcaaatccatcggtgcgatcgtgcagtccccgttaagtgtcgttctttctttaaaggataagaatatcacaggaccggaaaatctggttggaaaaaccgttggttacggcggaacagcactcagcgaggcggttgtcaagagcatgatggaatatgtgggagcggatgcatcggatgtaaacctgatcgatgtcggatttgaactgatgagttctatgacgaccggcaatgtggatgcgacgatcggatgccttgttaaccatgaggttccgcagatggaggaagaaggctttgatgtcaactacttcatggcagctggatatggaatcccgaattattatgaggaagtattccttgccaacaacgaaatgatccagcaggagccggaagttctggaaggattcttacgcgcatcgaagaagggctttgaagactttaagaacgatccgaatggctgcctggcaatcctgatgaataatcagaatgaggaaaacttccctctgacccagagcgtggaggagaagtcctgtgagacacttctgccgctcatggagagcgatgaggttccgttcctgacccagaccgaagagtgctggcaggaaaacatcgactggatgagcgagagcgggctgatcgataagaaagtggatgtttcggatgtgatggtaaacctgcaggagtaagagtcagaagtagtcagagactggctgtttgcgcagagcaagtaaatttccggaactggaaattctggtgtttaacacatatatgcaagaatggtaacagagttactgagttactggggcagatggagtctcagaatgttgacagtctgccagccaggatatataatattttcgtaactgttcagtaccttaacagtcacgcgcaaaaatccattaaagaaaaaacaccagaatggaaggggaaacaaatagatgaagaaaattattttaaccggcgatcgtcctacaggacgcttacatgtcggacattatgttggctctctgagcgagagagtgagacttcagaactccggcaagttcgatgagatttatattatgattgccgatgcgcaggcactgacggacaatgccgatcacccggaaaaggtgcgtaaaaatattctgcaggttgccctggactatctggcttgtggaattgacccggagaaatccaccatctttatccagtcgatggtgccggagctgacagagcttactttctactatatgaacctggttacggtatcccgtgtacagcgaaatcctaccgtaaaagcagagattcagatgcgtaattttgaggcaagcattccggttggattctttacttatccgattagccaggcggcggatatcactgcattccgcgcgacgaccgttccggttggagaggatcagatgccgatgttagagcagtgcaaggagatcgtccataaattcaacagcgtgtacggcgagactctgacggaaccggagattctgcttccgtccaacaaggcgtgtctgcgtctgccgggtatcgatggaaaggcaaagatgagcaaatcacttggaaactgcatctacctctctgattcggaagcagatgtgaagaagaagattatgtccatgtttacagatccaaatcacctgcgtgtcgaggatccgggtaaagtcgagggcaatccggtcttcatctatctggatgcattctgccgtcaggagtattttgcagagttcctgccggattaccagaacctggacgagctgaaagcacattaccagagaggcggtctgggcgatgtgaaggtgaagaaattcttaaataacgttatgcaggctgaattgtctccgatccgtgcgagacgccaggaatgggagaagagaatcccggatgtatttgacattctgaaagagggaagcaaggcagcagaggcgaaggctgctgagacgcttcgcgatgtgaaggcttcaatgcggatcaattactttgatgatgacagtctgatcgatacgatcggggactaagagaaaaagtggaaattcggcgcggctttctgaaatgccgggagtgtgctgccggaaatgaattgaattaagaaatagagaaaagtctgtcttctggtatgggaaaggtgtcgggggacaggcttttttgcgtgattcccacttaaaaacggtttacatagtccctaaaattcgatataatagtctgtattgcgttataacgcaaggctatatcaaatatgaaatgaaagaatactaagagggctacacatgagtaaaaacaaacaatgggcgagtaagctgggctttattatggcgacggctggggcggcgattggattgggaaatctgtggaaatttccatatctgatgggaaagaacggtggatttccatttctggttgcgtatctgttttttatcgtcgttctcggacttccggttatgatcacggaaatgtccttgggacggaagacgcggcatgatccggtgcaggcgtatgcggacattcatccgcacgcacggattgtcggtatattcggtgtactggcggcgtttattattttgagttattacagcgtcatcggcggctggattttaaagtatattgccagctatgtgacgacggcggcagcgccggattttaacgcctttatcggcagcagcgagccggtgatctggcatattgtatttatggcagcgactatagctgtctgctattttggcatcaatggcattgagaaagcgagcaaattgatgatgccgatgcttctggttctgttatttgtcatcattttcagaagcgtgacgcttccgggagcttcgaaaggactgttatttatcttccagccggatttttcggcgttcacgctttcttctgtcagcgcggcactgggacaggtgttttattccctgagtctctgtatgggtatcacgatcacctacggaagctatctgagtggaaaggaaaatattccaaaaagctgtatgatcgtcggtggtctggacaccgtgattgcggttctcgcgggtatcgcgatctttccggcagtatttgccttcggtctggagccgggacagggaccgggactgattttcggcacactgccgatggtatttgcgaatattgcggggggaactttctttgcaatcctgttttttgcgctggtttttttcgcagccgttacgagtgcgatcgcacttctggaagtctgtgcctcttttgcgattgattcgctgggctgggaacgcaagcatgcggcgcttgtgattggtacggcgatcacgctgcttggcattccgagtgcgctgtccttcggcgtcctgagtgatgtcacaatcctgaatcagtcggtctttgatttcgccggactggtaacggataatattctgatgccgctcggtggactcacgatgtgctactatgtaggctggaaatggaaaccggagtatctgcttgcggagatcgaggcggacggtacgaagttccgtctggggaaactctgggtgttctgcatccgattcctgacgccgattatggtgggaatcgtcagtgtaactggattttataatttgtacttggcgattcggtaggaagagcggttttgttgacaaaaacaggaaattgccgtataatttgttaaagttcagacaaggtcatggaaatagggataggatgtgcttgacggtggatcaagggcggaaaaagaccatttgtgtgataatctgaatggacagacaacttggggaaacttgaatataagacaattaaattatggggataccgcagaatgacaaggatgtgattaggcggtgtccctacttcgactgtcgggaatgaatcggatatgaggcattgccgcaggcggaaaagctgcgccgtgtgagtgagcacagaatcacaagccggaagacgttgcggagaaagcagagaaggaggatgagatatatggttcagagaaagaaaacattagccaagacagcggcaaagaaatctgtttcaacggaagagaaaaaggttccgtctgttgtggagaaaaaagagacagccgtagctgaagtggcgaagaaagaaacggcagtggcagcagtcgcaaagaaagagacagcggtagcggaagtggcaaagaaggaaacagctgttgcagcggtggagaaaaaagagacggcagtagcatccgttccgaaaaaggaaactgcactggcacacgtagagaagaaagagacagccgtagcgccggtacagaagaaggagaccgccctcgcagagaagaaagagatggcagcagccgcagagaaaaaggagacagacgtgaccgtaaagaaaacaactgcaaagagaaccacaaagacaaccacaaagacaaccactgcagcaaagaagacagctgagaaaaaggaagtaaagacagttgcatacgtacagtacgcaggtgctgagatttctatcgagaagctggaggcagaagcaaagaaagcatatgcagctctgggacataaagaggacgagattgagactctgaccctgtatgttaaaccggaagagcgtgccgtttactatgtggtaaacggagaaggttccagcgagtacaagattgtgtactaaggtgggcgttcggtgaagtttccggctctgtatgacgggaagtttacataccatatctgcttaaaatgagggagcaggtataaaaatctaagaatggtaaaaagccagtttttatatctttggtgtattaagagagatatagaactggcttttttgttgatagggagatgttttaaaaacgctttgcaagaattacaacagggaatgcggatgattcgatgccaggcgtagtgaaggaaaaaacagccagaacagtacgccagcgcttaaggtcaggcaaatttccatggcactgttgatgattcccgataaaatccagctgtccagacagaaaacacaagaaatccagagaagcaggaggcagaggcgcccacgggcagcaggagaatccaaagagtgagtcaatttgctgaaaaaggcagtattggagggggtttgggaataacgggcaggagctggggacgaaagatagagctgcaagcttaaataaaacagattataaagaaataacagtgcagccgccagtgccagaagcgtgtgaaggatagcacagactgggaggtgctccggggtatagggcagcagggcagcggcagtgaggagaagcaggcagtattttgcctggcgggggcggtacagggagagttgggagtagaaaaagccgccgcagagcaggcaccagagaaaaaattccccgcgtcggtgcagtgcgatgctgatactggaaaaattggaagaaaacagattgcatccgcgtgtgagtgagaaactaaaaaatgggaggagaacgaacgtaaatatccatcgaatcatgaggatagtgtgggaaaatggggcggaaaagatactggaaagaagaggcagaaatagttgacggaattgctgtttatgtaatagtattattatttaggaaagatgaattatatgtttgattaagaaggataatacaaaaccatgataaatttaccagcagcatttactgaacgaatgaaacagatgctcggcagggagtacgatgcgtttatcgccagttacgacaaggagcgctcacagggactgcgcgtgaacggactgaaaacggatccggcggaatttgctaagacggctccattttctctgaatccggttgcgtgggcggcggagggattcgcttatggggcggaggatcgtccggggcgtcatccgtaccacgatgcgggcgtttactatattcaggagccgagcgcgatgattgcggcttcgcttttaaacccgcagccgggggaaatgattctggatctctgtgcggcaccgggcggaaaatcgacgcaggcggcggcgagactgagcggagaaggacttctggtgagcaatgagatccatccggcgcgtgcaaagattctctcgcagaatatcgagcgcatgggaatccggaatgcggttgtgacaaatgaagattccgggcggctgacgaagtattttccggcattttttgatgggatcatcgtggatgcaccgtgttccggcgagggaatgttccgcaaggatgagacggcggtcacggaatggagcccggagaatgtgcgtcgctgtgctgggcggcagcaggagattcttgaaaatgcggcgatgatgctgaaaccgggcggacggctggtgtactccacctgtacttttgcgccggaggaggacgagcaggcgatcggacgtttcttagaggcacatccagagtttgcgctagaggaaacgccggactatccgggactttcgcacggcgttccagcctggggggcgggtgtgacggatggaatcgagaaaacggtccgtatctggccgcaccggaccgagggagaaggccattatgcggcacttcttcgaaaaacgggcgagccggagagcgtgaagcgtaaatatccggcttcgatgaaggacaagaagcttctggcagtctatgaggatttctgcaaagagatatttattgagccgaagaaatggacagcggacagtacgatgacgatgtttggcgatcagctttaccggacgccggaggagatggtcgattttaaggggctgcgggtgcttcgcccggggcttcagatgggagaatttaagaaaaatcgttttgagccgtcccacgcgctggcacttgccctgcatccatcggaggtaaaacagaacgtgaacctgtctgccgacgcgccagagacggcggcatacctgcgcggcgagacgatccagctttctgaggaagacgccggaaaaggctggtgccttgtgagtgtggacgggtattcgctcggatggggcaagaagagcggcgggacgctgaaaaaccattatccgaagggactgcggaagcagtattaatagaagaaggaaaaatcctccggcatcggagctgtaaactccattgcttcccctgtgatcggatgccggaatgccaccgtataggagtgaagcgcctgccgttcgatgaagcggtaatccgggttgtatagaaaatcccctaaaagcgggtgcccgatggctttcatgtggacccggatctggtgggtgcgccccgtttccaggcgaagccggacgagggagcagccgagatcgtcccggtaatcgagacaccggtaatgggtgacggcgtgttccccatgattcatatcgatgcagcgttcgatggtggaactatcttttcgggcgatcggcagatcgatggtgccggatttttctggtttaccggcaacaatcgcgagatattcgcggcgtatctctttttttgcagtcatggcggagagaaatgcgccgcttattttatgtttggcgatcagcagaagaccggtggtgtctcggtctaagcggttcacggcacggaacacgaaatgttcgccccgcgaggcaaaacggtacgcgagggcgtttgccagcgtattttcatggtgtccctgggatgggtggacaggcattccggcggctttgttgagtattatgagatcttcgtcttcatatactatatcgatcggaagattgaccggaagaatatctgaggaaatgggttcgtccgggagaaagagtgtcagggtgtctccgctctgaagcggtgtgttcagccaggatggagtcccattcaggcagatctgctcagggttctgtttgagctcgatgaggatgcggcgggaatatccggcatcgcgcaggaaggcgccgatggtgtcggccttgtttttatttgtaatggtgtatgataatgtccgtttcatttagggaacctctttggggtgaaaatgggttatttgttgtcattccaataaggataacataaaagcaggatgggctgcaatgtcagagtgaaatttgttcttgattacggctacattattttggaacaggaagcgccacatgagaacgtatgacgaaattttgaaggattctcgaaacactattgacttgccatgaaaaacctagtatcattactaataagtaaggctgtttttattcaaattacttataagtagaactaataaatacaatgcagagaaaaggagaatgaacgatggcaaaagtaggaattgtaatgggaagcgattcggacatgccgatcatggcacaggcagcagattttctggacaagatggggattgattatgaaatgacaatcatttctgcacaccgtgagccagacatcttttttaactatgcaaaatccgctgaggagaaaggctttaaggttatcattgcaggtgctggtaaggcagcgcatctgccgggtatgtgcgcggcactgtttccgatgccggtaatcggtattccgatgaaaacctcggatttaggtggagttgattctctgtattcgatcgtacagatgccgtccggtattccggttgcgacggtagcgatcaacggcggcaagaatgcgggtattctggcagccaagattctggcaacttccgatccggagcttttagcaaaattaaaagcatactctgaggagatgaagaacgaagtggtcggtaaggatgagaaattacagaaactgggacataaagagtatctggcacagaaataaacattaaaaatataaacaaggacatacggaggaaaaccatggattacaagaattccggagtagatattgaggctggttataagtcggtagaactgatgaaagagcatgtaaagaaaacgatgcgtgaggaagtgctgggaggtctgggcggctttgccggtgcattctccctggcaaagattaaagagatggaagatccggttctcttatctggtacggacggctgtggtaccaaggtaaaactggcgatcatcatggacaagcatgacacgatcggtatcgatgcagttgcgatgtgtgtcaacgacattgcatgtgcaggtggcgagccgctgtttttcctggactatattgcctgcggcaagaactatccggaaaagatcgcggatattgtaaaaggcgttgcagaaggctgcttacagtcggaggcagctctgatcggcggcgagacagccgagcatccgggactgatgccggaggaagattatgatctggctggttttgctgtcggtgtggttgataaaaaagacatgattaccggcgaaaacctgaaaccgggtgatgtactgatcggtatggcatccaccggcgttcacagcaatggtttctccctggtccgcaaggtatttgagaaggaacttaacaaagaggggctggagacctactatgaggagttgggaaccacgcttggcgaggcacttctggcaccgacccgtatctatgtaaaggcgctgaaagcagtgaagaatgcaggcgtgactgtgaaagcgtgcagccatatcacaggcggcggcttctatgagaatgttccgcgtatgctgaaagacggtgtccgcgcagtcatcaagaaagacagctatcagattccgccaatctttggtatgctggcgaagaaaggcgatatcgaggagcatatgatgtacaatacctacaacatgggtatcggcatggttgtagcagtcgatgcggctgatgcagagcgtgcgatggaggcaatgaagtccgctggcgatacaccgtacatcatcggttctattgaggcaggagaaaagggagtaacattatgctaagagtcgttgtaatggtgtctggcggcggtacaaatctgcaggcaatcctggatgcggttgataacggcaagatcacgaacgcagaggttgcagcggttatcagcaacaatgagggcgtttatgcgattgagcgcgcgaaaaaacacggtgtcccggcgtttgttgtgactccgaaggcgtatgagacgcgagatgcattcgatgaggcgcttttagagaccgtcaaggcgtgtaagccggatctcatcgttctggctggatttcttgtgaagattccggcggcgatgatcgaggcatacagaaataaaattattaatatccacccgtccctgattccgtccttctgtggcgtcggctattatggactgaaggtgcatgaggcggcactggcgcgcggcgtcaaggtgacgggcgcgacggttcactatgtggatgagggaaccgataccggtccgatcctcttccagaaagccgtagaggtgcagccggatgatacgccgaagacgctgcagcagcgcgtgatggaacaggcagagtgggtactgcttccgcaggcgatcgatgcgattgcaaacggaagaatataaggagaagaacatgaaagttttaatcgttggcagcggtggacgtgagcatgcgatcgcatggaaagtgtctcagagtccgaaggtagataaaatttattgtgcaccgggcaatgcgggaatcgcagagtatgcagagtgtgtgccgatcagtgcgatggaatttgataagctggcggcatttgcgaaagagcatgaggttgatctgaccgtgattggcatggacgatccgctggttggcggtatcgtggatgtgttcgaggcacagggactgcgtgtatttggaccgagaaaaaatgcggcgattctggaaggatcgaaggcattttccaaggatctgatgaagaaatacaacattccgaccgcagcctatgagacttttaccgatccgcacaaggcgctggaatacttacagaccgctaagatgccgatcgttttgaaagcagatggtctggcacttggaaaaggtgttctgatctgcaatactttagaggaagcagaggcaggcgtcaaggagatcatggaggacaagaagtttggttctgccggcaatcagatggtcatcgaggagttcatgacaggacgcgaggtttctgtcctttccttcgtcgatggcgatacgatccgcattatgacttcctcccaggatcacaagcgggcgctggacggcgatcagggcttaaatacaggcggtatgggaaccttctcgccaagcccgttctacacaaaagaagtagacgaattctgcaaaaagtacatctatcagccgtcggttgacgcgatgaagaaggaaggacgtaccttcaagggcatcattttcttcggtctgatgctgaccgaagatggtccgaaggtgctggaatacaatgcgcgtttcggcgatccggagacacaggttgtcctgccgcgcatgaagaacgatatcgtggaagtctttgaggcatgtatcgacggaaccctggatcagattgagcttgaatttgaggacaatgcggcagtctgtgttgttctggcgtcggatggttatccggtgaaatatgaaaagggcttcaagattcacggtctggagaagttcaaggatgcagacggatactatgtattccacgcgggcacgaagtttgatgaggacggcgacatcgtgacaaacggcggtcgagtgctgggcgttactgcaaagggcaaagacctgaaagaggcgcgcgccaacgcatacaaggcgaccgagtggatcgatttcgctaacaaatatatgcgccatgatatcgggcatgcgattgatgaggcgtaggggaagcggtaggtagtagattcctatttagaaaagaaacggggatatcagatttggacgtctgatatccctgtttttgtctggatgttggaaaaaaatgcttttgaaaaacatattaaaaacattcaagcgtgctataatagaaagaaaagacgaactgttttcatgcaattaaaaggaggacaatgcaatggctaacaaatatgcaggaacccagacggaaaagaacctgagggaggctttttctggtgaatcacaggcaagaaataaatatacctattttgcatccaaggcaaaaaaagagggatttgagcagatttccgccctttttttaaagaccgcagacaatgagaaagaacacgcaaagatgtggtttaaggaattagacggtctgggaaataccgcagagaatctggcatctgctgcagacggcgagaactatgagtggacagatatgtatgatggatttgccaagacggctgaggaagaaggattcccggaactggcagcgaaattccgtatggtagcggagattgaaaagcaccatgaagagcgctaccgtgccctgcttcacaatgtggaagcacaggaagtatttaagaagagcgaagtgaaggtatgggaatgccgcaactgcggtcatatcgtagtaggcgagaaagcaccggaagtctgtccggtatgcgcacatccgcaggcttatttcgaggttcatgcggagaattactaaatttcggaaacgacgagacgccagctggggggctgccgattccttattgtgtataaaaaaggaagatgcatcatataaaagatacgaaaaataagcaggctgttttggatcagttcatatgagatcgtcttttttatcattcgcaccagatgtttcgaaggaacaatgccaggcagagcattggatcgatatagaaaatgtgtcagaatcagtaaaaatgacgccggaagaaattgaaaatttgaatgcacggattttacggacatatggaacggaaatgcatgatttgaaaaatgaagcctttgccaaagaagagagagttgtttatgataaatggtgtggaaatttcttatcatttgggatacaggggataaattggactgtgcgtgatgctcaaaattgcgtgaataaaaatgttcatatcaaatatggaatcgcgacttcacaggggttgatcaaacagtttccgatggagacttttttagccgatgaggaagatccatctgatccggagtgggatgaggcagcactttgtctctgtatggtcggggaaccgcttttgattttgggttcggtgcaggaggagggttatctgtatgtccagaatgaatgcagcgagggctggatatcggcagagtcggtggcagtctgtcggaaccgggcggaatggctgatggcggcatttccgatccatccgttagtagtgacaggggatatggtctggctggaagcaagtgcagtctatccgggaaccagtgcataccggcttcggatggggacggtgttggaattgtgcgtggaagaaggaatcccagagataaaagaaacaatagaaacaaacagaaaaaaagggataggagcggtaatagagacaacagaagcacaggcagaacagagagtacagaacagactgtcttggaataattacatcgtctggcttccatgccgcgccccggatggcagtttcttccggcaaaaaggattgattccgatgagccgggacgtatcggtgggatatttgagcttgacaaatgaggaaattattaaacaggcgttcaagtgcctgggagaccgctacggctggggcgggatgctggaaagccgggattgttcttcctatatccgggaagtgtaccgctgttttggatggatcctgcctcgcaatacgaccggtcagctgcagatgccagttcgaaaaatagagctggcagggcggtgctgctcagaaaaagagcagattttaagagcattagaaccgggcacacttctatattttccgggacatgtgatgatgtatctgggatatgagaatggcaatttttatgtcataaacgatgtgagcaggctggtaaaagaaggagaaacgatgccggtgcgtgtacgatcggtgattgtcaacacgctggcagtcaggcgtcccaatctgcggacctggatggaggagctgacgcttgctttgattccttgggaaacatgaagcgtacagcagatagaaaaagggagaaaaagagagatgaagataattgtatgtgtggataatcagaacggcatgatgttcaatcacagacggcagagccaggaccgcgtgcttagaaagcgtattctggagctgacaggtgggaaaaaactgtggatgaatgcatacagccagaaacagtttttacaggtgaatggaaatatgccgaaagaacaggaacaatccgggcaactggggcagattcaggcagatgaagcgtttttggaaaaggcggggccgggagagtactgttttgtcgaggacaaggatgttgttccgtatgagagccggatcgaagaagtgattctttgtcattggaaccgggattatccggcagatatgtattttaagatggatctgggcagctggaagctggcagaaacgcaggaatatgcgggttcctcgcatgagaaaatcacagaagagcggtatgtgcgcaggtaaaaaatatacataaaaagtaagtacaatataaaagagtaagaaaaacataaaaaacaagtcaaatataaaaaagagccggttctgtacctgaaaatcaggcgccagaacgcgcaaatctacatggctctgaaagggataggcttaaacggaaaggcagaaattcatatgagaaaattgaaaatgtggcttctggggctggcggcagtggcgatgctgtctgtttcagcgtgtgcacaggagatcccagagggaagtctgaatggaaacggaagtgtcagcgcggaggaaaatcaggcggaaagtgcggacggagattcgcaggcggtgtcatcgtcagaaaatggtggaaaccgtgtatcttctgcttcgggaacgtcatttaatctggcggatgtaccggcatattccggtcagccgtatgtggcagtcaatggaaatgtgccgtattttaccgatgcggacctgacggatgtatcatttgagagttacagtgatttggacagcctggggcgctgcggcgtggcatatgcttcggtttcgcaggacacgatgccgacggagaagcgcggctcgatcggggaagtcaagccgacgggctggcatacggcgaagtatgacaatgtggatggaaagtatctctataaccgttgtcatctgatcggctaccagctcacggcggagaatgctaatgtcaaaaacctgattaccggaacccgctatctgaacgtacagggaatgctgccatttgaaaatctgacagccgattacgtgaaagaaaccggaaaccatgtcatgtaccgcgtgacaccggtttttgagagcgataatctggttgcctccggcgtcctgatggaggcggaatccgtcgaggatcagggcgagggagtgctgttctgcgtgtacgtctataatgtccagccgggtattgcgatcgattatgcgacaggagaaagctgggcggacggttctggaagtgcgggaagcacagccggacaggaaacggctggaaatggcagcagccagaatcaatcggctggatcgggagcagctggttcgtcgggaggcggcgctggatcctctggaagcagcgcgacggttcagacctacattctcaataccaactcgaaaaaatttcatcttccaagctgcacatctgtcacccagatgaaggcggcaaaccggcaggaatttaccggtacgcgcgatgaagtgattgcagagggatatgaaccatgtaagaactgcaatccctgataaaacaggagtgcaaagtgtctcgtttctgggattggtgctgtcccagtatgcgtacttaaatgcaatcaaatggaccaattcgggaacggcgacggttttgattatgaaatagtataagaataatattagagatttacttttttaacaatgctttgcaagaattctcctatcctctttagtgtggcagtatcaatagagagaaaaaggattgacaatttcacaaaatattcacaaataattagcactcacctcttgacagtgctaacggaaagtgctataacatagccagaacgaaggaagaggaacaaagaggaagcaaaaagaaagggttgagcgcttccgggaatgttcccagaccgtcccggttccgaaaatgttggttataaacataatgaacagctggtaagctgaaaaaaaggagagatgacttatgttaatgccgagtatttttggagaaaatttgtttgatgatttctttaatgattttccgttttatgatgataacgccggacagaagatagagaaaaagctgtatggacgccatggacagaacctgatgaagaccgatatcaaggaaatggaagatggctatgagctggagatggatctgccgggatttaagaaagaagagatttcgatttccctggaagatggtaatctgacgattcaggctgcgaagggactggatgaggacgagaaggagaaaaagtccggtcgttacatccgcagagagcgttacgcaggttcctgtgcgagaagcttctatgtcggtgatgatataacagaggaagatatcaaggcggaatttaagcatggtattttgaagatttttgttccgaagaaagaagcaaaaccggaagtcgagcagaaaaaatatattgcgattgaaggataatgtagaagaagcagtcagccggattgatggatgcagttgtctggctgtaacatagaaaagagcgctgcggcactcatggagcagttttaccagaaatggaaagccggtttgtgagtgttgcggcgctctttttcactattttatatctgattagtagttaatacctgtgatgccgatagatccctctttgtccagaccaaaggtaactgccggtttaccggatggatcgcctacgatgaaacctgccttggtcagttcggtggaagaaacatcggctgtcttgactgcctcaatcagcgcgtcggtaaatactttgtctgcgtcgagagccataaattcagttctgttatttacgacaatcccgtcattgatgccgatgtaggacggatagacaagcagctcggctaaatcgttcatatttttattggcgatgatgctttgaagggatctggcaaaaccacggtaaagttctgtgatttctttttcgctcagagtctcgtcttctgcatgatctgcatccgttgtctgggcggtttctttttctccggcagtagttgtttcgctggcatcgctgctttctgctgatgtatcgttttcctgtgtggattcagcggcagttgtttcagccgtggttgtttcagacggctggctggagcaggcggtcatgctggcggctgcgatgagagtggaaaccatcaaggtataaattgattttctcataatttcctccatttgcaatcaatggactcccggaagctttctgtgcttaatgtcgtgagatgatttgcaggaaagactccgagagtacctatcaataaggtatggacagtaggtgtcctctgcctgtatgttttgctgatatgattatcatatcataaggcgatgggaatgtatatgaggtttaatgtaatgcgtttaaatccgccttttttagccttttattttttatagaaacaattcccaccaaccacctgatagctggagtagctgtcgtagtttgctgatttggtcgaggtaaaataaaggtagtcgcctatctgattcgccccggcgagcgctgcctttgccgccttggtggcagtagaggacggtcctctatcgagatatttgtcaagcaggccggaggtcgcgcctgggaactgtccgtccgcgtagatgacgctggagatggatttgccccatttgccagatttgacgcggttgacgatcagacttccgactgccagatagctttcataggatccgccgttggcttccatcgtgaggcaggcggagagcagataaacgtcgctctcggaggcggagatcacgtaggatgatttagcggctggtgcagccgtgctctttttcgaagagcttccagattttcccgaagtctgggaggaacctttagccgcgtttgcttctgcctgcgattttgcggctgcaatctgggcctcctcggcggctctggatgcctgctcagcttcttcagcagcctgccgtgccgcctccagcgctgccatctcagcctcaatgctgattgcgcgtcctggcttgacgctgattgtgacataatcagaagaaacgtaaccggaggtgtcaacggaaagctggattttgacccatccagtttcttgactcagtacaggatagtagtcttccgcggcagccagaccgacgatggcagaatccgtgctggcttcctcacgtacatggagtgtctgtgtgctgacggtagcgatatagagaccgagctctttggcgagcggcttgatatcatcgccaaatacaagataatcgtccttgagccatccctccagcccaccggagcggatttttgtccagccatttttgcgttttaaaatggtaccgccgcctccgcggaagcaggtgccgagtaccttggcatctgtatctggtttttctctcaggttcagcgcatcatccacattggcgaccgccagattttcatacggatcgaccggcttttcttctttgattttggctttcgccgtacttttagcatcggtgccggtctgatgactgttttttaaggtgctggaagaagcgatggaaggatcagagcctgctttgttcttcttatcagaaggtttagagaggcataaaaatgccagcagagccgccccggccacaataaaaaggatcaggaaatagatcgccatcattgttttatccatttttttgcgcctggaagaagcaggtttcaaagggaaatcgttcatatcgtatatcctttctgatataaaaacatcttggaaatattacaaagatattacaaaattcttcatttactatagcaaataggaaaatccttgtcaacaaagggggattttacgattagaagaggagatgaaactgagtaaaaatgatgtttttggaaacactattccatcagtgacagcaatcgtttcgccggaattcacacgaaacaatcaatcaaaaacaatcataaaaaatcaaaattgtgcaatataacccaaaaagaggcagtatgtttgtgaataagtttgattgattttgaacgaaaatgattttataatacagtcagaatcaatcaagataagaaaggaatgaaggcttatgatttatacggtaacctttaatccatcgttagattatattgtgtcagtgagcgattttaagctcggactgaccaaccggacggattcggagcttttgcttccgggcggaaagggaatcaatgtttcgacggtccttcaaaaccttggaattgccaatacggcgtttggctttactgccgggtttgtcggcgaggaggttcggaaggaagtggagcagctgggcgtgaaagctgagtttatttccctggatgagggagtctcccgcatcaacctgaagctgaaatccatcgacgggactgagatcaacggtcggggaccgaagattccgcgggaagcggtggatgcgctgatgacccagcttgaccggctgggggcggatgatacgttggtgctggctggaagtattccagcgtcgatgccggatgatatttatcagaagattatggagcgcctggatggcagggacgtccggattgttgtggacgcgaccaaggatctgctgctcaatgtgctgggacaccatccatttttaatcaaaccgaacaatcatgaactgggagacattttcggcgtgaagctctcggagcgtgaggaagttgttccgtatgcgaagaagctgcaggaaaaaggtgcggtcaacgtgctggtttcgatggcaggcaagggcgcggttcttctggcggaggatggaagcgtctatgcggcggaagcaccgaagggaaccttgaaaaatggtgtcggagccggagattcgatggtagccggtttcctggccggatacggggagagcggagattatgaacacgctttccgcatgggactggcagctggaagcgcgagcgccttttcggagcagctggcgacgaaggatgagataaagaaagtgtatgagacctgtaaaatcacaaaaatcggatgaggttgtatgcagacatttttgaagctggcagaatgtactgccggatatgcgatgcatacctgacattcgggcataaatagggaggcaacagatatgaagattactgatttactggatccgagaagtatatcgctggatgcggcacccaccagcaaatcggagacactggacaaggcggtagagctgatggcggcgagcggaaagctgtcggatgtcgaggcattccgcaagcaggtttatgcgagagaagaagagagcacgaccggtatcggcgaggggattgcaattcctcatggaaaatgtgatgcggtcaaaaagccggggctggcggcgatggtcatcaaaaatggcgtggatttcgactccctggacggcgaaccggtcactctgctgttcctgattgcagcgccaaatacaaaagataacgtacatctggatgtgttgagcaagctttccgttctcatgatggacgagaatttctcagattccctgcgaaatgcctcttcggtggaagactttctttccattattgataaggcagatgcagaacaggcaggcatcgatgagagactggcggctgattccggcgaagaagcggcagatacaaatggagagaatgccgcacaagcaggtggtcaggagattcaggcgcaaaaagcgggtgcagagacggaaaagacagccggaccgaagatcttagcggttacttcctgtccgaccggtatcgcgcacacctacatggcagccgaaggcctggaaaaagcggcacgcgcgaagggctggaagatcaaagttgagacgcgcggttcagccggagcaaaaaatgtgctgacggcacaggagatcgaggcggcggactgcatcatcgtggcagcggacgcacaggtgccgatggatcgatttgacggaaaacgagtgatcgaatgtcaggtttcggacggtatcagcaaggcaccggagcttttggagcgcgcggcgtccggggaggtaccggtttaccacgcagcatcatctggaagcagcagcccggcaaaggcagcctctggcggcaaatcgggcagtgtcggacaccagatttacacgcagctgatgaatggtgtctcccacatgcttccgtttgtagtcggcggcggcatcctgattgcgattgcgtttctgattgatggtttcagtgtggatatgaatgcacttccgctcgaccagcgtgtaaactttggtacgattaccccgctggcggcatggtttaaaaatgtcggcggtgtggcatttggctttatgctcccgattctggctggtttcatcgcgatggcgatcggagaccgcccggcgctggcagtcggttttgtcggcggcatgattgcttctcagggaaaatcaggtttccttggcgccctggcggcaggttttattgccggatatctgattctggcgcttcggaaagcgtgcgagaatcttccagaggcactggaaaagattgctccggtcctgatttacccggttgtgggcgtcctgctcatcggactggttatgagcttcgtcgtagagccggtcatgggcgcgatcaatatggcgttaaacaatggtctgagcagcatgggtggttcgagtaagctgattcttggttttgtgctggcggcgatgatggcgatcgacatgggcggtccattcaacaaggcggcatatgtatttggtacggcggcaatcgcctccggcaactacgatgtgatggcagctgttatgattggcggtatgacaccgccgtgtgcgattgcgctggcaacaatgctgtttaagaagaaatttacaaaggaagagcgcgaggcaggaccgaccaacttcatcatgggtctggcatttatcacggagggcgcgattccatttgcagcgtccgatccggtacacgtgcttccagcctgcatcgtcggttcgggtgttgcgggagcgatgagcatgttatttaactgcacactgatggcgccgcatggcggaatcttcgtattcccagtcatgggaaatccgctgttctacctgctggcactggtggttggcatggcgatctcgacggtactcttaggagttctcaagaagaatgtagaagaatagataaataaatttttttgacggaatgtgaatctttattagaaattttttggtcaaatcaatcaaaataggttataatgagaaggagaacatcatcatgaaagagtttaaatataccattacagacccggaaggaatccatgcacgcccggcaggtgaactggtaaaggcggcaaaacagtttacgagtacgatcaagctggcgaaagatggaaagagcggcgactgcaaaaagattttcggtatcatgggactggcggtaaagaacggacaggaagtaaccctgacctttgagggcgaggacgaagaagcagcttatgaggcagtcagccagtttatgaaggaaaatatgtagtttaacaaagatgccgcgatgtaagggattattacatggcggcatttttcgataatggatcaatggaaaggggaatgatcatgcagacgtatcgcggaaaaagtgtatttggcggtgtcgcagttggaaaaatatgtgtgtatcagaaaggcgagcagaccgtaaaacggacgaaaatagagaatacagagcaggaaaaagcgcggtttaatgcggcggttcaggagtccatccgccagctcggcgagttgtatgaaaaggcggtaaaagaagttggcgaggcgaatgcggcgatttttgagattcaccagatcatgctggaggacgaggactatctggacgcggttcagaatatcatcgatacgcagaaggtcaatgccgagtatgcggttgcggtgaccggtgacaatttcgcccagatgtttgcggcgatggaggacgaatatatgcgcgggcgcgcggcggatgtcaaagatatttcggagcggattgtgcgcgttctgtccggaggcgcaggtcagggcatccatacggacgagccggtgattattctggcagatgatttagcgccatcggagacggtacagcttgaaaaggacaaggtgctatcctttgtgacggtacacggttccgtcaattcccacacggcgatcctggcgcgtacgatgagcattccggcgctgatcggaacagacgtggcgctcgatgagacggtagatgggaaatttgcggttgtggatggtactaacggagtcctgtatgtggaaccggatgaggagacattggaaacaatgcgccgacggcagcgggaggaacaggagaagaaagaactgctgcaaacactgaaagggcgcgaaacagtcactatggatggcaagaagatccgcctgtatgcgaacattggcaacagcaaggatctggcgtcggtcattcagaacgatgcggcgggcatcggactgttccgcagcgaatttttgtatctggaaaaagaaacatttccgacggaggaggagcagttccaggtatataaacaggtagcggaaacgatggcgggcaaaccggtcattatccgcacgctggacatcggcgcggacaagcagtgcgattattttgaactgaaaaaagaggaaaatccggcgatgggctgccgggcgatccgtatctgcctgacaagaccggagattttcaagacacagcttcgcgcgttgtttcgggcaagtgcctatggcaatctccagatcatgtatccgatgatcacaagtgtctgggaggtcgaggcgatcgcgaagattgtcgaggaggtcaagacggagctgaccgcacagaatctccagtttggcgacccgaagcagggcattatgattgaaaccccggcggcagtcatggtaagccgggatctggcgaaaaaagtggactttttcagcatcggaacgaacgacctgacccagtatacgctggcagttgaccgtcagaatccggagctggatgcattttacgatccgcaccatccggcggtgctggcgatgatccgcatggttgtcgaaaatgcgcacgccgagggcatctgggcaggtatctgcggcgaattgggcgcggatctgagtttgacaaaagaattcctgaaaatgggtgtggatgagctttccgtatcgccggggcgtgtgctgccgattcggaaggtcattgtcgaaagcagctgcagttgataagaatattaagacagagagaagtgaaaaattgagctaaaaaaagttcaaccacagcagaagatgaaaggaaaagagtcatgctgacagaaaaaagatacgaactgattttggaacttctggataaaaagaggagtgtgacagttcctgagattaaagaggtgctgggagtttcggaatcgacgatccggcgggatctgaatgcgcttgacaaggcggggcgcctgaccaaggtgtttggcggcgcggtgtcctcagacgggacatttacgggaaccgaaccgtcagtggcacagaagatggaattgcagcaggaggagaaaaggagaatcgcccagtttgcggcgggacttatccagccggatgattttgtctatctggacgcgggcacgacgaccgggtatatcttagactatcttccggcgcgcagcgccacgtttgtgacgaatgcggtatcacatgccaaacggctggcagccgccggaaaccgcgtaattctgattggtggtgagttaaagggcacgacggaggcggtcatcggaagtcaggcgatcctgacgatccagggctatcattttacaaagggattttttggaaccaacggcgtcagcaagcgccacggtttcacgacgccggatccgaacgaggcattagtcaagcaagaggcgatgcgtcagacagagcgctgctatgtgctggcggacagccagaaattcggcatggtaagttcggtgacgttcggggtgtttgaagaagcgacgatcctcacggagacagagccgccggaaggatttagcggcagcaagaatatccgggtggcaaagtagaatagtgagcagtaacaatcgtgtttttctaatgaaatcctaacatatatacgatttgacaaactattagaatattgctatatttatagaaaatcaatagggcggcaaacgggcaggattatgtatgacgatcgggaggaacgatggatccgaaccgatcgcagtcagcatggatcctgaatcgttatgccgcccttgttagtgtttacagttatgtaaaaggagaactttctaaaaggagaatttaccatgcagcaatttcacggcagtgacgaatacatcgcttcggatgaactgatccgcagcgttaacattgcggcggcgctcaaaaagccgctcttaatcaagggagaaccgggcactggaaagacgatgctcgcggaggcgattgccagatccctcgatatggaacttttgatctggaatattaaatcgacgacccgcgcacaagacggtctttacgtgtacgatacggtacagcgtctttacgacagccagtttggtgcggacggcgttgatgatattgccagatatatccgcctcggaaagatgggagaggcatttgagaaggaaaagcagacggttcttttgatcgatgagatcgataaagcggatctggaatttccgaacgacctgctctgggaacttgacaagatggaattttacattccagagacgggaaagactgtcaaagcgaagcaccgtccgattgtgattattacctccaatgcggagaaggagctgccggatgcgttcctgcgccgctgtatcttccattatattgcattcccggagcagccgatgatggagaagatcatcaaggcacattacccggatctcgaccagaagctgatcgacggcgtgctggacgccttctaccgggtgcgcgatctgcgcggcctgcagaagaagccgagtacctccgaggtgttggactggattcaggcgcttgtgatcggcggcgtgccggtggaaaagctggaaaaggagatcccgtttgcgggggtactcttaaaaaagacagaggatttaaagctggtggagaataaccgatatgtttactgattttctgtatctactccgttcttacgggatgaagacgagcctcaatgagtggaacagcctgatggatgcgctggaaatgaacctgaacgacgcgagcctgacggagttttactatatggcgagggcggttctggtcaaaaaagagtctgaatatgacaaatttgaccaggcatttctggcatattttaaaaatgtgcagacgtttgaggaacttcctaaggaggtcttagactggcttgccaaggcgcacgcgcagacgccgtatgataaggatgaggtcgatgcgcggtttgcgggacttgatctggacgatatccgtaaaatgatggcggaacgactgaaagagcagcatgagcagcaccacggcggcaataagtggattggaaccggcggtacgtcggcatttggacattccggttacagcccgaagggcatccgcgtgggcggaccgggcaaaaaccggagcgcgctgcaggtggcggaacagcggaattaccgcgatttccgcgacgatgcggttatccagatccggcagttccaggtggcgctcaaaaagctgcgtcttttatcctgccgtgaggatggaccgaaaacggaactcaatgtggagaaaacgatcgagaagacctgtgacgaaggcggacgtctggagctcgtcatggagcgcccgagaaagaaccagacgaagcttctgcttctgatggacagcggcgggtcgatgtgggcatatgcggatctgtgcaaccggctgttccaggcggtcaatcagtcgtcccattttaaggatttgaagatttattatttccacaactgtttctacgatcagctgtttacgacgccgtcctgctcctggagggataagatctcgaccgagtgggtctttcacaacctgaaaccggaatacaaggtaattctggtcggggatgcgtcgatggcgccgtcggaacttctgtaccgcggcggcagtctcgactatttccacagcaacgagcggacaggcatttactggctgcaggagatgcaccggcgttttccgtcggcgatctggctgaacccgatgcgggaaaataactgggcatatgcctacggtgcgtacacgatcagtctgatccgcgaggagattccgatgtttccgttgacggcggcaggacttgaggctggaattaaggaattgaaaaaataaatatggaaaaaggggcgttccccgatattgacaacaaagtaaatttgtgctattattcatcatagactctttgcactgcatatcaaactacagtacaaactgagcagaccgtgaatatcatggggtcgggtcgcagaagcgacagtggaagttagtttcatccacgggacagtagctactcatactggttcgtgggtgtttttttatacttttttatgggtttgcagcacccacctatcgttagtgccatgagatattttttggaggtaacgaatatgaaacagaatgattttcagaaggtggcaaatcaagtgtcttttgtaacgatagtagtgaacatccttttggcgtttatgaagctgttagccggcgtgttcgcacattcgaatgcgatgatcagtgacagtatccattcggcgtccgatgtgttcagcacgatgatcgtggtgattggaattaagctgtcgtccaaacagccggacaaggagcacccgtatggacatgagcggatggagtgtgtggctgcgattgtcctctcgatggttctttttatgacaggtctggggattggcgtggaggcgcttacggacgtgctcaagggagaatacagtcacctgcaggttccggggatgctggcgctggcagcggctgttatatccattgtcagtaaagaagcgatgtactggtacacccgatattatgcgaaaaagattgattccagcgcactgatggcagatgcatggcatcaccgttccgatgcgttttcctcgatcggtgcgctggtcggaatcgtgggcgcgagaatgggatttccggtcatggatccgatcgcgagcctggttattttcgtctttatcgtgaaagcggcgtatgagatttttaaagatgcgatggataaaatggtcgatcattcctgtgatgagaagactgaagaacagctgcgcgcctgcgttcttcagaatccagatgtggcgcggattgacctgcttcagacgcgcatctttggcaataaaatttatgcggacattgagattgaggtagatggttccatgccgctgcgggaggcgcacaagattgccgaggtggtgcataacagcattgaaaagacatttccgaaggtaaaacacattatggtgcatgtcaatccggaaattgaccggaaatagaaagaaggactgccgcagactggcatatgtccttttaagcagaccaagataacaataaaaatcttgtttacttagaagagggcatgccagatgcggcggtccttttggcgcttttgggaacatgaaaattttaaacatttttaaggacgtcctgaaagttatacttcccatttgcaatgaataccatcatactgcaaaatggaaaaactgcaatcatgaatatggaaaaaatgaaagaaaaaggaaagaaaaaaggaaccgttaagaaattcttacgaatcggatcttttgacgatcttttttagaatcggtctggactttttttccgactctgctataataaggattcagaatccatatatacaggccgcagccatatggcgcggcagagaggtttgtgaaaaaatgaaaaataaaagtatgagtatacttaaaatgactggtgcagcagctgcactggtgctgatgtttgcacagccagtactggcagatggcagttttgcaaatggaacaagtgtaaatggcgtcgcagtcggcggaatgagcaatgaggaagcgaaggcaaagctggagcagaattacggttcttataaattaacgattaaagaacgtggaggcaagacagaagagatcaccgcagcggagatcggctataaagtagtgattacaaatgagctgcaggcagcgattgaccagcaggcagcaggggtagctggagcaggagcgctgacgatcgcgatgccgctttcctgcgatcagacgatgcttgcaaaccgcattgcttccttaaattgtatgtcagatagtgtagcgccgacggtagatgcccatatatccgcctgggaagaaggaaaagatttcacgattgttccggaagtaaagggagaatctgtggataaggcaaaggtacagacggcgatcaatgcggcgatcgcctccggcatgacagagatcgatctggaagcattgggatgttacacaccgatccaggtgacttccgacgatgcatccttaaaagcactctgcgcccagatgaaccaggctaaaaatgcgaccatcaccttccatatcggtgatgcaaccgagacactgtccggtactgaatatgtcagctggtatacaggcggcgagaatggcattactgtagaccgcgataaggcagctgcctacatcaaggcgctggcagcgaaatacgacacagctggaactacccgtactttccataccacttccggaaaagaggtagccttgacaggcccttatggatggaagattgaccagactgcagagacagacaatctggttctgatggcgcggacaggtatcaatcaggaacgtgaagtccagttctcccagcaggcagccagccattcagacgcagactggggcaatacctacgcagaagttgatttcggcgcccagcatgtatatatgtatgaaaacggcgccctgacctgggatgctccgtgcgtaaccggaaacgtatccaaaaactacacaaccccggaaggtatttacagcctgacctacaagcaggccgaccgcgttctgcgcggcgccaaacgggcagacggcacatatgaatatgaaagtcacgtagactattggatgccattcaacggcggcatcggtttccatgacgcaagctggagaagtaaattcggcggaaccatctaccagtattccggcagccacggctgcatcaatctgccggttgataaagcaaaacttctctacgagaaagtatacaagggaatgccagttctctgccataactaaacatttcttctaagcgcacattcagtatttagaagaaagacatgggggactttcttgaatatagttagataagaaagtagatggtggacaaagtaatttatcatacggaacgaaaaaagatcctacgccgtcatccagccgcattcatgcgctggatgacaccaggatcttaaattttaccaagttatcatccaataaacaggagaaaaagccgcccgggcaaaaatggaattttcgagactgtggatttacttggcagattcggatttgatgttgaaagaaaccgcaacaaacttgctttgtgaggatttctttctgtttttaatcaaaccgaagatgcctagaaaatcccagtcctcgaaacctgatcatttttgcccgggcggctttttctccgtccctctcacgaaaatcaaactaattatctattttccttccccaataatcaattcttccccatacggcaaagtcttgatccagtcacagaatgtatgccactccgccagcttatgatcctttctggcataataaatattaatcagtgtctcataattaaacgaacaagtccgcatctgattataactgctcggcagcagctggatcatatcataccagtcatccttattctttgtctccagataacgcaggcggatttcctccagcttggcgataactgtttccataaatgcgcgtgttccggctgtcatgtggtcgcagctgaaatcgtccatcgaaaacggtttgctggcgattttgtgcatcgtgctggttgaattggcgacggtcgctactttataagtatcatattctttccaccagtagagaggtgcggtcacatcgactgagacaaatacctggcgcagaaacttgcggtggtcgctgcctgctttgcggagacgtttcgcaaggtcgagatcgttcggtcccagtttatattcgccattctcatcataaaagctgtccatccgtccccagctgttcatcggattgcgggcaccgcgcatggcattttccagattcatgacgctggtacgttctaatttaagcataatcaaactccttttttcatataagtgaattattttcaggataaactcacttttgtgagttgtttcaggcgggatcagtataccacaaaaaccatgtcccgtaaacaaagcataaaaaaacatacagaattacaagaatcgatagttactgttcccgggtggacacttttggaagcaaaagtgccgtaagaaaacgtggtggcagcaggaatttaccgtatttaaatgcgaagccacggcaaattctgttactgggcacgtatgcgtgaacagtaagatcgataaaaattacaatccaaaacagaatacaggaaaaagcaaagatattatgcgatatgcacagaaaaacataatgaaaatatgtatttttaaatatgaaatagtattgacataaaatgaaaaacgtgctaatatttagccatagaaattcactaatatgaaaattgaaaagaaaaaattagattttacgaaaatgaagtgagaaaaaatttcatatcataatcacgaatgagacaaaatctcaaaaaggagagatgagcaatgagcaatggatatttcaaagtagagatgccgaaaaatgagccggtaaaagcatatcttccaggaagcccggagagagccagcttaaagaaagagctggagcgccagtccgcacaggttgttcaggttccgatgatcatcggtggtaaggaagtttggacagagagaaagaccaaagcagttatgccgcatgaccatgctcatgtaatcgcagaagcagcttccggcggtgagaaagagttaaaggatgcaattgcagcagctctggcagccagaaaagcatggaccgagatgccgatggaacaccgcgtatctatcttcttaaaagcagctgatttaatcgctggtccgatgagagataaagtaaatgcagctaccatgttaggacagagcaagaccgcatatcaggctgagattgatacctgcgagctgattgatttccttcgtttcaacgtatactacttacagcagatttatgacagacagccgaacaacacaccgaatgtttggaaccgcatcgagtaccgtccgctggaaggtttcgtaaccgcgatttccccattcaacttcacatccatcggtgctaaccttccgaccgctccggcgatcgcaggtaacgtagttctctggaaaccggctaccacagcagttctttccaactactatgtaatgcaggccctgatggctgcaggacttccggcaggtgttatcaacttcgtaccgagccgtggttctgacatgagcaagtacgtattaagcgatccgaacctggcaggattccatttcacaggttctaccgaagtgttcagcggtgtttactccttagtaggcgagaacatcaagaaatacaaaacatatccgcgtctggttggcgagactggtggaaaggacttcatctttgctcacaattccgcagacgtaccgggtctggtagcagctctgacaagagcatcctacgagtatcagggacagaagtgctccgcagcttcccgtgcatttgttccggcaagcatctggccgcaggttaaagagggtatgctggcagagattgagaagattaaaattggcgatataaccgatttcacaaacctgatgggagctgttatcgatgcatctgcattcaagaccaacaaagagtacatcgactatgcaaaagcatccgaggatgcagaagttatctgcggaggatacgatgattccaagggatatttcatatatccgaccctgattgaggctaagaagccagatttcaagactatggtagaggaaatttttggaccggttatgaccgtatatgtatatccggatgacaaactggatgagactctggcaagctgcgataccgcaacgtcctatggtctgtccggagcaatctttgcagatgaccgcgaagctatcgttaagatggaagatgcacttaaaggaacagccggaaacttctacatcaacgacaagccgaccggtgcagttatcggccagcagccgttcggtggtgcaagagcatccggaaccaacgacaaagccggcagcgagatcaacatgtatcgctggttaagcccgagaaccatcaaagaactcagagtaccgtgcctggatgtaacatatccgtacatggttgaggcataagcagtgcaaagcagggcagtaagacaggaacgttgtgcttgcacataaggaactgtcttgctggactgatttatagggcgcagcccgtccagcgaagaaaagcgcagcttttttgagctggggcactgagcacgctgaagccactgagcatgctggggtgcagctcttccccataatttactaaattaaaaccaaccacccagaggatcggcgctgatccggaatctgtgtaacgaaacacacgatttcatatcggtgccgatcctttttataatttagaaaatctgtccgagtatcccagccacacccgctcagatattgttccgtttgtttggaatgaaattgcggcattctgttattaaaaatcccattatgttactgctcacacatgtgtgcccagcaacgggattttgccgatgctgcgcattccaaatcggcaaaatctgctgcgagaactgtatcgtacagaattttcagttcagaaaattcctatttgtgaacagttaccctattattccttacattcatctgatttgaaccagtccttgtatttttcataaagatccagtaaaatcaaatacgaaatatggatttgaggatttgtttttgttcaaattttctcggttcgattttaaattcaaacaaaaaggatgagaaagcaatgacggtgatcgatgtatctggctgcggaagcggtgcggtgtttttgataaagggaaaagccaatctcctgttcgaggcggggatggcgtatgctgccgatcagatggtggaaaatataaaaagagaactgggcgatgcagagttagacgcggttcttttatcccattcccattatgatcatgtagcggggcttccggcggtgcggaaagcatggccgggggtgaaagcatatgcttccgagcgcgcaaaagaaattttagtgaaaccgggcgctttgaagacgatccggcgtctaagcggcgaggcggcagaagcggcggggcttccatgggattcggaatatgacgatgcagatttacagattgatgtatcgctggaggacggtgagacgatcgaactgggcgaccatacgatctacgcgtttgcgacgatcggccacacgaaatgttccatgtcttacctgattgacgatgagttgatgctgtgcagtgaaacggtaggcgtcatggggcatgatgggagttatatgccgtcgtttctggtagactataaggcggcagaagaatccatcgagtattcatcggaattggatgcaaaagagattattttaaaccactatggctttgtcagtgaagcggataaggcgacgatctgggatgtcctgatgcagaagcttcgtgacagccgtgatgcaatgattgatattatgaaccggttcccggaagaagagacggcgcttcgggagatggagcgcgtgttccattctcatgtagataagaaagaacagccagacgaggcattctatatcaatgcggcgagcatgatgaagacactcaaaagacagtttccggaacggtttccgagacattttcagctgattgcggcagtggatcggaactggggtatcggcaataaagggcagatgctgacggtgatcccggtggatcagaaattattccggcaggaaacgatgggaaaaatcatcgtgatgggctataaaacgtttctgactttcccggctcagcgaccgctggatggcagaatcaacctgattttgacaaaaaagaaggctctgagcgtaaagggggcagagatctgccacagtgtcgaggaggcgctggtgcggattgacgagctgaaacaggaaaaacatctgacagatgtagatgtcgtcatcatcggcggcgagtcgatttaccggcagttccttccgttctgcgacacagcgcagatcacctggattgatttttcctatgtggcagacacacatatggttgatctggagaaagaaggctgggaactggtaagacgaagcggcgagcagacatttttcaatttgtgctatgaattcagggaatatcggaagctggaaaaggaatcgctctaaggttgtcaaaaataggacaaagtggtaaaataattgagaattctgaaaagtcaaacaataaaatgttcatataactgtaaggaggaatagaatgtacccgattttaaaagctgaaaaactggcagataagatttatctgatggttgtagaagcaccgcgtgtagcgcgtgcatgtgagccgggcgaatttgtcatcgtcaagatgggcgaagagggcgagagaatcccgctgactatttgtgattttgatcgtcaggcaggaacgatcacgatcgtattccagaccgtgggagcttctaccgagaagatgagcaccctcaaggctggggatgcattccatgatttcgtaggaccgcttggaaatccgtccgagtttatccatgaggatgtagaagagctgaaaaagaagaaatacctcttcgtagccggcggtgtcggtgcggctccggtttatccgcaggtaaaatggatgcatgagcacggcattgatgtagatgttatcgtaggttctaagaccaaagatctgctgatcctgaccgaggagatggagaaggcagccggaaacctttacatcacaaccgatgatggcagctttggcattaaaggtatggttacaggtgtcatcgaggatttagttgaaaaacagggacgcaagtacgatgtctgtgttgcaatcggaccgatgatcatgatgaaatttgtctgcctgctgacgaaaaaactggagattccgacgattgtcagcctgaacccgatcatggtagatggaaccggtatgtgtggtgcctgtcgtgtcaccgtaggcgaccaggtcaaatttgcctgcgtagacggaccggagtttgatggacatcttgttaattttgacgaggcgatggaacgtcagagaatttataagactcaggaaggcagagcgatgctgcgcttgaaagagggcgatactcatcacggcggatgcggacagtgcggaggtgacaaataatggaagcaaagagagatatgatgaaaaaggtgccggtcagagagcaggatccgaaggtacgtgcgactaattttaaagaggtatgtctcggctataatatggaagaagcagttgcggagtctgagagatgtctgaactgtaaaaatgcaaaatgtatcgctggatgcccggtttccatcaatattccggcgtttatccaggaagtaaaagcgggaaatattgaggaggcagcgaaagtcatcgcactttcttcggcacttccggcagtctgtggacgtgtctgcccacaggaatcccagtgtgagggacagtgtgtgcgcggtatcaagggcgaggcggtttccattggtaaacttgagcgcttcgtggcagactggtcccgtgagcatggttttgtaccggcagcgccggagaagacaaacggaaagaaagtagcagtcatcggttccggtcctgcaggtctgacctgtgcaggcgatctggcaaaactgggctatgaagtaaccattttcgaggcacttcatgagccgggcggagtattgacctacggcattccggagttccgtcttccgaaggacggcgttgtacagccggagatcgagaatgtccgcaagctgggcgttaagattgagacaaacgtagttatcggaaaatctatcacaatcgacgaactgatggatgaagaaggtttccaggcagtattcatcggttctggcgccggacttccgaagttcatgggtattccgggtgaaaatgccaacggcgtattttctgcgaatgagtacctgaccagaaataacctgatgaaggcattccgcgatgattatgacacaccgatcatggaatcaaagaaggtagtcgtagtcggcggcggaaacgtagcgatggatgcggcaagaacggctcttcgtctcggtgcagaagttcatattgtatatagaagaagtgagaaagagcttccggcacgtgtggaggaagtacatcacgcaaaagaggagggcatccattttgaccttctgaccaacccggttgagattctcgaggatgagaacggatgggtcaaaggcatcgtatgccgccgtatggagcttggcgagccggatgaatctggaagaagacgtccggttgaggtggtcggttctgatttcacgatcgatgcagatactgttatcatggcgctgggtacttccccgaacccgctgatttccaatacgaccaaaggtctggagatcaaccgctggagatgtatcgtggcggatgagagcaatggaaagacaacgaaagagggcgtttacgccggaggcgacgcagtgactggcgcggctacggttattctcgcgatggaagccggacgagcaggtgcaagaggcatcgacgagtatctttctgcaaaataatgaaatctcatcatgtagatttgctgaatgaagcaatcgccccggcactgacccggctggcgcttccgatcatggcgacctctctggttcagatgctttacaatctgactgatatggcgtggatcggacgcctcggggcaggtgctgtcacggcggtgggatcggcaggtatgtatacctggttttcccagggatttgcgattttggcgagaacgggcggtcaggtaaagaccgcccattgtcttggtgcgggagaaaatgacagtgcggcgcagtatgcgagaggtgcgctgcagctggggattttgtttgccgtgctgtatgggctggtttcgctctttggagccagtcggttaattggattttttaaattaaacagcccggaggtgattgcacaggcagaatggtatgtgcggatcgcctgtgggcttgtgatcttttcttatctaaatgcgatcttgaccggacttttgacggcggcgggaaacagccggactccgtttatcgtcaacgtggcggggcttgtattcaatgttgtactggatccagtgctgatctttggaatcggaccatttccggaactgggagtcagcggagcagcggctgcgacggtcacggcacaggcgctcgtaagcctcctgtttttcaaggcagtcctgcgggaaaaggtgctgtttccgcatctgcgtctctgggtgctggttccagtgaaggtttggagggagatcgtgcggatcggtgtgccgtcggcggtgcagaacctgatttacgcaggaatttcgatgattctgacccgccttatcaccggatggggtgatctggcagtggcggcacagcgtgttggcagtcagattgaatccgtttcctggatggtcggagatggcttttcggcggcagtcaatgcattcctcggacagaattatggggcgaagcggtatgaccgtgtgcgccgcggctatttctgtgcgatcgcgatgacggcggcgtggggactctgcacgacatttttgctgatcggaatggcgcgtccgctgttctcgatctttttgcaggaagaagaggtcatggcgctcggcgtcaattacctgcggatcgtgggactgagccagatgtttatgatggtggaacagacctcgatcggtgcgttttccggtctggggcggacgctgtatccgtcgatcgtcagcgtgacctttacctccgcgcgcatcccagtggcggtgttgttgtcctctgtgatgggacttagcggtatctggtgggcgttaagtatttccagcatggtaaagggatgtattctgttcgttagttttgtcgtgtttttgtatgtttttttggagagaaagaagattgagaaaaccgtctgaaaagttacaaaaaacctatggacgaattgagaatttcgtgagataatagggacaggattgatgtgataaaattaacaaagtacaaaatccaatcatttcgaaaggagtcttacaatgatttattcacaagaagtagaaaatatgtgtccagtagcccagggcgtaaatcacggcgctgctccgatcccggaggaagcaaagtgggttaagtccaaagaagtaaaggatatttccggtttaacacacggtgttggctggtgtgcgccgcagcagggtgcttgtaagctgaccctgaatgttaaggaaggtatcattcaggaggctctggtagagacgatcggatgttctggtatgacacattctgcagcgatggcagcagagattcttccgggaagaaccgtactggaagcattaaatacagaccttgtctgtgatgcaatcaacaccgccatgcgtgagctgttcctccagatcgcatatggcagaacgcagagtgcgttttctgaagaggggcttccgattggtgccggccttgaagaccttggaaaaggactccgctctcaggtaggtacgatgtacggaactctgaaaaaaggtccgcgttaccttgagatggcagaaggctatgtaacaggaattgcactggatgaagaagatcagatcattggttaccagtttgtaaacttaggtaagatgaccgacttcatcaagaagggcgacgatccgaccactgcatatgagaaggcaaaaggtcagtacggccgtgtagacgatgcagttaagattatcgatccgagacaggaataattgttattgtacatagataggaattttctgaactgaaaattccgtacgatacatttctgacatcggagtttgccgatttggaatgcgaagcatcggcaaaattgcgttgctgggcacgtatgcgtgaacagtaacaaataatcacagggtacatagttaaggaggaacatcacaatggcattatttgaatcatacgagagacgaattgacaagatcaattccgtattaaatagctatggcattgcttcgatcgaagaagctgagaagatcacgaaggatgccggactggatgtatacgatcaggtaaagaagatccagccaatctgttttgaaaatgcgtgctgggcttacacggtaggcgcggcaatcgcaatcaagaaaggctgccgcagagctgccgatgcggcggcagcgatcggcgagggactgcaggcattctgtattccgggttccgtagcagatcagcgtaaagtaggtctgggacatggaaacttaggtaagatgcttctggaagaagagaccgactgcttctgcttcctggcaggtcatgagtcctttgcagccgcagagggtgcgatcggtatcgcagagaaagcaaacaaagtccgtaaaaaaccgcttcgcgttatcttaaacggtcttggcaaagatgcggctcagatcatttcccgtatcaacggctttacatatgtagagacagagatggattattacacaggcgaagtgaaagaactgtggagaaaatcttactccaagggacttcgtgcgaaagtaaactgttatggtgcaaatgacgttaccgagggtgtagcgatcatgtggaaagagggcgtagacgtttccatcaccggtaactccaccaacccgacccgtttccagcatccggtagcaggtacatataagaaggaatgcgtagagaaaggcaagaaatacttctccgtagcatccggcggcggtacgggacgtacccttcacccggataacatggcagcaggtccggcttcttacggtatgactgataccatgggacgtatgcactccgatgcacagttcgcaggatcttcctccgtaccggctcacgtagagatgatgggtctgatcggtatgggtaataacccgatggttggcgctactgtggcggttgcagtttcgattgaggaagcagctacagctggaaaattctaaaaaatattgatttttcaagggttttaagggtggttagatgtggtaaaaagcagtaaaaagtacatcatttgttaattacttgttaactatttgttaaccatacttgttaacctaagaagagtgggaaaaggggtcgatttcgatcccttttctcgtgagagcgtttggttccttttatgatgtattgtaatcctagttactgttcacgggtaggcacttttggaaccgaaagtgccgtaagaaaacgtggtggcagcaggaatttgccgtatttaaatgcgaagccacggcaaattccgttactgggcacgtatgcgtgaacagtaactaatcctacatattttatatggttccgaggaagcgtagcttgtacctttcctaagaacatggtatcataaaaccagtatatggatgaaactgcttttatcagggcagtttcgaagaaaaggggaaacgatataatgtataaggatgatacgattctggttgtaggtcaggcgaaaccgagcaaggaggacgcgatttacagcctgcacggcgagttttatgtgagttttgtagtagaacgggcgacgggaaagattcttgatctggagtgcaatacgattttgtcggtgacgcgcaattttgttgtgtcgatgctgcttggaaagagtttgaaaacggatttggacgagatgcagcagagtatccgggaaaggtattttgcactgactcagaagccgctcattgcctgtctgaaggacgcacataaccgttatatgatggtgacagggcagaagtgatgtgggtattggcggtgtgcttgtataaactataaaggcacggtgctgataaaacgattggcagagaattaacagaataaagatggcagctcatcagcagaaattgatgggctgccattttggttatcatagaaacgtattctacaacattattcttttccgttccagcaatacgtacacagcttgcacggttccagaccaatcgactcgattaaatcgtcgaggcggtggaactgcagggaggtaaagtttaagcgtttacggatttcttcgaccatttccttataattctggctgtctgggtttgcataatcatccagaagctccggggaaacattgtcgccctcacggtcgcggatgatgcggcgtgtgatgaggtccagctcggaattggagcgggagaagttcagatatttacatccaaacagcagcggcggacaagccggacggatatgtactgctttggcaccgctctgatacagaaattcggttgtttcgccgagctgggtgccgcggacgatggaatcgtcgattaagagcagactcttgtcgcggatcagggcgtctaccgggatcagcttcatacgtgcgatcaggtttctctggctctgggtggtcggcatgaaggaacgcggccaggttggggtatatttaatgaatggacgggcaaatggaatgccggattcattggcgtagccgactgcatgcgcgataccggaatcggggattccggctaccagatcggcgtcggactgatcgcgtttggcaagcatacgaccgcagtggtaccgcatttcctcgacgttgattccttcgtagcaggaggtcggataaccgtagtaaacccacaagaaagaacagattttcatttccttgcgagccgggctgagtacctctacgccgtcggcgttcatgcggacgatctcgcccggtcccagttctttgtagtccgtgtatccaaggttgatgtatgcaaagctttcaaaggaaacacagaacgcaccatctttgcgtccgatgatcgccggggtacgtccgaggcggtcacgggagatatagatgccctccggggtcagcaggagaatggtcatggaacccttgattttttcctgtgccagtttcagaccttcaacaagggaatctgcctgactgatgatggcgccgaccagctcggttgcattgatcttgccgccgctcatttccatgaaatgaatatgcccgttcttaaatgcttcctgaatcagctctttttcattattgatcttgccgactgtggtaatggcatagcttcctaagtgcgactgaattaacagaggctgcggttccatatctgagatacagccgatgcccatgttaccctgcatttcatcgacatcgtgctcaaattttgtacggaacggggaattctcgatattgtggatagaacggctgaaaccgttttctccataaaccgccataccaccgcgtcgtgttcccagatgggaatgatagtccgtaccaaaaaaaagatccagtgtacagtttgtttttgatgtgacaccaaaaaatccgcccatttgttacttcctttcaactcttttgtcaataaactccatgtgttacgttgcacgcgttgtgatgcgtaacgacatcatttttatcatagcatatattaggtgtattacacaatatgaaatatttattaaaaatacttatgaatattctttggagctgtttacaggcaggcacatttgggatcgaaagcgtcataagagaacgtggaggtagcaggaatttgccgtatttaaatgcgaaaccacgtcaaattccgttaccgggcacgtatgcgtgaacactaaccttgtcagaaaaatgtaagaagtaaaatgggacgaagtgttcttaataaaggaagagtgtgatataataaaaccattgtacgtgagtatgtcacatggtcggctgttccggattgcatcggaatggcagaagaaaaagaaaacaatttggagggtttggagcggtatgagaaaaacatggaaaatgagagcagcagcactgttacttacggcggtctgtacggtaggggcgtcgtttgcggcgtatgcggatgatgtgccgtccggaccggcatcggatatggagctgattcagaggcgggagcaggcgtccggttcccagaatgaggcgggggatgcacagacggctgctggcagcgagaatcatgctggcgcagcggaaggacagcagacaacagagaaccaggagacaggaaataacggacagactgcttctgagacacagggaacggagcagggggacagccaggttccggatggaatggtagccagcggcggtcgttatatcgatccgaatgcaccgatggtggcactgacctttgatgatggtccgtatgccccggttggaaaccgcatcatggattgcgcggaacagtacggcggccgtgtgaccttttatgtggtcggaaaccgtgtgaattcctataagagtgagattcagcggatgtatgccaatgggcatgagattggaaatcacacgcaggatcacaagtatctccagaagttaggcgcacaggagattcgtcagcaggtggaggcctgcaatcaggcggttgccgcgatcacaggcgaggcaccgaaaacagtccgtcttccgggcggtggaaaaaacagcactgtgcttgccaatatcagccagccgatcgtactctgggatgtggatacgctggactggaagacgcgcaatgcggcttcatcggtgcagaccgtgttaaaccaggtaaaagatggctcggtggttctgatgcatgagctttacaatgcttccggtgatgcggcagtcacgatcattccggcgcttgtggagcgtggctatcagctggtgacggtcagtgagctggcgcagttccgcggtggactggcaggcggaaccgtctattacagcttccacaaataagaggctgcattcacatacggcgaaagcccccatattctaacagtaagggaagaatatgggggctttttcctgtgaaccgggcgagagaatggattcattgcaatgaggcgtacagacgaggactgacaggaaaaggcgtcggggtggcgatcctggacacaggggtatttctgcatccggatttggaaaattgcgtttacggatttcgggatttccttaagaaaaagcagcagccgtatgatgacaatgggcatggaacgcatgtggcagggatgattgccggcagcggcacggcgtcggcgggacgctatcagggtgtggcgccgggggcgcagctggtctgcctgaaagtgctggatcagaggggaaatgggtatgtatcggatgtgctggcagggcttcgctgggtgcgccagaatggcagccagtacgggatccggattatcaatatatcggttggctcctttacaccgaagggaatgagcgaggattcggcgctggtgcgcggtgtcgatgcggcgtgggatgccgggtatgtggtcgtggtggcagcgggaaataatggtccagccgcgcacacgatcacaacgccggggatcagccggaaggtcatcacggtgggatgtgcggatgatgaccgggaggtagaggtggcaggcagccggatggtggactattcggggcgggggccgacggacgcctgcatctgcaagccggacattgtggcgcctggatcacggattgtgagctgtaacctgcggcggaacgggtaccgttttaaaagcgggacgtccatgtctacgccgcttgtcgcgggggcggcggcgcttctgctggagcagaacccggacatgacgaaccgggatgtgaagcttcgctttaaagagcgggcagtggatctggggctgccgcgcaaccagcagggctggggggcgctggatatcgggcggctgttagagtagaagcggggcggtgccagatgacgtgtacaggcaggcatttttgcaacggaaggttttgtgtgaacagtaatggtggcagcgtaactgttcacaggtaggaatttcctgaactgaaaattccgtacgacacagttcgggtagcagcttttctcggcaaaataatagacagaaccagccggaaaatgatataattgtagatactttgaatcgcagaatcaggttatagatccggcagcatcctgcagtgcgtccgggggaaaaccaaaagaaaacagttgacatttacagccggatccgctatgatagagctaagtttagaacgtttgttcgtgattggccgcggagcggcgctttggagggaaagatgaataaagaagacaagctgaaagcattggatgctgcgttgacacagattgagaaagcatacggaaaaggctcggtgatgaagctgggtgattctggtgcgaatatgaatatagagacgattccgaccggctccctgagcctggatattgcactgggactgggcggtgttccgaagggacgaatcatcgaggtatacggaccggagtccagtggtaagacgacggttgccctgcatatggtggcagaagtacagaagagaggcggtatcgctggatttatcgatgcagagcatgcactcgatccggcatatgcgaagaagatcggtgttgatatcgataatctgtatatctcccagccggacaacggcgagcaggcgcttgagattaccgagacgatggtgcgctccggtgcgatcgatatcgtgattgtggactcggttgccgcactggttccgaaggcagagattgacggtgagatgggtgattcccacgtaggtctgcaggcacgtctgatgtcgcaggcactcagaaagctgaccgcagcaatcagccgttcaaattgtatcgttatctttatcaaccagctgcgtgagaaggttggtatcatgttcggaaacccggaggttacgaccggtggacgggcactcaagttctattcttctgtccgcatggatgtccgccggattgagtctctgaagcagggcggcgaagtgattggaaaccgtgtccgcatcaaggttgtgaagaacaagattgctccgccattccgtgaggcagagtttgatatcatgttcggaaaaggtatttcccgtgagggcgatatcctggatctggcggcgaaggagaacatcgtggagaagagcggcgcctggtatgcttatgagggcagcaagatcggtcagggacgcgagaacgcgaagaatttcctggcagcaaatccggaaatctgccttgagattgagaacaaggtacgtgtcaaatacggactttccgaagacacgatgatgccggaggcgtccaaggaagcaccgacggagcttccgccggtaggagtggacgcagaggacgaaaaatagagtaaaatcctgttacagggcacatatgtgtgaacagtaacaggaaaagttacagctggcaacgtgtgaactgtagctatgaaaaggggctgtatatgcggattgaacgcgtagaatccctggataagagaaagtgcaaagttttcacggatgaggactttgcctttcttttatataatggggaattagaaaaatacggtgtctgtgagggcgcggttttggaagaaagaacggagagggagcttttggatcttttaagccgccgggcacatgagcgggcgctgaatcttttgaaggtgcaggaccggacggaaggagaaatgtgccgccgccttttccaggacgggtatccggattcgatcgtgcaggagacgattggatttttgcaggaatatcattttgtggacgatgccagatatgcggcgaattacctgcaggttcatggaacgcggaaaagccaggcggaattgaagctttacctgcagcgaaaaggcatatcgcgcgagatcatccgggagcagctggaagagacagaacatgattcgggcgaggcaatccgcgttttgcttgagaagaagcattacagggcgggagagacagcgccggaggaggaaaaaaagatcattgcctatctgatgaggcggggattttcatgggaagatatccggagagagatgaaggagcgggaggatgcatttagttgactttcaggcgcagagtcatttaccaaagatgattttgaatggattttgtttcatgactgtgaacgtgcaaatgtattatgaaacagaacagaacgctgtctgaaggtgtcccaggaagctggttaggaagcgcttattctgcttgacatactgtataaaaccgtttaaaattatagtattgtattttcgtacaatgaaaactaaataaggaggtgctcctgtgtcacaagtaataattgcggttatcgttacaggtgttattgtagcagctattacttgggtcgttgcgaaccagcatcgccagaagacatatgaggcgaagattggaagcgcagaagaacgatccagggaaataatagatgaagcattgaaaattgctgagacaaagaagcgagaagctctccttgaagcgaaggaagagtcgttaaagacaaagaatgagcttgagaaagaaacaaaggaaagaagagctgagcttcagcgctatgaaagacgtgtactgagcaaagaagaaaacctggacaaaaaagcagaagcgatggaaaagcgtgaagcgggtatgaatgtcaaggaggaggcacttaagagaaagactgcggaggcagaggctctctatgagaaaggtatgctggaactggagaagatctccggtttaacctctgaacaggcaaaggaatatctgctgcgttccgtggaagaagatgtaaagcatgatacggcgaagctgatcaaagatctcgaggcgaaagcgaaagaggaagcagagaagaaagccaaggattatgtggtgacagcgattcagcgctgtgctgcggatcatgtggctgagacaaccgtatcagtcgtacagcttccgaatgatgagatgaagggacgaattatcggacgtgagggaagaaatattcgtacactggagactctgacgggcgtggaactgatcatcgacgatacgccggaggcagttgtcctgtctggcttcgatccaatccggagagaggtagcgcgtattgcactggaacgtctgattgtggatggacggattcatccagccagaatcgaagagatggtagagaaggcacagaaagaagtggaaaacatgatgcgcgaggagggcgaagcggctcttctggaagttggcattcatggtatccatccggaacttgtcaagctgcttggtaagatgaaattccggacaagctacggtcagaatgcattgaagcattcgattgaggttgcacagttagccggacttctggcggctgaggtgggcgtcgatgtacggaccgccaaacgtgcaggtttattacatgatattggaaaggcagtcgatcacgagcaggagggaacccacgtagaactgggtgtggcgctctgtaagaagtacaaagagtccgcaaccgttatcaatgcagtggaagcccatcacggcgatgtagagccacagagcttgattgcatgtctggtacaggcagctgatacgatttcagcggcacgtccaggtgcgagacgagagactctggaaacatataccaaccgtctgaaacagctggaggatatcacgaactcctataagggtgttgataaatcctacgcaattcaggcaggtcgcgaggtgcgtatcatggttgtaccggaacaggtcagcgacgatgatatggttctgatggcgagagagatttcaaagcggattcaggaagagttacagtatccgggacagatcaaggtcaatgtaatccgtgaatcgagagttaccgagtacgccaaataaaacccggcagcagggctgcatggagtaaacttgagcatgaaaataaaagtcttatggatgaagatacattacattcataagacttttttgtttcatgggaaattgcgtcctatgaaacaaaaaaacgctccgcgaggatgcgcgctcgcgcgaagcagaaacatgtcgcaagcgaccgcgcgagacgcccgaatgtgccaaagcacattctttacatcttttttgagagagaaagaaatacagaaaaatacagtttttttttcatgaagcggaaaacggaaactctgtttttcggacagactgaaaatttgcatgagcagggtaaaataaagggtcgtgagcgtgaaggcaggcggagaaattttgcttgcaaactgtccaaaagacgagtattatagcatgatagagttgaaaaatagtgattatttagcagcttcatgcatttattgtggcgtaatggtaagaagattgaaccgttatcaagatgctgaatagaaagccagatgtggctgttggaaagagcagctgcagtcagacaacaaatggaggctcatccggcagggaagtgccggatggcagatggagggagacaaagattatggcgaaaattggttttatcggaatgggaaatatcggctatgcgatcatgcgaagcctgctgaacaaatataaaacggaagacatcacttttacggatctgaaccgccggagagtggcacagatagagaaagagacaggtgtcaaggcggttgacacaaaccaggattgtgcggaaaatgcaaaatatatcgtattagctataaaaccgcagttttatgacaatgtactggcagatatcaaggaccatgtaacgaaagaaaatattattatttcgattgcaccgggtatcacgattgacagtgtcaacgagaagctgggcggtgaccgccgtatcgtgcgtgcgatgccgaacacgccggcgctgatcggcgagggtatgacaggtgtctgctacgacaagaagctgtttgaagagacagaaaagcagatgatcagcaatttctttgaatcttttggtatgatggagatcgttccggaatatatgatgaatgcggttgtatgtatcagttccagtgcaccggcatacatctatatgttcatcgaggcgctggcagatgcgggcgttaagtacggcatgccgcgagatgtggcttaccggatggcggcgcagggcgttgtcggcagtgcgaagatggtactcgagaccggcaagcatccgggcgcactcaaagatgatgtctgctcgccgggcggtacgacgatctacgcggtcagcgtcctggaggagtatggtttgcggaatgcggttatcaaggcatgtgacgcatgctatgagaagtgcatcgacctgaaatagtgaaaaaatgttgaaaaagaacccagaaggaacctggatataagggtgagaaaatatggaacagaaagtagaaaagcaggcatcgctggagtccgtgccggtcaaacgcctgaaacgagagttaaaatatcagggaaccatcttgaaaatgtacgaagataccgtcgaggtaaacggacatcaggcaaaatgggattttatccatcatgacggcgcggcagcggtgcttccggttacggaggatggaaagattctcatggtgcgtcagtaccgcaatgcgctggaccgctatacactggagattccggctggtaagctggattcgccggatgaggcgaagattgactgcgcgtaccgcgagctggaggaggagacgggctaccgttgtgaccatctggaatatctgatgagcgtcaacacaacgatcgcgttctgtgatgaggcgctggatatttttctggcacgcgatctcaagaaaacccatcagcatcttgacccggacgaggagattgagatagaggcgtgggaactttccgaccttttgaaacggatctacgcaggagagctgacggatggaaagactgtgtccgcgattctggcgtatgcctgcaaagcaggacagaagtaaaaataaggatcagcgaagcactgtgagcatctgtgatgaaataaatatatggattaaacgctgaaagacgcatgaagctaacagcatatagaggcagatataaaggcatattataaaaaacactgaatacagataaggtaacaaaggaataggcagggattgcatgtgaaaaggagattccggcttccggctttaagtacctgggatgtatcagtgtttttttggatccttgggattgtattggggacgatagcagccgtttgttttcaaatttcgtccgggagcggacatgccgggctggaaagtgtgctggcagcgaggcttggacaagaaattggagatccatcgggtgccgggtggcatctaaacgccggaatgaaggcagccagccggggaactttgttttttcaggtctggctgcagcggtcagggatggcgctgatgctgtggctggcaggtatgacgccggtcgcatgcctggctgcgtggggtgcttgtctcgtcttaggtctggagcaggcatggctgctggcaggatttactggccggggcggtttttggggactgcctgtatttgtggcgacgttatttccacaggtggtgttttatattcctgtgttctggctgcttctttcctgggcgcttgcaaaggagaggcggatacggacggctggatttttaatccttttattggtgctggggatgggaactgcgctggaagtgtggctgaatcctggttttgtatcattactggtctcacactgcccattttaatggggctgtccgaataaaaatataattcaaaatttacaacatatgggggtaaaaaaagtggacgcaccatatgttgtatttttatgtaaatcagtcgaaaaatgtaggaaaagtggggaaaattatgtttgattttatgggaaaatgtagatataatgatacctgcggacgataaaagccctgtttgtggagaagaaggtaagttgcagatagggtgagaaaacctcaggagaatggatggtttggatggagaaatcgataggattgtcgcggaacgatatttgccctgtaggctggggctttggcagaaaatgccgtgaataaaagaatggcggaaatggttacgagaatagattggggaagtatgagaggggaagtagacagatttgaacagtacctgcgggaggtaaaacaggcatcggaaaataccgtacagtcatatcggagagatctgatgcagatgattacttatctggaggagaaagagatccgggaggcggcgaaggtgacaaagaccagcctgcatggatatattcttcatatggaagagcagggaaaggcggctaccaccatttcgcggatgatggcggcgatgaaagcgttttttaattatgaatgtatgcaggcatgcatccggcggaacccggcggaaagtctgcatgcgccgaaagtggagaaaaaggcgccggtggtcctgagtgtcgatcaggtatcagcgcttctggcacagccatccgggcagacaccgaaggagattcgggacaaggcgatgctggctcttttatatgcgaccggaatccgggtgtcagagcttatagggatccagatggaagatatcaatatgaacattggatttctggtctgtcgcgacggggagagggagcggacgatcccatttggacgttcggcgaaagcagcgctggaggagtatttggaacatgcgagaaacgagctgctgcgtggaaagggatcggactatttctttgtcaactgtacaggcggcgcgatgagccggcagggattctggaagattatcaaatattacggtgagaaagccgggattgaggaagatatcacgccgcacacgctgcgccattcctttgcggcgcacctgattgcgagaggtgcagacatgcgggcggttcagacgattcttggacattcggatatggcgacgacgcagatgtatgcggcgtaccgggaagattgaaaaatatcatataaattataaaaataaagcacctgttttgtgaaagacttgacaaaacaggtgctttattatgcgctttagtggtttaaagtgcaaacgtttaacgcagatgaggaaatgtgaaggagaaagacaatggagcaagtacatttaaagtacggaacgtcggcggtcgattttgaggttgacggagcgaagagtgtaaaatacctgtatgaaaataagatgcgggtcattgaagatataaaagcagaatttctgcattgtgtgacggatggtgtgattggcacgaagccgttaaaggaattgattgcaccgaccgatccggttacgatcgtgatcagtgatatgacgcgtttctggatgcgtcaggacgtgatctgcgagcttctggtaaaatatctgcacgatgagatgggcgtgggatatgaccagattgcggttgtggttgcactgggaacacaccgcaagaatacggcggaggaccgcagaaaacttgcaagcgagtttgtctacgaccatgtagcgagcgtgactgaccatgactgtgatgcgtcggatctggtatacatcggtacgacgtccttcggaacgcgtgtatcggtcaatccgctggcagtcggcagaaaggtcatctgcatcggcggtacggtgcaccatctgatggcaggctacggcggcggaagaaagagcatcgttccaggtattgcttcccgtgagacgatccgcatgaaccatgagcgtgcgttggatccggagaaaccgatgacggatgtgcgtgtcggcagcggtttggtggagaacaacccgatcaatctggatatgcgcgaggcaggtgccatggtgcatgttacgttcggtatcaatatcgtggtagatacgtcttcccgccacagcggtttattctgtggtgagtttgacaaggcatggcaggcaagctgcagttatgtacagaagggatacggactgccgatcgactatcaggcagatgtcgtaattgcaagctgcggcggtttcccgaaggatctgaatttttatcagtccaccaagacgctgtttaacgcatcgagagcggtcaaagagggcggtacactcattatgctggcggaatgcccggagggaagcggttccaaggatttcttcgactggattaagcctttctctaagggatgcctggatgaggcactgcgtgcgtctttcaccatcggtggctatattttctacgtagcctgcgagtccatccgtcgttcgaagacgctgcttctgtcttccatggagccggagctggttcgggatatgggcgtaagatcgtttaaagatatgaaggatctgctggcagaggtagactttaacggaaaagatgtatatgtaattccgtacggcggaagcgtgctcccgcagacaaaggaagcctacgagcgtatttgccgcgaggcagaggaaaatggaggcgcgaagtaatgaatattccgctgctaattgttattttatatgtgcttctgctgtttggcatcagtatctatgtgtcttacagccagaaaaaggattcagagaacttccttttatataaaggaaaaaataatgcgtttgtcgtggcagctagtatcgcgggtctggcgatcggcggcgcttcgacgatcggtatcgcggagaacgcttttaccgtggggctgtcggcaggctggtatgatacagcatgggcgatcggcgcggttgtttcttctatgctggcagtccgttacctgcgtagaagccagtacacgaccatcagcggtcttgtaagggacctctatggcacaaagacgaaaatagaagagccaaaaatagaagagtttaaagtaaaaaagaacgtcaaacccaagcgaaaaacttagaatttgacgttctttttgcatatttatattcgattcgatgctactcaaccgtcccggcgtctttgatataggaaatgaaactcttcttgatcgaggtcacgatttctttgcattgtgtatattcttcgctgtcgctggcatactgctcgtcgtagtgcggatccagaatgaagatcttgttgccgcagaagcctaagatggtgcagccgtttaaatcgcggtaatgcgtgtcctcaaatgcgagaatgcggaagagaagtccgcctccgttggcttcataggctgttttttcatatacctcgtaggaatccccgctcggaaccatgatgagtctcgaaaatgcctgggatggaagtttgaatgaaaaatcgtcggtaattactttggagccggtcagctcgatggagaggttgtccgggtcctcctgagaaaaactcacaacctgtgcggaataatcagctgcataagacggcgtcacgtagagagccgcagccagagccgcgcagaggaataattttgatttcatcctgagatctccttttagtctgtctttttgttcccctatatagaagataggctatggaatccatagcctatcttaaactccatataaatttattatagcacagacgtctttaaaagtcagctggaaattttatccaaaatcatccaattctcgaatcttttttcccttctgacaggttcttctgtgcggtggaaagcatcagtttgatacgattcaactgattgacttcactggcacccggatcgtagtctacggcgatgatattcgcctctggatggctggcgcgcagttccttgatgacgccttttccgacgatgtggttcggcaggcagccgaacggctgggtgcagatgatgttcgtcgtgccgctgtgaatcagttccagcatctcgccggtcaggaaccatccctcgccggtctgattgccgagggaaacgtaatgcttcgccatcgacgccagatcctgaatccgtgcaggcggaaggaaatgtgtgctgcgttccagttcgcggcggcaggtgcggcggaaatactccagcagggagattcccatgttgcacaggtgtgcggtggaacgtttgccgcccagattgtcggctttgaagttgctgttgtagaagcagtaaagcaggaaatcaagcagatccggcattacagcctcggcaccctcggcttccagaagctctaccacgtggttgtttgctaacggggagaattttaccaggatctcgccgacaatgccaaccctcggtttttggacattgcgtcttggaagttcgtcgaagtcatgaacaataccgcggatgttgcggttaaactctgccatggataaagaacgtttctgcagtgatttgatgcagattgctttccatttctcatgcagggcgttggcggagccggcttttgcttcgtatgggcgggtcgcatagagaacacgcatgaagaggtcgccgtagacaaccgcctgcattgctttggtaagaagcggcagggtgattttaaagcccggattcgtctccatgccgttggcatttaacgagataaccggaatctgcggcataccggcgcgctctaaggcacggcggataaagccgatatagttggaagcacggcagccgccgccggtctggctcatgataacggctgtgtgctctaagtcgtatttgccggagagcagcgcatccatgatctgaccaaccacgatcagggacgggtagcaggcgtcgttgttgacgtacttaagtcctgtgtcgacagcggtacggtcggagttctgcagtacctccaggttgtaaccacagcttcggactgccggttcgatgaggtcgaaatggatcggcgacatctgcgggcagaggattgtgtagtttttcttcatttccttcgtgaaataaacacggctgtatgcgctggaaacgatcggtttatggtagtggcgcatctcgcgcacacggattgcggcgatcagggagcgcacacggatacgtgcggcgccgaggttgttgacctcgtcgatcttgagcagcgtataaattttgccggagcgggtcagaatatcattgacctgatcagtagtaactgcgtccagaccgcatccgaaggagttgagctggatcagatccaggtttggctgtgtcttcacataggaagctgcctcgtagaggcgggagtggtacatccactggtcggtgacgatcagcggacggtcaacgcgtcctaaatgggagacggagtcctcggtcagcacggcaaaaccgtaggaagtgatgagttccggaatgccatggttgatctccggatctacatggtacggtctgcctgccagcacgatgccgtggtgtccggtttcttttaaccaggcgatgacttcctcgcccttcttttccatatcctgacgggaggcgatgagttcctgccatgccttgtgagcggcggcgcggatctctttctccgggatcgactgatccctggtaaattcttcgaccagacgttttgtcaggatttcctcatttgtaaatgccataaacggattccggaaatgtaccttgtgatccgtcagggattctacgttgtttttgatgttttccgcgtaggatgtgaccatcgggcagttgtagtgatttcccgcttccggggtttcgttgcgctcgtaaggaacgcacggatagaaaatgtaggtcagtccctggcggatcagccattcgatatgaccgtgcgcgagttttgccgggtagcactcggattcgctcgggattgattcaataccaagttcgtagatctgtcttgtcgatttcggggacagaacggtgcggtaccccagttccctgaagaagactgcccagaacgggtagttttcatacatattcaggacacgtgggatgccgacggtaccgcgcggcgccagatcggcggtcagcggttcataatcgaacatacggtggtatttatagtcgaataagttcggaatgtcttttttctgtttgttgccgcccagtccgcgctcacagcggtttccggtcacgaactgacgtccgccatcgaaacggttgatcgtcaggacgcagtggtttgtacaaccctggcagcgtgccatcgtcgtcttgtaggtcaggcttaagatcttgtcgatcggcagcatcgtggtcgtcttggaagcatcgtagcgctcacgggcaatcagagccgcgccgtaggcacccatgataccggcaatgtccgggcggactgcctcacagccggagatcttctcaaaactgcggagaaccgcatcgttatagaaggtaccgccctgtacgaccacgtgttttccgagatcggaggcgttggtaatcttgataaccttaaacagggcgtttttgatgacggagtaagccagtccggcagaaatatctgcgacggaagcgccctctttctgcgcctgtttgacgttagagttcatgaaaacagtacagcgggtaccgaggtcggtcggatttttggcaaagagtgcctccttggcaaaatcctgtacgctgtaatttaaggatttagcaaatgtctcgataaaggagccgcagccggacgaacaagcttcgttgagctgtacgctgtctacggtgccgtccttgatcttgatgcatttcatatcttgaccgccgatatcaaggatgcagtctacatccggctcaaatgccgccgctgcgtagtagtgggagatcgtctcgacctcgccctcatccagcatcagggcagattttaagagcgcttcaccgtaaccggtggagcaggaataagcgatctgtgctttctcaggaagctggtcgtggatctcctgcatcgcgcggatcgccgtcgccagcgggctgccgttgttgttgctgtagaagcggtatagaagagagccgtcctcgccgacaagcgccaccttggttgtggtggaaccggcgtcaatgccgaggtagcagttgccttcgtaggtcgctaaatcaccttttttgacgtcatgacttgcatggcgggttctgaatttttcatagtcagcttcatcagtaaagaggggttccatccgctttacctcgaaatccatcttgatgccgtgggaaagccgttcgattagatcgtgcaggctggcagttgtcttcggatcagagttcatcgccgcgccgatcgccgcaaacagatgcgagtgatccggggcaatgatctggtccgcccccagattcagggtgcggataaatgccgcgcgcagctccgagaggaaatgaagcggtccaccgagaaacgcaacattgccgcggatcggcttgccgcatgccagaccgctgatggtctggttgacaaccgcctggaaaatggaggcggacagatcctctttggttgcgccttcgttgatgagaggctggatatccgtcttggcgaaaacgccgcagcgcgccgcgatcggatagattgccttgtaatttttcgcgtactcattaagaccggatgcgtccgtctgaagcagcgaagccatctgatcaataaaagagccggtgcctccggcgcagattccgttcatacgctggtcgatgccgccggtaaaataaataattttcgcatcctcgccgccaagctcgatggcaacgtcggtctgcggggcataatccttcagggatgtggcaaccgccacaacctcctggacaaatggaatgcccagatgcttagaaagtgttaaaccgccagaaccagtgatgaccggctcaacggtcagtgcgccaagtttctcttcaccctcacggagcaggtccgcgagcgtctcctgtatgtttgcaaaatgacgtttataatcggcgaaaagaagcgtaccgccgtcttcaataatagatactttaaccgttgtggaaccgatgtcgattcctaattttttacaggaattcatgtacaatcggggcagtgccccttccctcctttgtattacacatgtattcggctatactttaacatagaataaggaagaaaacaatcggtagggtgcgttaaaaagatgctaaaaatgtgcaaaatttgttaatatcgcgcataatgggagaagggcgttcctgtacaaggaaaggcattttctgcgtggaaaataccgctttttctgagttggaatgcagccattatagagcgcaggcgggtacttttggaaccgaatgtgtcgtaagataacgtggtggaagcgacaatataatttgacaaagaatccgccgctctctataatgaaaggaaaacggcaaaggatgtgaattatgaatttttttagaaaattagagcgcaaattcggtcggtttgcgatcccgaatctgatgtactatatcatcatgatgtatgcggctggatttgtgatgagcctgtttaatccgtatttttacgtgcagtatctggcgcttgatgcagcggcgatcctgcggggacaggtatggagaatcgtgacctttctcgtatgcccgcctcagtcgggcgtcctctttgcgctgctcgcgatgtatctctattattcgattggatcgacgttggaacgcgtgtggggaaccttccgatttaatatgtttttctttatgggcgtgctgggacacatcattgcggcattcctggtgtacggtgtgaccggcttttcggtgccgatgtccccgtattacttaaatgaatcgctgtttctggcgtttgcctgcaccttcccggagatgcagttccttctgattttcattccgatccgggcgaaataccttggaatgatgtacggagcgcttctggtctacagtttcttaacgggtggcattatcgcgaaaattgagattgttgtttcgatgctcaattttatcattttcttcctgatgacgcgtaactaccggaagatcagcccgaaagaggcggttcgcaagcagaagttcaaaaacgagatgcagaaagcgcagatccagaaaatttccctgacccgccacaaatgcgcggtctgcggacgtaccgagaaggacgatccgaacctggagttccgctattgttcgaagtgtgcgggaaatctggaatattgcatggatcatctgtatacgcacaaacacgtgaccgaagaagaattgaaagattctaaatagaatcaggcggtggattgttttttagcaggggagtaactgttcagcaggtctgcgcatttactgaacagttacgcaggggatttaaataggctggataaagcatacaaaagagcctataaatgattcgctgatgggaaaattcttaaaaaaatgacagaatatgaggaggaataacggcatgaaaaagacaaagattgtctgcacaatgggaccaaacaccgataaccgggagattatgaaggagttggcgttaaatggcatggatgtcgcacgttttaacttttcgcatggcgatcatgcggagcatagacatcgtttggagattctggaaagtgtgcgcgaggagctggggattccgatcgcatcgcttctggataccaagggaccggaaatccgtaccggcaaattaaaagatggaaagaaagtgacgctgaaagagggcgatctgtatactctgacgaccgaggagattgtgggggatgagacacgcggctacatcaactatgcggggctggcggaggatgtaaagccgggcgaccgcattttgatcgatgatggcctgattgagctgcacgtgcgggaggtcaatggaacagacatcgtctgccggattgaaaatggcggcgagctgggcgagaagaagggtgtcaatgtaccgggagtacgggtcaagcttccggcgctgaccgataaagataaggaagacattcgtttcggcgtggatgcaggctttgattttgtggcggcttcgttcgtccgcaatgccgatgcgatccgcgagatccgggagattctggatgaaaaaggttctgctatgcaaattatcgcgaaaatcgagaatgaagaaggaattgaaaatattgattccatcattgaggcgagcgacggcatcatggtagcccggggcgatatgggcgtggagataccggcagagaaggttccgcacattcagaagatgatcatccgcaagtgtaacttagcgtgcaaggtcgttatcacggcgacccagatgctcgattcaatgatccgcaacccgcgtccgacgcgtgccgaggtatcggatgtggcgaatgcagtgtacgagggaaccgatgcggttatgctgtccggcgagactgcgatgggaagttatccgatcgaggcagtccgcatgatgagccagatcgccgaggagtcggagaaatatctggattatatgttctaccagagaagaaaggtatcggcggaaaaccttcgaaatatatctaatacggtatgttattcgtctgtagcgaccgcctccgatctggaagcgccggtcattgtggcgccgagtgtcagcggatttacgacgagaatgctttcgaaatggcgtccgaaagcattgatcgcaggactttccccgagcatgacggctgtccgccagatgcagctctactggggtgttaagccgttccatgcaaaacgcgccgaatcgacggatgcgctcttatttgcatcggtggaactgctgaaagagaaaggtatcgtcaaagagggtgagattgtggttgcaaccgcgggtgtggtgacacgtgccaaccgccatgaaccggtagccgatacgaatatcatgcgtgtaattgtggtagagtagaaactggattctgcgcctgaatctgtgcccggttcatagatgtatctggaaaatgattcaatttgtccggagtctgtgtcctggcggagaaaaggagaaaaataccagttactgttcacaggtaggcacttttggaaccgaaagtgccgtaagaaaacgtggtggcagcaggaatttgccgtatttaaatgcgaagccacggcaaattccgttactgggcacgtatgcgtgaacagtaacaaaataccgtccatttgtgggcgtttttcgggaaatcagggaaatcagttgataaaacacggtttttggtgtataaatagtagcaggacaaaggagtctgggcgtgccgggagtagtgtatgttcccggtagtccagacttttaggttttatatgtagattttagttcggaggatgtaaaagtggagaagaaaccatttgtaacacgggagcagctggaggagatcaagaaaacatacccgacaccgttccacctgtatgatgaaaagggaatccgcgagaatggcgagcgcctgatgcgtgcatttttctggaacaagggattcagagagtattttgctgtaaaggcaacaccgaacccatttgtaattgatattttaaagaaacttggatgcggcgtggactgctcttcgctgacagagcttatgatggcaaaggcgatgaagtacgatggcgagaagatcatgttctcctccaacgatacaccgccggaggaattcaagatggctgccgagctgggcgcgatcatcaaccttgatgattttacgcacattgatttcctggagaagacgatcggttatattccggagacgatcagctgccgttacaatccgggcggactgttcaagatcagcaatgatatcatggacaacccaggcgatgcgaaatacggtatgacaaccgagcagttatttgaggcattcaaggtgttgaaagcaaaaggtgcgaaacatttcggtatccatgccttccttgcaagcaatacggttacaaatgagtattatccgatgcttgcgaaggtattgtttgaggtggcggtcaagctgaaagaagagactggcgcagatattaaatttatcaacctgtctggtggcgttggcattccttaccgcccggatcaggagccgaacgatatctttgcaatcggcgagggcgtccgcaaggtttatgaggaagttctggttccggctggcatgggcgatgtagcgctttatacagagatgggacgtttcatgctggcgccgtatggctgccttgtgacaacggcaatccatgagaaacacacctacaaagagtatatcggtgtggacgcgtgtgcagtcaacctgatgcgcccggcgatgtacggcgcataccatcacatcacggtcatgggaaaagagaacgagccgtgcgaccacaaatacgatgtaaccggttccctgtgcgagaacaatgataaatttgcgattgaccggatgcttccgaagattgatatgggcgatatccttgtcatccatgataccggcgcacatggtttttcgatgggctacaattacaacggaaagctgcgttcggctgaactgctcctgaaagaggatggttccgtggagatgatccgccgggcagagacaccgaaggattattttgcgacctttgatttttgtgatctgtttaaggatgtgcagtaaaaaagaacgttaaattaatataatgcaggaaagacgatttttattgcatcgaaatggtgaatcttaagaatttcttcataatttatttaaagagaatacaaacattttggagagaggcatgatatactataaccataataaatgcatgatacaaaagatttaatcctttaacctttttgaaatccgaattcctaacgaaaaaaagtccggcggagcttttccaccggactttttttctacatatttctaattttgtaactgttcagtacagatacctattttttataatccttcagccatttcatacagcagacgctcggaatcctcccatcccagacacgggtcggtgatggattttccgtagatgtgttcgccaactttctggctgcctggttcgatgtagctttcgatcatgacgcctttgacgaagttacggatatcgtcggagtgacgacggctgtggagtacttccttgacgatacggatctgctccatgtattttttgttggagttggagtggtttgcatcgatgatgcaggccggattcttcagatcacgctcgttgtagaggtccaagagcagcttcaggtcttcgtaatggtagttcggcaggcactggtcatgcttgttgacagcaccacgcaggatggtgtgggtcagcgggttgccctgtgtctttacttcccagctgcggtagatgaactcatgaccgtgctgtgctgcgtgtacggcgttcagcatgacggagagtgcgccgctggtcgggttcttcatgccgaccggtacgtcgatgccgctggcaacgaggcggtgctgctggttctcaacggaacgtgcgccgactgcaacataggacataacgtcggaaaggtaggtcaggttctccgggtatagcatctcgtctgcggtcgagaagccggtttcttcgatcacacgcatatgaagtttgcggatcgcgatcagaccctggtataagtttggcttaccttccggatttggctggtgtaaaagtcccttatagccgtcaccggttgttctaggtttgttggtgtagattctaggaaccagaatcagtttgtccttcactttctcctgtaccttggcaaggcggtttacataatcaataaccgcatcttcccggtcagcagagcacggaccaatgatgacaagaaacttgtcgctgtcgcctgtaaagacgtcacggatagcagcgtcctttcgagctttttctgcggccagctccggtgccagtggaaactgtgcacgaatctcgtccggggtcggcagcttgctgacatattcaaatcccatgagtttcatcctcctgtattgtctaaaagattttcgcactttaaagcgtatgatgtttattatagtatagaaaaatcaaatcatcaataggttgagggaaaagaattttatttcttttatgctatttttacgcagcttttattaaatagaccgtagtctataaaaatggttgacgtatttattaaaaaagtgtagaatatattccatatcagcaatatttaattttagtttgatattgttccatatgaaaacggaaccgttcatgcctcgattgactgagagcaagggcgcggcggtcactgtttttgtacgaatcccgcacaagcgggagcagcgtttgtttgtttggtgctgcatatgtttgcgtgttttccgagaaaaacagaacatttagcagaaatctggcacttcattcgtccctattatctgggggcgtttttttatgccttaggaaattgcgtcctatgacacaaaaacgttcagatgaatgcgtacagccgacagaaatgtggaaaaatgagatacttattttaggaggagagcgcagtatgaaaggatataaaaagctgatggatattgtggcgatggttgagaaaaccgtgctggtagtcacgatgctcctgatccttgtactgacggtgggaaatgtattttcccgtaaggtgattcaccagtcctggtcctttacagaggagctggttgttgccattttcgtattaattacactgcttggcgcggcgctgtctgcgcgtgagggcggattggtaggcttaaatctggtaacagagcgtctgccgaaatcagcaaagaagccggtcatgattctgattacgatcttttcggttctttttatgggaatcttattttactatggcatggacaaggtactggcgcagcttgcgaaccagaaacgtacctttgtgctgaactggccggagtggatcttctggtcctttgtaccgatcggttcggcgtgcatgattcttcattttatcgagttctgtctcgatgagtgtacgaaaaaggaggacaagtaaatggttagcgcagttctttttattacctttttcgtattattggtgctgaatgtgccgatctccgtctgtctgggactttcttccgcagcggcgatcctgtattccggtacttctttaacgattgtagcgacgaatatttactccggcatcagtaaattcctgctgctggcgattccgtttttcgtattatccggaaatatcatggcgaaggcggggatttccacgcgcctgatccgtttcgttgacacatgtgtcggtcacagaaaaggcggcattgcgaatgtgtgtatcatcgtagcctgcttcttcggcgcgatctccggttccggtccggcgacggtagcggccctgggtgcggtcctgattccggcgatgatagagcggggcggtttctccgcagccttctcgacggcattgatggcaacttccagttccatcgcgatcgtcatcccgccgagtatcgcgtttgtcgtatacgcgtcgatcacaggtgtttccatcggagatatgtttatggcaggcatcattccgggtatcctgatgggtctggctctggtagttgtcgttatgctggaggtacgccgcaatcatgtcgtgccgtccaacgtagagaaggcatctgcaaaagagcgctggaacgcatttaaggatgcattctggggatttttgatgccggtcatcattctgggcggtatctacggaggcatctttacaccgaccgaggcggcagccgtatccgttgtgtacggtctgtttgtcggtatgattatttataaggaagtaaaatttaaagacctgtgggaaattctgattgattcggcaaagaccaccggcggcatcatgctgatcgtagcgtgtgcgtcgctgttctcttttgtctgcacccgtttcggtatttcgacggctgcttccgaactgttagcaagagtggcaggcaaccagtttactttcttgctgatttgtaacattattttcctgatcgcgggctgctttattgatgcaaattctgcgatgtacattttcatcccgatcatgctgccggtctgcaaggcactgggctacaacgtgatcgcatttggtatcatggcaacggtcaacctggcaattggtcaggtaacacctccggtcggtgtcaacctgtttgtcgcgatcggcatcaaattaagagacggtatccgcgtaacgctgcaggagatttccagggcagtcgttccgatggtagccgcttccattgttgttttactgataattacttatattccgcagatttcgacctgtctgccggcggcactgggaagtgcggcagccattgaaaatggcgagacagccggaggcgacagcggaaccacccagacagacaatgacgatttcaacacgatcggcgattacagcgatctggattgggcggatatgacctggaactttacgtgttccacaaccgagacaagcacctgggcacaggcgggacgcaagtttggcgagctcatggagcaggcgaccggcggcaaggtcaaagtagatgtttacgcagccgatcagctgaccggtggaaaccagtctgagggcatccaggcactgatgaacggcgatccggtgcagatttcgatgcacagcaacctgatttattcggcatttgacccgcggttcaatgttgtatcactgccgtatctgtttgattctgttgaaacagcggatgcagtcttagatggtccggcgggcgacaagctggttgagatcctagaaagctatgacctgcattgtatgggtatggcggagaatggtttccgtcagctgaccaacagcgaacatccggttcgttccgtggaagatatgaagaatctgaaactgcgtgtggctggttcgaaccttctgatgaagtgctatgagctgtggggcgcagatgcgaccaatatgaactggtccgagacgtatacggcgctgcagcagggcacggtagacgggcaggagaacccgcttccggcgattgatgcggcgagtgtacaggaagtacagaaatatgtttccctgtggaacgcaaactatgactgcctgttcttctgcatcaatcagaagctgtatgacagcctgacaccggagcagcaggcggttgttgatgaggcaggccgtaaggcagttgcttacgagcgtgagatcaaccgtgcaggcgatgaggagattctggatcgctggcagactaagaacggtgtggaggtgctgaaatatgaggatctcgacatcgaatcctttaagaaagcagctgagccggtaacggaatggtttatcggagaactgaaaacccagggctttgatgatgcagaggatctggtaaacacctttactgaaaatgcggctagtgcagttaagacggcgggcattgaaaattcttcgacctatcaggtggaagatcacagtgacctgaactggccggaaatgacctggaactttacgtgttccacgacagaaaccagtacctgggcacaggcaggacgcaagtttggcgagctcatggatcaggcaacgggcggcaaggtcaaagtagatgtttacgcagcggatcagctgaccggtggaaaccagtccgagggcatccaggcgctgatgaacggagatccggtgcagatttcgatgcacagcaacctgatttattcggcatttgacccgcgtttcaacgtggtatcgctgccgtatctgtttgattcagtggaggacgccgacgcgaagctggacggcgaggctggccagaagatggatgagattctttcttcctatgacctgcattgtatgggtatggcggaaaatggtttccgtcagctcacgaacggcgtgcgcccggttcattccgtggaagatatgaagaacctgaaagtgcgtgtggctggttcaaaccttctgatgaagtgctacgagctgtggggcgcagatgcgaccaacatgaactggtccgagacttacacggcattgcagcagggtacggtagacggtcaggagaacccgcttccggcgattgatgcggcaagcgtacaggaagtacagaaatacgtttccatgtggaatgcaaactatgactgcctgttcttctgcatcaaccaggatatttacgacagcctgacaccggagcagcaggaagtagtcgatgagtgcggcaaacttgctgttcagtacgagcgcgagatcaaccgcgcaggcgacgacgagatcctctccagatggcagtccaagaatggtgtcgaggtcatcccgtatgaggatctggatatcgattccttcaaggcggttgtagaaccagtaaccgagtggtatatcggggaactgaaaaaacaaggttataaggatgcggaagagctggttgctgcattcaaataggaaaattagaagtttgaagttagaagtttggtaaaattgaatcattgagtttggttttctggcggttctggtccttgggatcagaccgccagattgcgtatatggggaaatatttcaatgtaaattttcaatcgggcaaatattgtggttggcagtttgatatgataagatagttggtatcggtgcgctgaaaagcgagataaaaagaaagaaaaggaaaaatatatgggatgtgtacatctgtactgcggcgacggaaaaggaaagacgacggcggcgatcggtctggcggtccgggcagcaggagcgggaaaacaggtagttgctgcccgctttttaaaaacggatcagtctggggaggtggagattttaaagcggctcccggaggtgacgttgattccctgtgaaaaaacatttggattcacgtggaaaatgaccgatgaggtgaagcgggaggcggcggattattataaaagtatgtttgagacagcgtgctgtgaggcagtgaagcggtgtgggaaaacggaagattcaagaagcaggaaaatacagaataatgaaacctgcgatgttctgctggtgttggacgaggtctgcgcttctctttcttcgggacttttggagctggcggatatagtggattttctggatcacagaccagcggatctggaagttgtgatgacggggcggaaaccgccggaggagctgcttttgcgggctgattacgtgacagagatggaaaaaatcaagcatccgtttgaccggaaaatcctggcgcggcggggaattgaatattagagaggggactctgaatgggatttataaagagaaagcatcgtccggagtacgctacagtgcagcgggaatgggcaatgtggggaaaacagatggaaaaaacacttccgggttacggggagcagaatgaggcattgcactggatggtacggattctgacgggggtgcgggttctgtactgcctgttttatctgattatgacatttgtctatggaatggagaaaacaaatgcggtcatgacgcttttgggaccgtttattttttatggctggtatatgcttatgctgcgggagagcccggtgcttacggtgttgatgctgatcgggcgtggggcgagtatcgtgtggggcggcgtatcgctgcttcagatgagctggtggctgccatttccgctggttttcatgctggtgacggcggcggcaatcgaatttatagaggcggtattctgcatctatatgctgtttaacccgctggcacggcacacaatccgcttaaaccgggcatttgcacgtggaatgcgcgtacaggtgccggatgaggggctggaatagatggcggcgtatcggaatgaagcggcgatactgtacacgggtaggcacttttggaaccgaaagtgccgtaagaaaacgtggcggcagcaggaatttgccgtatttaaatgcgaagccacggcaaattccgttactgggcacgtatgcgtgaacagtaacgaggcggcagatgaagaggacaatgaggaagtcaagtcttgatttttacagaatactctgatacagtggagtcaagacaggattccgccaacggatcttgtgggacgtagaaaaggcatagaaaagaaagaggtaaaatatggcagataataagaatatgacgcaggaagagatcgacaacggcgaggagatgaccgtgactctgacattggatgacggcagagagattgagtgtgttgttctgacgattttcccggcaggcggcaaggattatattgcccttcttccgatggatgacatcgaggcagaggacggagaggtatatctgtaccgttacagcgaggatgagaacggacagccgaacctggaaaacatcgaggacgacgatgagtatgagatcgtggcagatgcgtttgacgagcttctggacgagcaggaatatgatgagctggtcggcgaggacgagctggatcagtaattaggcaggcaaaagacaggacgcccaggtacttcgcaggcagaaacggcgaggcatctgggcgttttacatcttttcaggggtggtacgatggaactgaaacaggagttaaagctcaaacagaccttgtcccagaaaatgatacaatccgcaaatattcttcagatggggcagatagagctgaaagagtacatagaagagatggcgctggaaaatccggtggtggatctggaagagcgggagccggagaacggacggctggaagaaaatggagagctgaacgagaaaatccgcagatttgaagaacttgccagccttgaccgccagaaccagacctattatcaggatgaggaagaagaggcgggacgattagagccgggacgaagccaggatgggcttttggaatcgcttctggaacaggcgtgtatgctgcatctgacgaaaagagaagaaaaaatattccgctatatgatcaaaaatctggatgcaagcggatatctcagcgtgaattttggagaactctgcgctgggctgggaattgaggagacagaaggagaacggatctggaaaaattttggcaggctggaaccgtgtggtatcggggcacggtcgctgaaggagtgtctgttgatgcagctgtcttacctggcagaagacggcggcgcggtgattgatattgttcagaatggaacgatgcgaaccgaaattctggcggcacgcatcatttccaaccatctggatctgctggggaaaaaccagatgaagcagcttgcccgtgcatgctcctgcaagctggaggaagtgcttctggcagcagcgcggatccgggagctgaatcccaaaccgggaagcggatatggggatgagagctataataaatatattgtaccagatataattatctcacagacggaacacggatttgaaatgcagctttccgatgagacactgccgcagattgccatcaatccgtattatctgtcattgatgaagcagaaagataccgagacggaggcgaaggactacatcgagggaaaaatccgacaggctgaatgggtctgccagtgcattgggcagcgcaatcagacattgtcgcggctggcagaagagattttgtgtgtacagggggagttttttgcaaaaggaagtggaaaactggctccgtggacgcagaaacaggcggctaaatcgctgggggtcagcgagccgacgctgagccggacagtgcgtgaaaaatatctgcaatgccgctgggggatctttccgctgtcatatttcttttcaagacacatggctgcggggggatttgggatgacggataagggaagactggcagatcgggaagaggcggcgaatcaggaagaaacggcggttcaggcagaagtggtgaatcggatggaaacaggcaaagatccgcgggaggcaatccgccatctgatcaaaacggaaaatccgagaaagccgttcagcgaccgcgtgctgtcagaaaaactggcggaagcggggatcacgctgtcgcggcggaccgtggcgaaataccgggaagaaatgggaatccgggatgcatctgggcggaagtgctttggtatctgacagaaaacatagacagaaagacagagggaaaactatgtcattgcaatttataatcggtggttccggttcgggaaagacacggacattgtatgaaaatctgatccgtcagtcgatggaagagccggacgaacgtttttttgctctggtgccggaacagtttacgatgcagacgcagaaagagatcgtgatgctgcatccgaaccatggcgtgatgaatatcgatattgtcagttttgagcgtctggcataccgggtgtttgaggaactggcgattgaaaatctggcggtgctggatgatatgggaaaatcgatggttctgcggcgcgtctcatcgggcgtccggggaaatctgcacctgtttggagggcatctggacaaggcgggctttatcagcgagatcaaatcgatgctgtctgagtttttccagtacggcatcacggaggaaaagctggagacgctgatcggggagacgaaaagcccgctgctgcgccagaagcttctggatatgcaggttttataccgggcattccaggcgtataccgaggaaaaagtgatcgtaaaagaagaaattttaagccttctctgccaggtgctgccgcagtcacagctcatccgcgacagcgttgtgacgctggatggctatacgggctttacgccgatccagtatgagcttctggaactcttattccggtgctgccggaaggtgatcgtgacggtcacgatggatccggaggacaatccgtaccgcgagagcgtgcagcagaagctcttttacatgagccgtcataccgtctgccgtctgattgatcgtgctgcagctgccggatgcagccgggatgaggatattttgttgaaagaaaaaccaatgtggagatttaaggacagcccggaactgggatttattgaaaatgaattattccgatataggggaaaggtgtatcattctgagagcgggaacgaaagcggggctgcggctgaacacgaccgggaaagcctgcgtctaattgaagcagcaaccccgcaggcggaaatctctttcttatgcggagaaatccggcgtctggtggcatcggagggcatccgttaccgggagatcgcggtgattaccggcgacttggagacatattcgcgggagattctgaggcagtttgagaagaatcagatcccgtgttttattgattataagaaaaatattttaagtaacccgatggtggaactaatccgggcggcgctggaggtgctgcaatcgggcttttcctatgaatcggtgtttcgattcctgaaaacagggctggtgatgccgcttgcggggctttcaccggaagtgatctatcaggcggaaaattatgtgattgcgcttggaatccgcgggtttaagcggtggaacagtacatgggagcgcgtgtaccggggggcagagcttatcaatctggatgagttaaatcagttccgtgaggcggttgtcacaccatttctgccgcttcgggaggtgttttccaaccgcaaagcaacggtgcgcgagcggacggaggcgctggtccattttctcgaagcacttgagatggagcagaagctggcggcgatggcgcagcagtttgaagaagtgggcgatatgagtcttgccaaggagtacgggcaggtgtatgggctggtgatggatctgtttgaccggattgtggcgcttcttggcgaggagatcatgggacagcgggagtatgcagagattctggacgccggttttgcggagatcaaggtaggactgatccccgcggtcgtggaccggatcgtggtcggcgatatcacgcgaacccgtctttccaatataaaagtgttgttttttgccggagtcaatgacgggatagtgccgtctgtttcgggacgcggcgggatcctttcggaggcggatcgccgggcgctgcgggaaatgcaggtagaattggcgccgaccgcgcgggaggaaagctttttgcaacgattttatctctatctggcgctgacaaagccatcggactatctctatctgtcgtgtgcggcgtcctctgccgagggaaaagcgatgcgtccttcgagtctgatgctgcagctgcttaaattatttccggagaaacgtctggaacagccgaaggaagagaaggaagcgctctggtcgccggagcttggcatgagctgggtgcttcggggactgcaggatgaaaaaagcggggaaaatgaccagtttatatcgctgtaccgatactttattcagtcagaatcgtaccgggatgaaatgcaggcgctctcggatgctgcattttatacctatcaggatacgggcatcgggaaggcggcggcgcgggcgctctatagcccgattctgcggggcagtgtgacgcgtatggagctgtatgcgtcgtgtgcgtatgcacattttctttcgtatgggctggaattgtcggaacggcagatgtacgagattgccccgtcggatatcggaaatctgttccatgcggcgatcgacatgtatttcacgcggatgaaagaggaaaatcgccggttttccggcatttcggaggaagaccgccagaaaatggtggcggagtgtgtggcgtcggtcacggaggaatacggcaatgcgattctgggaagctcgtaccggaaccagtatctggaacggaaggtataccggatcacggatcggacgatctgggcactgacggaacagctaaaaaaaggtgattttgagccagccgggtttgaggtcagtttttcaccgatggatcacctgagagcgatgcggattccgctttcaagcgaggaggcgatccatctgcgcgggcggattgaccgaatcgatctctgcgaggatggcgaccggctgtaccttaagatcattgattacaagacgggaaaaacgaaatttgacctgacggatatttattatggattgcagctgcagctggtcgtctacatggatgcggcgatggagaagatcgggcgggaatacccggataaaacggtggttccagcggggcttttctattatcatatcgaggatccgatggtggagcgcaagccggtggagtcggaggaggagacgaatgccgatattttgaaggcactgcggatgaacgggctggtaaacggcgatcgggaggcactggcacatctggataaccggctgggcgaggaggcgacggcggattcggatgttgtgccggtttcgattaaaaatgaggcgatcgttgagcggcgttcgcaggcggcaggggaagaaaaattccgtgtgttgggcgcgtatgtgaaccggaaaatgaagcatatggggcgggagattctggatggaaacattgcggcgtcgccgtacaaaaacggccagaaaacggcgtgcgattattgcccgtaccacagtgtgtgcggatttgatttgaaaacggacggctaccagttccggcgttttgataagctgagcccggaggagatctgggggaagatggaagaaaaggataagaaaacggaacggtaggtttgtgtttggctgtgactgtgggaatgaaagaagaaccagtcatgaaaaaggaaagggcgagaaatggcagtaaattggaccagggaacagaagcaggtaattgaggggcgggagaaaagcctcctggtgtcggcagcggccggaagcggcaagaccgcggtgctggttgagcggatcatccagatgatcacggagggagagaacccgaaggacatagaccgcctgcttgtcatgacttttacccgggcggcagcggcggagatgcgggagcggatccaggcggcgattgaaaaaaaactggaatcggagccggaaaatgaacatctccagcagcaggcagttctggttcagtttgcccagatcacgacgatcgacagcttctgcctgcatgtcatgcgggaacattttgaccggctggacatcgatccggcattccgggtcggcgatgagggcgaaatgcttctgatgcgcgctgatgtgatggatgggctgctggaagattattaccgcgacggcgggaaacggtatgaggagtttgtggacgcgtatgcgacgggcaaggcggacggtggaattgccgagtatgtgatgcaggtctacaatttcgcccagagtaacccgtggccggatgcgtggtatgaaaaatgccgtgaggagctgctcctgaccgaacagggagagctggagcagacggagtggatgcagttcctttggcgtgatattgcattgcaggcgcaggagtgggaaatacagcttcgggaggcgtgggagatctgccaggagacgggaggaccgatgccgtacctgccgatgatcgaggaagatctgcgccatgcggaggcagtctgcggggcagccggttcgtttgaaacgatctcggaggcattggaacaatttacgttttcgcgtctggcggcgatccgcggcaaaaacggggaggtcgatccggagaaaaaggcgcttgtttccgactgccgcggtcgggtcaaaaaagcagttgaaaagttaaaaggagagtacctgtttgcctccccggagcagatgcttacggatatggaagccggaaaagagcggattttggaacttttggagctggcgcaggaatttggacggcggtttagggcgaagaagaaagagaaaaatgtggtggattttcatgatctggaacattttgcgctggagattctgacagaaccggaatcagaatgttccgaggcggaggaaacttcaagtgcagaagaaaccgatcagatgcaagggaaaaatgcctggacagtgcgcgtaccaggcacagtcgcggatgagctcgccgtgcagtacgacgaaattctggtggacgagtaccaggacagcaacctggttcaggagacgctgatccagtgcatcagcggtgaacgttttgaccgcccgaatgtgtttatggtgggcgatgtcaagcagagtatctataaattccgcctggcgagaccggaattatttctggaaaaatacagcacatacacgtcggaggagagcgcgcaccagaagatcgagcttcaccagaactttcgaagccgggatcacatactggaatcgatcaatgcgattttttaccgtatcatgacggaaaagctgggaaatatatcctatacggaagatgcggcactgcatccgggcgcagcctttgaagagcgggatggcctggatgagttaaagacggagcttttgctggtggatttgtcggtgcagccgcagaaagagacggaatcccccgagttagatgatgaggcagccgattacaccgccagagagctggaagcgcgcatgatcgccggaaagatccgtgagatgacggataaagaacgggggatcacgatctgggataaggagcttggcgcttaccgtcgggcgcagtacggggatattgtgattctgcttcgaagcgtcagcggatgggcggaagaatttatcgaggtgctggcgacgcaggggattccggcggtcgcagagtctcggacgggatattttaatacgctggaagtcgagacggtgctgaatcttttggcagtcatcgacaatccgatgcaggacattcccctggcgtcggtgctcaaatcgccgtttggcggcgtttctgatgaggagatggcgtggattgtggcggaacataaggcgggcgttgaccggtcgcgggatgcagggctttaccgggcggttgtggagtatatgaacgaggatggaccggtgaagtcgaatgacgaaagtgacgagtcgtcgatcgcggatgtgtttcgttttcaaaaaaataaattaattcaaaagaataacctgcgccgaaaactccaaaaactctttactcttctggatacattccgccaggaagctgtttacctgccgatgcacgagctcctctaccggatttacgacaaaacgggctattatcgctatgtatcggcgcttccgggcggggcgggacggcgcggcaatctggatatgctggtggagaaagcggcagcctatgaggcgacgagctaccggggcgtgttccattttatccggtatattgaaaaattgaaaaaatataacacagattttggcgaggcgccggtggcggattccgagggaacggtggtgcggatcatgagtatccataagagcaagggactggaatttccgatcgtgtttgtggctggaatgggaaaaaattttaacaagcaggatacgcgggggaaacttctgatcgacgcggatctgggaatcggaaccgactatctggacagcgagaagcgcatcaagggaccgacgctcaagaaaaatgtgatgaaacgccggatggaactggaggcgctgggcgaggaactgcgtgttctttacgtggcgctgacgcgtgcgaaggaaaaactgattctgacggcgtcctcccggaaattggaggatcggattgcgaagtggagcgcagtggcaaccgaacacggggcgattccgtatacgattctgacgctggcttcctcgtatctggattggattttgatgagtattccggaaaaaaatccgtggatttcatatcagatggaaacgctttccgaccagatcgaccgtgagatcggcacgcagatacgccagacgttatcgagagagtggctgcggtggctggcgggggaggacagccatttgtcgaatgacgagaatcatccaaacacgcaaaatcggctcgaaaatatcaggcaaatagaatcgattatcagcagcaactaccatttccagtacccatacctggacgatctgagtctcaacaccaagatgtccgtttctgaactcaagaaaaagggcatggaggaagaagaggaggagatggtatttctgccgacgctgccagtgtttatggagaaggagcaggaagaaaaaggcggcgcgacgcgcggtacagcgtaccaccgtgtgttgcagttgttgccgtttgagcgggcaatgtcgagacaggagttaaatgcatttccggcgaagctggcggctgaggggcggatggatgccgaggcggcggcgttggtgcgcggctcagatctggcaaaactgacagccagttcattgggaaaacgcatgcagagagcggcagcagccgggaaactgtaccgggaaaaacagttcgtcatcggtattccggcgcgcgaaatgggcgactgggattcggatgagcggattctgatacagggtatcatcgacgccttttttgaggaggatggcaagctggttctggtggattataagacagattatgtggaaaattcagacattctgatccgccgctatgaggcacaggtgcgctactatacccgcgcactagaacagatgacaggaaaaagggtggcggagcgctacctgtattcgttccggtttggggcgattgaagtgtaaggcagtgattctggatacagataggcacgttcggagccgatcgtatttccagtcaatacgccgggatatgcggcgcaggaggatctgacggagtaccggagttttacggattatacggatcagggctttgtttatgtccatgcgggctgccgcggccgataactttatagagtgggtcaatgcgtgctgcgcccagaggaattaaaataataaaattagagaaataagttttggttaaagggtatcatccgccatcagaaccgctacctgcgtcagaaaattctcaggatttttgtgctggggcggtccctccagatagaggtggcgggcggtgccctttaatggaatctgatatttgtttgcatacgcacaaagatgcttcacaattacaggaagaccttcataggcaccgtgataaaagatacagagcgctttctggcagggcagggtgacgagatgttcaccccggctttccggcgggacggcgatgcagcaggtaaaatcgcccggattcgaaaggttgtattcggtgaaaaacatatgctgggtggtgtcagaaccatattgacggatcgccttgatgaagacgccacgtaattgctctttcttgtcttcaagttctgtcgaatgcagatcctggcagtaaacggtctgggcgggaagttctatctgtcggatttcaaagtcattgtgcccttttgaatgttcttttaatttctcaatattccggctgatctcgtcacgcagatcttccagacgagtgatcagcggctccagatccgtcgtgccgtgataataggcatagatatcatccagcgacagaccgagattctgcagaatgcggatgctccggatgcgcgagacggtgtctgctgtatagtaacggtttccattgataccgtctctctgatccggcagaataagacccttgtcttcataatttaaaatcatgcgccgggtcacttccaacgctttggctgcctcgccgatcgagagcagccgttttttatcgtgcgtcataaaacctcctgttagatatccataagatgtgcaatcatgtatatttgtcatgtaggattctggtgcaattttttacactcatagttgtgtataattacatgaaaaataagtaaaaattatataaattagctaaaaagggattgtatcgtacatcaatgtacggtatataatcattttattgaaagcgggatgccgtgtcaagtatccagccgatgcaaaacaccacacaatttgtcatactatgcacgttgaaaaggagtatccgggcaggcaggagcgtcagacattggggagaatgagtattttatatacagaaagatttgatggctcatctgcaaacatctgcccggagaaacatttcaaccaaaacgcctttattgtatacctatgatgctgcgttttatctggaaaaatcaagaaagaattgacatttgaacgccttccatatatgcttgaaccaatatgattttcgatttgacagatgggaaaatcaatggaaaatctaagcagatatgggaggcttttatggatcaggaaaatcagacaccacacaaacggcgtgtcagatataaaggaaaatatccaaagaaatttgaagaaaaatataaagagctgcagccggagaagtatcaggacacgatccagcacgtgattcagaagggaaatacaccagcgggcatgcatatttccattatggtgcaggagattctggactttttgcagatccagccggggcaggtcggatttgatgcgacgctaggatacggcggacatacgaaggcaatgctggcctgcctgaaagggcagggacatatgtatgcgaccgatgttgatccggaggaatccgccaagacgcggaaacgcctggaagaagcgggctatggcgaggacatgctttcaatccgtctccagaacttctgtacaatcgatgagattgccaaagaagcgggtggttttgattttattttagccgatctgggcgtgtcttcgatgcagattgacaatccgaagcgaggcttttcgttcaaggtagatggaccgctggacctgcgcctgaatcaggaaaaaggcatcagcgccgccgagcgccttgacacgatcgagcgtgaggagctggcgggcatgctgtacgaaaattcagacgaaccgtactgcgaggagctggcaaaagcgatcacggatgagatccgccgtggaaatcggatcgatacgaccacgaaactccgtgaaatcattgaaaaaacattggatttccttccggaaaaggagaaaaaggagacagtcaagaagacctgtcagcgtgttttccaggcgctccggatcgatgtaaaccaggaatttgaagtactctatgagtttatggagaagcttccaaatgcgcttcgaccgggcggacgggcagcgatcctgaccttccattccggagaggataaactggtgaaagcggcgctcaaagagggatatcgcgccggtatctataaagaatattccaaagatgtggtgcgcccgtccgcgcaggagtgcgtacagaacccgcgtgcccgctcgacgaagatgcgctgggcgatccgggcggacgagtaaaatgaatataaaagaaaatatatgaaaaaacagggcagctgttccgagcaatatgggagcggctgtcctgtttttattgtgaagatcaaagagagtccatgtgaaaaaatttcgggcgcagtgatgtctggttctgcaaaaatccgattaaaagagcaaaaatgttttttttgcgagatttctgtttccggtgcgtatactataagattacttttcagaaaatagaaaagtggtcacagttgtgaaagaaaaaacagctgcgaaaaaaacaaatccgcgagaaagtttcgtgagaaagagaggaaatacattgaaacaggaaacacaaaatgaattggaacgatttagggattatttgagagaacaggaaaaaagcagccacacgatcgaaaaatactgcagggacgtgagaaagtttttgatgtttgctgatgaagactgggataaaaatacaattatatcttttaaggaatatctgcaagctcattataaaacgtccagcgccaattcgatgcttgcgtctctgaacagctactttcattttatcggaagacaggaatactgtgtccgcacgttccgggtgcagaagcggattttctgtgatgagagacaggaaatgacgcgcagcgattatcaaaagttagttaaggcggcgcgggagcgcggcgatgaacgcctctgtgcgatattgcagacgatcgcgagcacgggcatacgaatcagcgagctttcatatattacagcggaatcgctggcacagggggaagtagtgatcgactgtaagggaaaacagcgggtgatcctgctgccgcagtcgctgatgctgtatctgacgcagtactgccagaagcagcggattgtgagaggcagcatctttgtcacaaaaaacgggcaggcagtccgcagacagaatgtgtgggcggacatgaaatccgtctgcaccgaagcgggtgttcttccgagcaaggtatatccgcacaatctgcgccatctgtttgccaagatattttatgagcgcgatcacgatctggtccgtctggcagactatctgggtcacagcagcgtggaaacgacaagacgttatacgatcatcagcagccgtgaagcgtgccgcagacagctggaattaggtttgttgattgatagggaaaattgacgaaaaacataatgggaattatgtcatgaaatgaaaaaaatctgcatacatatctaaatatatgattttattatcaagtttatcacttctgagaaaaaatttcaacctacaaagacgttaaaaaacagtacttgaaagtacagatattttatccaaaatccgacaaaaaccttgcaaattaaagaaaaaacaaaacaggtggatatgacataattcccattatgtcagccggggaggtggagtatgtgagagaagatctgacggggcgccggtatggacgcctgaccgtctgccgggagataaaacaggcagaaaaaagccgccgccattactggctgtgccggtgtgactgcgggaaagaaaaaaccgtggaggagtcccatctgaaaacagggcatacgaaaagctgcgggtgctatcggaaggaacttccgtccagtcggcggatcgatctgacaggtcgtcagttcggacgtttgaaagtgcttgaagaggcggataattccaaccggacaggtgaatattggaaatgtgtctgtagctgcggacgcctgattgaggcatccaaagaaagcctgtgcgcgggaaaaaccaagagctgtgggtgcctgcaggcggagacacgaaagaaaaacatgaaaaaagcgattcattttgtaggcggaacctgcctggaacgaatcgccaaccagaaaaatacggcaaacaatacaagcggctatcgaggcgtctaccagcgggaaaattcccggtggcgggcagcgatcggctttcagggaaaagtgtacaaccttggaaccttcgtaaaccttgaggatgcggtggcagcgcggaaaaaagcagaagaggaattgtacgagccatttttgcgggaacatggcgtgaaagcggtgcagaatggaggtatttaaatccgcataaggggacctgtgttgatgataagacgggaggcaaaaagaatgaaaaaaacgaagaaaaaggggaaaagttacagtcaaggctggtttgggcgtcagtcaaggcgtttcatgtcagtgcttttgtgcagcagtatgttgagcacaagcgtggcaaatacagccgcatttgcagctgccacatccgaaggaggggatgaaagacaggaattttcattggaaaaagaagtcctcaggcaggcaatccgggatgctgctaaaaaaggaaagacagtaaaagaggatgcatttacgttttccggcgatgaggcagaaacctacgagggactgtttgaagaaggaaatctatatgaactgcatccagatttcgagaagaaaaacgaccggcttactttgaaaatgtatgcccgcttagaggatgaagaggacatggatcagtatacgatcagcggaaatgaagaaattattttcctgatgaccaattcttcttcaaaagagcgcaccggacggattctggtggatggaagagccagcgcatggatgacggttgcgccatttggtgaagtaaaaaagcaggttgagctggagacagaggaagcggttccgaccgagatagaaaatgaggtaaaagaaccggaaagtgcagttccggcaggaagtgaagatatcacagaagaggatacggctctggaggacgatgtaaaggagcaggaaaatgcttcagatacaggtaacaatcaaataaaagaagaatcggaagcagcggatgacaagaaagatttatcggaaccggattctgagaacgagaatgaaaaagcagacatggatgcgttcgaaacagatacatccgatgcagatacatcggattcagaaaatgacagcgcccaggacgaaggttcagttcaggtatcacgttcggctcatttttcgatgtttttgacttcagctgcaatggcatctccgtctgatgcaaaagaagaagagaacgagaacgatgaaaacgaaaaaaataaggcgattgtaggcgacgaagcagaagaagacaatttcgaacgcattctgggggattcatatgaaacggtaggcattaagaatgcatccgcagccgcatttgtaacttccgcgatggagcttggtctgacagacgtagctgttttgtcggcagtggaagtggaagaaattccacactggcagatttcgaagtctaaaaaagctaccaatctggacgaaaattttgaatcccaggtaacactttcccttccgtcagcggaggaaaaactggaaaatgacattgtgtttgtgctggataaatctaccagcgtgcagctggaaaatgaggcgttagagatgcttaaggagctgcaggcgcaggcaaaggaaaatggcgcaaaagtaaaggttggagtcgttattttcaataaagaagcgcacaagtctgactttatggatttgggaacccagtatgatgcgattgcggcagcgatccgtgagaatattagcagcggaacgaatctttcggctggaatccttgcaggcaagaaaatgctggatgaggatacgcaggtggcagcaggaagaaagagcctggtgcttttaagcgatggcattacctatatttttggggaaaaaccgacggcggttgcctggggatttgagaatgatggttcagaacattcctgggcgggaccggataactggattcttaaatatgggaataataaagcattatcggaggatgagtggaacgagcgcctgggtacaatcaaagcgcagatggatgcacagggcgatgaatttgaccattcatatgagccaggagatttaacgccatgtaccccacctgatgaaggaaaaaaatatgccaatagcgttgataaagcgctctatctttcctatgaggcatatctggaagcggcgaaggaacagtatcactgctatgcgatgccgattggttcatctgctggtgaaagctatccatggggaccgagctttgtgaaatatctggcagacggaaaaacggtaagttttgaagatatcaaaaatgatatcctttatgccgtcgatcgggactcgactgtggaagattatatgggttgggtcaaggatgactacaattttgacttaaagagcatcgaccgtctgactgttggcggcagggagctttctaaatggaaagatggaaataccgtttattttggaaatgaagacgtgaatgcagctcaatatcgttttaaggtggaatacgatccgtcggataaggaaggaggagaacatttcatctggacgatgaatgaggcggtaaaaaataatgaaccggtgcagctgacctatacggtaaaactggtaaatccgaagaacaatccaggagaatcgtatggacggtacgatgaagacggaagcgaagagtatgatggactttatacgaaccagaaagcagtgctgcatccggttggaagcgatcaggaaaaaggaaaaacggaagtattttcgaaaccgactgtatcatatacgattccgggaggagaacttccgacgattccagagggaggaacttctaaatcgaagacagcggaacagctggatgaaaattttaagtctcaagtggctttgtccttgccgtcagcggaggagcagctggtaagtgatgtggtgcttgtcttagataaatcaaccagcatgggactgaaagagcaggcattggaaatgcttcagaacctcaagaaagaagtgcaggaaaagggagcaaaggtcaaagtgggagtagtgctctttaacaaggaagcgcatacggatggatttatggatctggagacccaatatgaggcgattgaagcagccatttgtcaggaaattaagagtggaaccaatcttcacgcaggtattttagcaggtaaatcaatgttagaccaggatacaggagtggcagatgaacgcaagacactggtagttgtcagtgatggtattacctatatgtttaatgagaatccgacggcggttgcctggggatttatggcagattctccgaaacattttgcaggaccggataactggaaatccaagtatggaaataatcaggcaccgacggactggaatgcatggctgaccgacataggagccagactttcagagcagaaggatacacacgactatccatatggaacggaaccggatgcatcgcttattacaccggtggaggaagcaggaaattatgtgaattcgatcgataaggcattatatctttcatacgaggcgtacgcacaggcagcttcggaaggatatcactgctatgcgatgccgattacgccgcccggaacggcaagtaactatgagtggggaatgagtttcatgcggtacctcgcgaatggaaagcaggtttcatttgaaagtatagaaaatgatattttgtatgccgttgataaaggttctgttgtgaaagattatatgggctatgtgaaagaggattataactttgatttcgatcacttagaccagctgacagtagggggaaaagcgctttctatgtatcaggagggcaacacttggtattttggagacggagaaccgggaccgcagaattatcgttttaaagtggtatatgacgcgggaaataaggcagagacagagatgtttacctggtatataaatgaaccagtttcaaactttgcaccggtgcagctgacctataccgtaaaactgataaacccaaagacggcggatggaacctatggaaaatatgaccgggacggcagccagcactatgaagggctctataccaatcaggaggcggtcctgtatccggtagacagccgtggaaatgagtatcggccagaagaattcccgaagccgaccgtatcatatgtggtagaacatggaagccaggaaccgggacctgatcctaacccgaccccgaatccaggcaataacggaggcggaagccacggcggtcacggcggcggaagtagttctggcagtaaaaagtcttcgaccacaaccgcgtcgggaccggcagcacagccgacggaaccggttacgccggttgtaccagaacctcagccggttgtaccggcagaaggacttccgaagaccggggatacggatcggatggatgtgccgatggctctgctggcaattggaatgatggcagcagcttatgtattaatgacgggcagaaaaaagacggaagagtaagacgagacatagaaaaataaaaattgcccggttataagagcaggtttttagggcggcgccagaaataatggcgctgtcctaaaactatgctgttatctgtttcgttttgtatgcaaattaatacatcatttataaaaatatataatttgcttaacaaataaaggcgcagaacgtttcacgggcaaagatggagggaacgatgcaaaagtggacacggaaagcagcggctgtgatagctgtcatctgtctggcgttcggtacagcgggggtggcaatgcataaatgggatgaaatgcgtcaggagaaggcgcatgaagagctgaccgctcaggttgtgggaatgtcggaagcagggacgacaggagaaacaatgccggagaaaaaagtgccagaagtggaaaatgagatagatgagacggatgcaataaaggagacagaatatgtgtcagcaattgatttcgcagtgctggattcccagaatccggacgtcgttgcctggattcagattccgggaacacagatcaattatccggtggttcaggggaaggacaatgattattacctgcaccgtgacctgaacgggcagaagagcacggcgggcacgatttttctggactatgccgatcaggcagatttttcgtccctgcataatgtgctgtacggccatcacatgaagaatggaagtatgtttaaggacatttccagatacaaggatcagggctatttcgatcagcattcagaaatcgttctttatacgccggagcgggagattcatttaaaagccctggcggctgtctgcacatcgccggatgcgatccgccggaaaacggagtttgcatcgggagaagaatttgcgtcatatattcagcagatgacagcgggcgcgagcgcgtccgcgccggtcgaggggacgatcgtgcgtttgtattcatttgtgacatgcagctatgaatttaacaatgcccggacaattctatatgcgtatgaggcggcagaatagaatgggaaatagatctataacaggaggtaagaatatgaagaagttagagacaaaggggaggagccggaaacagaggcatcatttgtttcataaagaaatgaagcagatgaagcgtcttttgtcggtctgtttgtgcaccagtatgatcagtaccagtattggaagtacgacggcgctggcagcaacggctccgctgttggaaaagaatgaggcggaagaagaaaatcagaattttgtcctggatcaggaagagctgagtgaggtactattaaaagcggtgaaaggaaaaccggtcaaggaagatgccctaacctttgagggagaagaatcagaagcgtatgagacactgtttcaggaagatggttccctctttgaattgcatccggatgtgaaagcaccggacggaaaggtaaatttaaaggtctatgcgagactggatgaaaaagaggatctggatcattatacgatcacgggcgaggaagaaattttatttctgctgttaaatcgttcttctgagaaagaatatgggcagatagaggtagatggaaaacgaagcggaaaagtttcgattctctcatctaaagagttaaagaagcagatccaggatgaagaaatggaagcaagcgaagaaacgggagtttccatttcgaatggtgcggaagaaaaatcaaataaaacggctggagagtctgagaagaaagaaaatgtaaaagagacagattcgcaggaaccagaaaaagagaatccggtggaaactccggaaaaggtggacaagttagagaacccggcaagtgaaccggaaaaaggttcagaggcggaaaatccggcgaataaagcagaaaacggggcagaagcagagaacccggcaaacgagccggaaaagagtcaggaagcaggctcgggtgcgggtgatgcgggaaaaacaggtaccccagaagaaaaggacagtcagccggatgcagattcgggctcagaaaatgaaaagaatgattctgcaggcagcgaagcaggggacgtggcgcaggtatcgcgatcggatcattttaagatgtttctgacagcggcaccggcgacggcgagcgagatacagacggaagatgagacatcggagaaagaaacgaatacagccgaccagccggatgcggagacggaagtcgagatagaagacggagcagagcggctagagggcgagacatatgagagcgttcttcttaaaaatacggcagctactgcattcgtgacgaccgctgcagagctgggactttccggcagtgtggatgatgcggtctacacggtcaatacagattctgctgtacttaccctgacggtaccggcgggtgcgtttgaagaaaaagtaaagctgaaagcagaagagatcaaggacggaagcgaagaacatcagacattgagcgatcagatccatgaagaaggataccgcgcggattcctttacagcctttgatgtgaaatttgtaaacgaggcaggagaggaagtcgagccatccgaagaagtcaaggtcagcattcagtttaaaaagaatgcagttgaaagtgagacaggagaaaatctggaagagacaaaaatcctgcatatccatgaggatgtcatcacagaactttctgaggttgaaatccaggatagcacagaggacagtgaaaaaacagcaaaactgacctttggcgtcaacgaattttctattctgctggctttaaacgaggcagctgccggtgtggcagaggtaaatggggcagcgtatgatacgctggaagctgcgttcgcggcagcagatgatagggatacggtgaaggtgctgaaaaactgtggactgtcaaatgctgtttcagttgataaagctcttacacttgatttgaatggaaaagtagtaaaagtaaaaatagttccggaagcaaaagcaaaacagacaatcagtgcatttgcggttgcggaatcgggaacctttacggttttgaatggtctgcttggcggaagcggcaagggtgcagataaccgtgcgatcgaggcaaacggcggaacagtcattctgaggaatacgattctggcaggttttcaggcgttatctggaaacggcggcgctgttttgatgaatggaggtacgctggaagcagagaaatgtaatttcggttattttacaagagaagataataattacaaagaatatagtggacagggaaatttcgcccagagcggaggtgctgtctatacttctcaggcagcggttaaaatggagaagtgtaatttgttttataacagcgcgattgatatgacaggaacgactggacagtattggtttggcggcggtgcgctttttgcagatcgcggaacggtgacactgaatgaaaattatttcttctctaatacatctaaggattatggtggagcaatccatctggatgcggtgcagacggcagaattgacaggcaaccggattcggaattcacatgcttataaccatcggattacagagatggcagccagaggcggcgatggcggtgcgatttacagccgtatatcgaaaacagttacattgaagaacaatgtcattacagaaaatggcagcatgggaaatggcgccgggctgtgggtacttggagcggctgattgtgttctgacattggaaggaaataccattgctaagaatgaagcgggtcagcgtggcggcggtatgaagctgaatatggataagaacagccaggtgaatttaatcagtggtttgatcagtgaaaatagatcgtctggctttggcggcggaattgattacacgaatcacgagaatccaacgcttcatcttacgaatgttctgataacaggaaatcgggcatcgcgtggtgcaggaatctgggcgtgcccgacctctgagacagaggtttattcaactttgggcggcgctttttatggaaataaggcaactgggaagacaggcggcatttcctattcttatgaagcatcaggagatgagatccgctatgaaggaaccgatacaccggataagttctcgattcagagcaacccgccgagcgcaactacccacatttctgtttccggtcgttctctgggcggcggtgtgatcagatggtattctgatgaggcggaaaatcgctatcaggctggaaatccagaagcggatccggctatttataccaatacaaataagtcatttggtttacatggagagttgagtgaggagcaccagaaattggcgtcttcggaggcgcagcttgttatcagtgacaatgtttccaagcgtggcggcggtattgcaacgaacagtccagtcgtgattggtatggaatatgcagatgtggcggtagaagtaaccaaaaaatggaccgaagaaactcatccagaccacgtgtacgtggatctctaccgcgtaggcgatacgagcggtgaaaaagtgaagctcgacagtcacgcagaactaaatgcggagaataactggtcggcgtcgtttgaggatcttccgtcaaaatgcgtttcgaatggagaggtggaagattgtcactatattgtggaagaagaaacgctggaaggatggaagggaagttccagtacagaatatgacaaggaaaacaaaacctatcacattacactgaccaatgcaccaatccggtacggcagcctgacggtttccaaagaggtcaccggaagcggagacaaggaaaaagcgttcacgtttaaagtaaccttgcagggcggcactgcattgaacggaaattatggcgatatggaatttgtcgataatgtagcaacatttacattaaagcacggcgagagcaagtcagcagccggtcttccggagggaactgcttacacggtggaagagagcggaaatgaaggctataccgtgacgaaaacaggagatgtaggaacaatcgctggtggagaaacagcagttgtaaaatttgtcaatgccatgagcggaggcgataatccaactccaacaccagatccgaccccggatcataatggcggtggaggtcatggtggtcacggcggtggaagtggttctggcagtaaaaagtcttcgaccacaaccgcgtctggtccggcagcagaaccgaccgaaccggttacaccggttgaaccagaacctcagccggtcgtaccggaagagggacttccgaagactggagaggatcagatgaatgtgccgatgactgcacttacagtcggaatgatggcagcagcctatgtattaatgacaggaagaaaaaagacagaggaatagaacgagacatagaaaaataaagactccacggtcataaaagcaggttgatagggcggcaccggtaaaatggtgccgccctaaaactatgctggaatgtggctagctttagataaaatactccgcctcacttctgcgtgtatagttctgctccagcatcgcaacgtgggacagaaaagcctcgttgtcgaagtatttggcgccagctgggcaggctttgatgcaggcctggcacttgatgcagataccggtacaggtgtccggtgcatccgccgggatagaacccatcggacagactgttgcacagatgccgcatccggtacatttttccagatcagtaactggtttggctttcaggaagacagccggttttccgtcggtgccgagcggtgtgtaatatggtccgaccggatcatcgccgcgcacggcaatcggagctgggatttcggtcagggaagtgatcttttcagctgctttgatgccgaatgcatggatctgtgcgagatcatctgcatctggacgtccggttgccagcttgtcgctgaatacgtgctcggtcgggataccggcacccgcaatggtgtggaaaccgtgcgcctctaattcattgcgaagctcgatgagcccattgtcgaagttgcggtttccgaagacagccaccggaacggcgagcgcgccatttccctcaaaatgggtctgtacaaatgggagcatcttgttcgggatgcgtcccgcgtagaccggggtgccgatgacgagcagatcgtctgccccatatgtatgaactttttcgcggctttccggcagcgtgaaatcataggaatccatcgggacgccgagtgtatccgcgatggcctgcgccagcgtggtaacaacctttttcgcgttgccggtcgggctgaaatagactgcgtgtacgtgattgattttcatgaaaataccttctcttcatatgtttaaatttaattcggcaaaaaccttattatagtaggtattttaatggatttatggtggactgtcaatgaaactggagttttttggttactgggcacgtatgcgtgaatagtaatatgttttttgcagaatcgcccaaaatatcattacatatgtcttgtcacatgaaaaaatatgtgctatactggtgcggatgcacaaatgaagttttggattgaaagagaactctgtttgcgataggagcatagagtggcagatagtattttgcgatttgaaggctgaactatctgcaggataaaaagataagtgcaaacgtatggtatagaaaggaaggcaacaaaatggtctgggaggaaaattatgatgtggtcatcgtcgggtgtggcgtaggcggtctgtacaccgctttaaacctgccgtcggaagaccggatcttaatgatttgcaaggaagatatagagagctgtgattccatgctggcgcagggaggtatctgcgtgctgcgggatgagacggattatgatgcgtattttgaggacacgatgcgcgcgggacactacgagaaccgcaaggagagtgtggatatcatgatccgttccagccgggatgtgataaataatctgctgaaattaggcgtagggtttgacaaaaatccagatggcagtttaaaatatacaaaggagggcgcgcattcgcagccgcgtatctgtttccatgaggacatcacgggaaaagagatcacgacgaccctgcagacgcgtgtaaaagaacttccgaatgtagaaattcgggaatataccgttatgacagatattttggttgaaaatggtatctgcaccggtattctggcaaagaatgcagacggcgatattttaaagattcatgcgaaaaacacggttttggcgactggcggtatcggcgggctttacaagcattcgacgaacttcccgagcctgacaggtgatgggctggatgtagcaaagaaacacggcgtgcgtctggaacatctcgattatgtccagattcatccgaccagcctatacagcaagaagccgggacgcagctttctgatttcggaatcgacccggggcgagggtgcagttctgttaaatggaaagggcgagcgctttgtcgatgagcttctgccgcgtgatgtggtgacgcaggcgatcgagaaggagatggaaaaagaaggcagcgatcatgtatggctgtcgtttaaggcagttccggaggagacgatccggaaccattttccgcacatttatgaggagtgcttaaaagagggctacgatatcacgaaggaaccggctccggtcgtaccggcgcagcattattttatgggcggtatctatgtcgatcatttctccgagacgacgatggaccacctgtatgcggttggtgagacgagctgcaacggcgtacacggaaagaaccggcttgccagcaacagtctgctggaaagccttgtatttgcagagagagcggcaggcaagatcgccggacgggaggacgaagagtatgaatccaattacgatgcagcttgttgcggatgagtatatccgcatggcgttaaaggaagatatcaacagtgaggacgtttcgacgaacgcggtcatgccggaataccgcaagggagaggtacagctcttagccaaggcagacggtattatcgccggtttacaggtgtttgagcgcgtgtttaaacttctggacgaggcgaccgagataaaatttgaggtaaaagacggggataccgtcacaaaagggcagtttttaggcgtgatcaccggcgacatccgggtgcttctttccggcgagcggacggcgctcaactatttacagcggatgagcggcattgcgacctatacgaatcaggtggcgaagcttttagaaggaacgaagacgacgcttttagatacgcgcaagacgaccccgtgtatgcgtgtatttgaaaaatatgcggtcaaggttggcggcggcagcaaccaccgttacaacttatcggacggcgtgatgctcaaggataaccatatcgacgcagccggcggagttaaggcggcggttgaggcggcgaagaaatatgccccatttgtccgcaagatcgaggtggagacggaaaatctcgatatggtgcgcgaggcagtggaagcgggcgctgatattatcatgctggacaatatgaccccggacgagatggcggaggcgatccgcatcatcgacggacgcgccgagacggagtgttccggaaatatgacgaaggaaaatatcgcaacgatcacgaaattaggcgtagattatgtgtccagtggcgcgctgacgcactcggcaccaattctggatctgagcctcaaacatctgcgggcattataaaaatttaaaaactaagaaaggacagggaaaacaggatggaaacaacgatgacaggagtacagcggagaaagaaaatactggaaatgctgggacagtcatccacaccgctttccggcggggcgctggggcgggcagtcggcgtgagccgtcaggtggtggtgcaggatatcgcgcttctgcgtaccgagggacaccctgtccttgcgactgcccgcggttatgtgctggaggtgccgcaccagacggaacgcctctttaaaatgtgccatacgaccgagcagacgcgcgaagagctgaatacgattgttgatctgggcggcgaggtgctggatgtcatggtcaaccaccgcatctatggaaaggtatcggcgccgttaaatatccgcagccgccgcgatgttgaggcatttgtggaaaatatccggactgggcgttccacgccgcttttaaacgtgacatcgggctatcatttccatcacgtggctgccgatcaggaggagattctcgacgagatcgaggcagcgctgcgggaaaagggatttctggcggacttcctgtcatacgagcaggaagaggtggaaaaatagggggaaagtcaaaagaaatgaatttttgaaattattttaaaaaatatgaaatttcctgttgacattctttttcaaatgttatatactatctttgctgtcgatgagacagatgagcagttggctgagaggtcaggtgcgggaatggttacagtgccggataaaacggtcagaatcgcaaaatgaatatgagtctgtagctcagctggatagagcaacggccttctaagccgtgggtcgggggttcgaatcccttcaggctcgtcgaatctgtttcgacagattcctatggtggatatagcgcagttggttagcgcgccagattgtggctctggaggcctagggttcgaatccctatatccaccttccttttaaaaggatcttttgctgatgggctatcgccaagcggtaaggcacaggactttgactcctgcattcgttggtccgaatccaactagcccagttaaatatggggtattagctcagtcggtagagcacttgacttttaatcaagttgtccggggttcgaatccccgatgcctcattacgaagacacattgcagacgcgatgtgtctttttgtgtaatgggaaatcccttggaagtctctattacacaaaaaggcgctaacgtgccaatgatgcgcgctcgcgcgaaattgtaatatgaggaggttttaagttatggcaaaaaagtccatgcgcgtaatcggggagtacacaatgatcacagcggcgacctttgtcgtggcggcagccgtctatttctttctgattccgagcggtgtatcggtgggaagtatttccggtctggcgatgcttttgggaaatgtgataccgctgccgatttcagtgctgacctttattttaaatgcggcgcttctggtggtgggctttctctttatcggacgcgagttcggcgtcaagacggtgtatacgtcactgattctgccggtttttctgtgggtgtttgagcaggtttttccggattttgtgtcgatcaaccaggatgcgatgatggatacggtctgctatatctttgttgtcagcgttggtctggctcttttgttctggatgaatgcctcgtcgggcggtctggacatcgtggcaaagctcttaaacaaatatttccatatggagctgggaaaagcgatggcgcttccaggcatgtgtgtggcgctctcatccgtgtttttcagcgataaaaaactggtggtgctgggcattctgggtacatacttaaacggaattgtgctggatcattttattttcggtctgaatctgaaaaagagagtttgcattatctcggaaaaagaagaagagatacgccagtttatcctgcatacgcttcacagcggcgcgacgatctatcagggattcggcgcgtttgacaatgagccgaagacggaaattatcacgatcgtagataaaaacgaatatgcacagctcatgccgtatatattaaaaacagatccgaaggcatttgtgacggtgtatacggtgaatgagattatttatcgtcccaaaagatagaaaatgatgttactgataaaaaaactcagtaagcaaaaatgaacaaaatttgcttgacgtggtaagtgattcatgatatagtctcattgaagttagataagactaacccgtgaaaaggaaaatagaaggcagaaaaagccttttattttttaaaagatagttagccatatctaactaaaggtagatatggctaactaagagaagcagtcaggaggcaggaagatggaacgattgtttgaagaagtattcgtagaggtgtgtgcgccgactcttcgtggcatcaaaccgtcgaacttgttccgctatcagccgcagaaccgtgataaactcctggaagcgcttgatttctggaaccgggaactggaaccgtcggggcttcaggtgcgggcgcttaaagagtgcagccggacgggcgcgtttctgattctggtgtaccgcgaggaatggcttcgctttattctgggtaaaatatctgtacagcactttttaaaaaagtctggttaccagatgcagaagacggtcgatggctttttgaagcagctttccaaccggctttgtctggaacatgattttccacatgagattggcattttcctggggtatccgcttgaggatgttgttggattcattgaaaatcagggaaaaaattatacctgcagcggttactggaagacgtatggcgacccgcaggaagcaaaacggcggtttgattcataccgggaatgcacggaagtgtgccgggagaaataccgtcaggggacaccgattattcagcttgtaaaagccgcataataaatctaagtaagtaaattattcacaaggaggaaataaaaatgagcaaggtagcaattgtatactggagcggaacgggaaacacagaggctatggcaaattacgtagcagagggcgttaagaaagcgggtggcgaggctgatttatttacttccgcagagtttggcgctgacaaagctggcgagtatgacagaatcgcatttggctgcccgtctatgggggctgaacagttagaggagtctgagttccagccgatgttcgacgaggttagcccggttctctctggcaaaaagattgcattattcggttcttacggatggggcgacggcgagtggatgcgtacctgggagagcgactgcatgactctgggcgtaaccatggcttgcgagccggtaatctgcaacgcaacgccggacgaggcagcaggtgctgagtgcgaggcactgggcgaggctcttgcaaacgcataagtaaaatcgcataaaaacacatatataataagaagaagtacaattacctgcgaacgcaggacatcttaaattgccataataaagatgcttaaaaattgaaaatcagaaaaggaagtgtcctcccgcggcgcttccttttttgtgggcaaatatccccttttcgaaaactccaaaatgtgatatgataaaaaataaaactgtttgatttgactcaaacaacagtatcaatttacgaaaagaaacaacggagggaatgtatatggaagaaaataaaaaaccattggcagagggagaggagaaggaagaggctgtctccaagaactttatcgagcgcgagattgacaaagatctggcagagggcgtttacgatcatgtccagacgagatttcctccggaaccgaacggatatcttcatattggacacgctaaatcgattattctgaactctggactggcaaaagaatacaacggaaaattcaatctccgttttgatgacaccaacccgacgaaggagaagacggagtttgttgagtcgatcatcgaggatgtaaaatggctgggcgctgattttgaggaccgcctgttttttgcatccaactatttccagcagatgtatgagtgtgcagttcttcttattaaaaagggaaaagcattcgtctgcgatctgacagctgatcagatccgcgagtaccgcggtgattttaacaatcctggtaaggaaagcccataccgcaaccgcagcatcgaggagaacttacagctctttgaggagatgaaagaaggcaaatatgcggatggcgaaaaggtactgcgtgcgaaaattgatatggcatccccgaacatcaatatgcgtgatccggttatttatcgtgtagcccatatgcatcatcacaacaccggggacaaatggtgcatttacccgatgtacgatttcgctcatccgattgaggatgcgattgagcacatcacgcattcgatttgtacgctggaatttgaggatcacagaccgctctatgactgggtcgtaagagagtgcgagtttgagaacccgccgcgccagattgagtttgcgaagatgtatctgaccaacgtcattaccggaaaacgttatatcaagaaactggtagaagataagattgtagatggctgggatgacccgcgtctggtaaccatcgcagcgctgcgccgcagaggttacacgccggaatccatccgccgctttgtagagctggcaggtgtctccaaagcagataattccatcgacagtgcaatgttagagtactgcctgcgcgaggatctgaaattaaagaagtcccgtgtgatggcaattcttgacccggtcaagcttgttatcgacaactatccggaaggacagatcgaggagctggatgcaccaaacaatatggagaacgaggaacttggttccagaaagattccatttggcagagaactttacatcgaacgcgaggactttatggaggaaccaccgaagaaatacttccgtctcttcccgggcaatgaggtccgcctgatgaacgcgtactttgttacctgcaccggattcgagaaagatgcagacggcaatgtaacggttgttcactgtacctacgatccagagacgaagagtggttccggcttcaatgcaagaaaggtaaaaggtacgattcactgggtagcagcacagactgcactgaaagcagaagtacgtctctatgagaacctggtagacgaggaaaagggcaaactcaatgcagatggaacgctgaacttaaatccgaattccctgcgcgttctgaaagagtgttacttagagccgggtctgaaagaggcaaaagcatttgagagctttcagttcgtccgcaatggatacttctgcgtggactgccgcgacagcgagccgggcaaaccggttttcaaccggattgtttcgctgaagagctctttcaagcttccgaaataaatcgagaacaactcttgaaaatgtataaaaaaatacagaaaaaagcggctttgttctgatgaaaaaaggagaggacgggactttcagaatacattttagaatatgagcaaaatgcttgagaggtcttggcgattcttccgggggttattaagaaaaatgtagaaaaatgtagtaataacctataaaaagcaggttgtttttgctaataaaacaccctgctttttgtgcataatttatgaaaggcttggttgacaatcaggggggttactgttataatttaagtaaagtgagctgatcatgtcaatctgtggcttcacttgttacagttaaggggaaaagccccttataaattgctttcaaaaatggaatgcattccacaatacggaatcttactggtggaattttataagtataatttttcacaaagaaagcagaacctaaaataaataaggaggtgcaatgcacaatgtggactgaaccaactatgcctttcgggcagtcagttatcgtttctctgctgggtctttcggtagttttcctggctctgatctgtctggctctggcaattatggtaatttccaagattctccgctccgttgtttctgatggtgctaaggccccggccgcagcacagaaagcagcaccggctgtgtcggatgaagctgataaggaattacttgccgtgctgatggcaacgatcggggatgacctcggattgccgacagacaagtttaagatcttgagcgtgacagaagttaagtaatgagaaacaggaatgaaaggaaatcgaaaggaaggttagagcagttatgaagtatacggctaccctcaatggaaaacagtacgaagtagaacttgaaagaatcgatgcatacgagccaatgccgcgttacggcgaggctccggcagcagcaccggctccagtagcagcaccggcagcatcggcgcctgcaccagcagcaccggctcctgcaccagcagcagctccggcggcagcaccggcagcaggtgcaactaccgtagaggctccgatgccaggtaaaatcctgaacatcaaagtatctgcaggacaggcagttaagtttggtgagaccgtcatcgtgatggaagctatgaagatggaaactgaaatcgttgctccggcagacggtacagtagcacagattcttgtcaaagcaggcgacgccgttgacacaggtgcagcactggttaccctgaactaatagacgatactatgataaatagcaactgtttacaaaaaggaattttcggaactgaaaattctgtatgatacagttcaggcaacagattttgccgatttggaatacaaagcatcggcaaaatcccattactgggcacacatgtgtgaacagtaatgataaacattcgaaaggacgtaaagaattatgaaatatgttgctacgatcaatggaaagaaatacgaagttgaagtagaaaaattagaagcttacaaatctctggatcgtaatggtgtagcagctccggcagctccggttcttccggcatccgcaccggtacagagaccggcagcaccggctccggctccagttgcagcagcatcggctccagctccggcaccggcagcagctccggctccgaaggcagcagctccggcgggcgcaactaccgtagaagctccaatgccaggtaaaatcctgaacatcaaggtatctgaaggacaggcggttaaatttggcgaagtagtagttattatggaagccatgaaaatggagactgagatcgttgctccggcagacggtacagtcagcaagatccttgttaaggctggcgattctgttgatacaggagctgctctggttgctctgaactaggaggttaggtaatgaacttttttgaaatattaaaagagcttcttgcacagtcgggtttcgcagcattgacctggagaagctgtgtaatgattctcattgcttttgtattattatacctggcaattaaaaagcagttcgagccgcttcttctgcttccgattgcatttggtatgttcctggcaaacctgccgttggctgacctgatgaaggaaagcgagccgtggtataccgcaggtgttctgcgtatcatctacggcggtgttaagtccagtttgttcccgtgtctgatcttcatggcagtaggtgccatgacagactttggtccgctgattgcaaacccggtgagccttctgcttggtgcagctgctcagttcggtatctacattgcattcatgctggctaacgcaactggtctgtttacagtaggtgaggcagctgctatcggtatcatcggtggtgcagacggtccgaccgctatctatgtagctaacaacctggcaccggatctggttgctccgatcgccgttgccgcttactcctacatggcgctgattccgctgattcagccgccgatcatgaagcttcttaccactaaaaaagagcgttccatcgttatgaagcagctccgtaaggtaagcaaggttgagaagatcgtattcccggtattcgtagtactgttctgctccctgcttcttccgtccgtagctccgctgcttggtatgctgatgcttggtaacctgcttcgtgaatctggtgttacagagcgtctttctgatacagctcagaacgcactgtgtaacatcgtaactatcatgcttggtactaccgtaggtgcgaccgcaaacggtgagatcttcctgcgtgttcagaccatcgctatcgtttgcatgggtcttcttgcattcgcattcgctaccatcggaggtgttctccttggtaaggtgctgtgcgctgtaaccggcggcaagatcaacccgttaatcggttccgctggtgtatctgctgtaccgatggctgcccgcgtttctcagacagttggtgcaaaagagaatccgaccaacttccttctgatgcacgctatgggaccaaacgtagcaggtgttatcggttctgccgtagcagcaggtttcttcatgctgattttcggttaatcgaatattgatttttggctgttgcagccgggatctggctgcatctggcctgcgaaagaccgcagcgccggaagtaccggatcccgtttttacttatttatataggtagttatagaaaatttttttaaaggaggctttattgtggctaataaagtaatgtctttacacgatgccgtagaaaagtatgtatgtgacaacgatgtactttgtctcggcggatttacaacaaaccgtaaaccgtatgcagcagtttacgagatccttcgtcagggtaaaactggttttgtaggctggtctggcccggcaggtggtgactgggatgcgttaatcggtgagggccgtgtgagagcctacatcaactgctatactgcaaactctggttacaccaacgtagctcgtcgtttccgtgcagctatcgagaagggtgagcttacatatgaggattattctcaggacgttctgatgcttcagcttcatgctgcatctctgggtcttccgtacctgccggtacgtatgatgcagggctccggacttgttaagttctggggtatcagcgaagagaagagaagaaccatggaaggtgttgacaacctgaaatgcgtagagatcgagaacccgcttgagccaggcgagaagctgctggctgttccggttccgaagcttgactgcgctatcatccatgttcagcaggcatctccggatggaacctgtatcatcgatggtgatgagttccatgacgtagatatcgctgtagctgcaaaacgttgtatcgttacctgcgaggagatcgtaagtgatgagtatatccgtcgtgacccaaccaagacaagaatctttggtgagtgtgtagacgccgttgttcgtgcaccgtacggtgcttggccggcacagtgctacggctattatgatgatgatgataagggcttgaaagagtacgacaaggcttccaagtaccttgacgctgaggatgctaaggcacagcttcagaaggctgcagacaaagctgctaaggctgctgctgctaagccggaagatgagaagcttgcaaaagctgcagaagttgctgcacaggctgcaaaagatgctgctgacggcaccaagattccggagaccttcaaggattaccttcagaagtatgtatatggatgcaaggatcaggatgatctgctcaacgtactgggcggcgctcgcctcatgaaccttaagaatgagccgcatcttggctattctaccagacattaattgagggagggaaaatctaaaatggctgattatacaaagtatacaaagcaggaaatgcaggcttacgccatcgcaaaaaatattaaagaaaatcagatcgttatcgttggtaccggtcttccgttaatcggtgcatccctggcaaaacgtgttgtttgcccgagctgccatccgatcgtagagagtggtcttatggattgttctccgattgaggttccgcgttctgtaggtgacaaccgtttcatggctcactgtgcagtacagtggccaaacgttcgtttcgtaggtttcgaggctaatgagtggttacatgatgctgatcgtatgatcgcattcatcggtggcgctcagatcgacccgtacggaaacgttaactctacctgtatctttggtaagggtgattatgttaaacctaccacacgtttcaccggttctggcggtgcaaacggaatcgctaccttctgcaacaccatcatcatgatgcagcatcagaagagaagattcatggagcatgttgactacatcacaagctgtggctggatggacggccctggcggacgtgagagagcaggtcttccgggcaaccgtggaccgcagatggtagttaccgatcttggtatcatgaaattcgacgaagagaccaagagaatgtacctggcttactactatccattctcctctccggaaatggttcaggagaacactggtttcgagatcgatacctccagagctcagctgatggaaggtccggatccggagatcatccgcgttattcgtgaagagatcgacccaggtcaggcattcatcaaagttccgaaggagactaagtaattagccttccatagggaatcaagacagatatcatttctgtcgattaattagttactgattgcaggcgggacaggagacgaactgtcccgcaagcaattcatttataaccatttttattttttattttataaggagaaaagaagacatgaatatgtattcaatgccaggatatttccagaatatgcctaccgttggtaaagctctggttaatccgaatccggaaaacgagcaggaactgaaggctgttgagaacgacatccatgagtccattaagcaggctcttgatgctggtatcacaaccgaagagaagttaaacgcacgtggacagctttctgctacacagcgtatcaacgccctgatcgatccaggtacatggtgcccgttaaacagcctttacaatccggaagacaaccgtttccagacaactaacgttctgaatggtcttggccgtgtaaatggcaaatgggtttacatcatcgcttctgataacaagaagatggctggtgcttgggttccgggacaggcagataacctgctccgtgctgcagataccgctaagatgctgcatctgccgttagtatacctgttaaactgctcaggcgttgagttcccgaatcaggacaaagtatacccgaaccgtcgtggtggtggtacaccgttcttccgcaacgctgagttaaaccagcttggtgttccggttatcgtaggtatctacggaaccaacccggcaggtggtggttaccacagcatttccccgactatcctgatcgctcataaagatgcgaacatggcagttggtggcgctggtatcctttccggtatgaacccgaagggttacatcgatgaggaagcagcagagcagatcgttaacgctcagatcgagaacagcaaacatcacgttccggctccgggttccgtgccgatccactatgatgagacaggattcttccgtgaagtttacgaggatgatttaggcgttatcgagggaatcaagaagtacatcaactaccttccgtgcttcaacctggagttcttccgtgttgacagcccgaaggctccgcagcttccggctgaggatctgtacagcatcatcccgatgaaccagaaacgtccgtacgacatctacgatgtaatcggccgtctgttcgataacagtgagttcttcgagtacaagaaaggctacggtccggagatcgttgctggtcttgcaaaagttaacggccttctggttggtgttatcgctaacgtacagggcttactcatgaactatccggagtacaaacagggttctgtaggtatcggtggtaagctgtaccgtcagggtctgattaagatgaacgagttcgttactctgtgtgctcgtgataagacaccggttatctggctgcaggataccacaggtatcgatgtaggcgatgacgctgagaaggcagagctgcttggtttaggtcagtccctgatctactctatcgagaatgctaagcttccgtctctggaggttactcttcgtaaggcaagtgctgctgctcactacgttctgggtggtccgcagggcaacaacaccaacgtattctctatcggtacaggtgcttgcgagtactacgtaatgccgggtgagaccgctgcaaacgctatgtactccagaaagcttgttaaagctaaaaaagctggcgagccgcttcagccgatcatcgacaagatgaacgctatgatccagatgtacacagacaaatctcgtccgaaatattgtacaaaacagggtatggttgatgagatcgtagatctgaccgatcttcgtccgtacatccaggcatttaccgaggcttattatcagaatgctcaggctatctgcccgatgcatcagatgctggctccgagatctactcgtgagttcatcaactacggtaaataattatcaaattaaaacggcattgtgataggtgccgctaagataacattttaaaaagagaaggcgcgtaagtacgcggctgacagtgatagtgtaaatagtgataagtaacaaattgatagtgtgaatagtgtgaggctctggcgaagcggcttgtctgtatgactgtaaatgaaccgttttgccggatgcttgcagataaatcgggcaaaggaactggaacctttgctcgatttattggtatactcaggcagataagtaataagtaatagttttgttaagaattattttataacattttcaagattttacagcgacttttagttgattttgtggtattatgatgggtggagacgatgtgatagcacggatctgccaaaacatcgttgaaacaaaaatcaggcatagaaagtcagtattgaaaggaaaaagatacatcatgagcgaaattttcactttaggtatcgacgtaggctctacagcttccaaatgtatcatcctgaaggatggcaaggagatcgtaggtaagtctctgattgacgttggagcaggtaccagcggtccaagccgtgccatcgaggcagttctggaagatgcaggcctcaagaaagaagatatggcattcacactggctaccggttatggacgtacatctctgatggacggaattgccgataagcagatgagtgagctgtcatgtcatgcaaagggcgcttatttccttttcccgaaggttcataccgtaattgacatcggcggtcaggacgtgaaggttcttcgcgttgaggacggtgtcatgacaaacttccagatgaacgataagtgtgcagccggaaccggaagattcctggatgttatggctcgcgttctcgaagttgaggtaagtgatctaggccgtcttggcgctatgtccaagaagcaggtaggaatcagttccacctgtacggtttttgcagagagtgaggttataagccagttgtcgatgggaacggataaatgtgatatcattgccggtattcatcgttcagtggctcatcgtgtcacgggtcttgcccaccgaatcggtgtagtgccggatgtcgttatgacaggcggtgtggctcagaaccagggcgtagtagatgcgcttgaggctgagcttggcgtaaagatttgtacatccccgctgacacagtataacggcgcgcttggcgcagccctgatggcatatcaggtagccagccgtcagaagtaactaagttaatttttaagaatggaggataattattatggcaaaacaagttagtcctggtgttcttgcgcttcgtaaagtcgtagatgacgtacacaaagaggcgcgtgaggccaaagcaagaggcgagttagttggatggtcttcttccaaattcccgtgtgagcttgcagcagcatttgatttacacgttatgtatccggagaaccaggcagctggtatcgcagctaaccgttacggtgagctgatgtgccaggcagctgaggatcttggatatgacaacgatatctgcggttacgctcgtatcagccttgcatatgcagctggtgtacgtgtatcccgtaagtatgatccggagactggtgaatacatcatcgatccgagcacaggtaaaccattaaaagatgctgacggcaacgtagtgatgggtgaagacggaaaaccgaagaaggatccgaagactcagactccgtatctgcagctggacaacctgcttgagattgaaaaactcccggatggtccggaaaaagagaaacgtcttgaggctatttctccgattcgtcagatgcgtattccgcagccggatttcgttctttgctgcaacaacatctgtaactgtatgacaaaatggtatgagaacatcgctcgtatgtgtaacattccgctgatcatgatcgatatcccgtacaacaatacagtagaagttcatgatgagaatgttaaatacgttcgcgctcagttcgacaaagcgatcaaacagctggaagagctgacaggcaagaagttcgacgagaagaagttcgagcaggcttgtgcaaacgctaaccgtaccgctaaggcttggctgaaagtctgtgatttcctgcagtacaaaccggctccatacagtggatttgacctgttcaaccacatggcagacgttgtaactgcacgtgctactgtagctgctggtgatgcttttgaattacttgcaaaagacctggaagagacagttaagaagggtgagaccacaactccgttcccggagaaataccgtgttatgttcgagggtattccgtgctggccgaaactgccggctctgttcaaaccgctgaagacccacggtgtaaacgttactgccgttgtatatgctccggcatttggtttcgtttacaacaacatcgatgagatggctcgtgcttactacaaagctccgaactctgtctgcatcgagcagggtgttgactggcgtgaaggcatctgccgtgataacaaggtagatggcgttctggttcactacaacagaagctgtaaaccgtggagtggttacatggctgagatgcagcgtcgctttactgctgacctgggtatcccgtgtgctggtttcgacggcgatcaggctgacccgcgtaacttcaatgctgctcagtacgagactcgtgtagagggtctggttgaggcaatggaagcaaataagcaggcaaaggaggctaaataaccatgagtgttaacgcattattagaagaatttaaggtaaaagctgcaactccgaagcagcagcttgctgaatataaagctcagggcaaaaaagtagttggtgttcttccttactacgctccggaagagcttgtatatgccgctggtatcgttccgatgggtatgtggggttccaacactaagaccatcagccgtgcaaaagagtactgcgctactttctactgcaccatcgctcagttagctctggagatgctgctggatggaactatggatcagttagacggtattatcacacctactatctgtgatactcttcgtccgatgagccagaacttccgtgtagctatgggcgacaagatgaaagttatcttcttagctcatccgcagaaccgtttcgaagagtttggtcttcagttctgtatcgatcagtacaaccatgtaaaagctgatctggaagagatcgctggaagaaagattactgattctgacatccaggatgctatcgttgtatacaacaagagccgtgcagctcgccgtgagttcgtaaaactggctaacgagcactgtgatgttatcacaccaaccaaacgttccgcagttctgaaggcattctacttcatggagaagccggaatacactgcaaagctgaacgagctgaacgcagagctggctaaacttcctgtctgtgactggaagggaaccaaggttgttacctccggtattatctgtgataatccgaagctgctttctatcttcgaagagaacaacatcgctatcgctgcagatgatgtagcacatgagacacgttccttccgtgtagacgctccggaagacgagctggatccggttagagcactggctaaacagttcgctaacatcgattacgaagtacttctgtacgatccggaatctgacaagaaccgtcgtggtgagttcgtagctaacatggttaaagagagcggcgctcagggtctggtactgtttatgcagcagttctgtgatccggaggagatggagtatccatacctgaagaaagctctgaacgatgcaggcgttccgcacatcaaactgggtatcgaccagcagatgagagacttcggtcaggcaagcactgctattcaggcattcgctgacgttcttgcacttcagaaataatagaagattcgtttgggaaactgaatgatgagatagaaacgcccccgcaggagattttcttgcgggggcgtttgtttggtgcgccttgcggcatacatttatttattccttagtggagtcagaagaactattatttgcaatttgctcatccgtcacagacccctggcggtagccgctgcctggttcctgtttggagttcttctttggagcatccggctttttgtctccggaagtagaagaggtttctttggacggaccggagcttccggaattgctgtggctgccggagcttccgttggaattgctgctatcatcgctggaagaatcttcggatgagccggtgctggagtcagagcttccggaatctggcgtcctgctggagctggtggctgtttttttcgtctttttggaggagctgttctggaaatcgtcccagctttcgttatcgaattcattggaagccgcggtctggcggctctgagcgatgccgtttaccgtccaggcgccgtctgcgtttacagtgtagccgtccggtgtcgtggtggaggttagaagccagccttcggcgtcgaaatagtagcattcgctgacgccgtcctggttgccgtcgatccagcgccagccatttgccgcccaggtgttgtcaccgttgtcgtaccaccagcgggcagcattgtcaccagctccatttttccagcttcctgccatcgccgggaaagcgacggagagggagagaagaccggttgttaagcctgctaaaaataagcgtttattaatcataaagtgaaatctcctttatttctcctgcttaaatgtatgtcccatataataggataattctgccgcactgtggcggacctgatcctgcaggtgcagaagatgtgtgtcatcttcaatacgggaatacggtgcgatgattccgaccgaagcggaaatgcgtccgtcaataccgtaaatgggagcaccgatcccgactgcatccgggacgtattcgccgtgggaaacggcaatgcccttctcacggatggtgcggagttcttctgccaattctgcgggatccgcctttggaaatgcctcaggacgggttaagcgtgtgtccagatagcggcggatgtattcgtcgctctggaaagccagaagcgctttgcggatcgcaccgcagtgcagatccatctcatagccaaattcttcgacgaccttgaggtggttcggaccgtccgttttgtcaagtaccagtcccttgtcgccaacctggatgatcagataggaatcctcacgggtacagtaggagaggttcttgagaatcggaagcgccgcatcctgaatccgcacattgtcagccgccgcccgaccgagagagatgagggcgggaccaagctggtaggtgtgcgcgtgttcatcgcggatcacgtattttttttcacaaaatgtctgcaaaatccggtggattgtgctgggcggaagcccggttgattcggaaagttctgcgatggaatatttgtggttggcttcttttaaaagttccagaagttccatcgcgcggagaagactttgtatcatgcaaagaatcctcctgtgttattctgtgatttcctcaaccgtcacggttgtgctgtcatccggggctgcgtcggaatcttctttctcggaagaagattcgccgtcctcggaaaccggagcatctgcgcggacggtttctgttttgactggttcttcggaagagacatctgcatcagccggagctttttcgctttcctcagaatgttcagaagtttcctctggagtctcagccggagcttcctttttctccggatttaaggaaacatagctgcgttcggaggcagctgtatcagaagccttggaagcttctttatcgccggcatcgtcaaaatcatcgaaatcatcttcaaagtcgtggaaatcctcatccagttccttgtggaatgatttatactgtaagacgtaagaaacaccagctgctgcagcgccgacgatagctgccagtgtcagtaatttaccaaaatgtttttttgccatggttgatactcctctctatacgattcgatatccttattgtaatacgaaacgcctaaaaaataaagggaatcttttgtgaacaacgggaagtgtgtgaatcacgtgttacggggtacgtatgcgtgaacagtaacacaggggcggtaattatgtacaggaagcatgagaaaaatgcttgttgtcataccggaaatcatgtagaataaaattatatatttgctaggtggtgataaaaataaaatgatgaatttgaatacaaagatgacggcgcaggaattggaacaaatgattgcacagatggaaaggatatttacggttgtacgtattttagataaagatctactccataagatggacgtgaggaacggggaactccgatccgaggactgcaaatgctattcgttctgggaaaaaggaaagaattgtgagaattgtgcggcacagcgcgcgcttgcgatgaagggacagtgcatgaagcttgaatttatcggtctgaagatgtatcaggtcatcgcgaagtatctggaggtggatggagttccctgtgtggtggagatgatttcctgtctggatgatgagacacttcttgacgcagagggaagagaagcactcgttaagaaatttgcacactacaggcgcgagctgtatgcggatgcactgacgaggagctacagccggagatattttgaagatcagttaaaagagcagcggatggatgccggtatcgcgatgctcgatctggatgattttaagacctacaatgatatatatgggcatgtggcgggcgataaagtgctggtgacggtgtcggcggcgattataagctgtatccgtaagacggaccgcttggtgcgttatggcggggatgaattcctgcttgtgatgccgggcatcagtctggaggcatttgttgagaagctgcatcggatacaggatctgatctgcaacatgagtgttgaaggatatccgcaactgaaattgtcagtcagcatcggcggtacgctgacgaacggggagacagtcgggaaggcgatgtgccgggcggacgaatttatgtatcaggcgaagacctccaagaacatgattgtgactgagaaagatggacagtggacaccggaggagatcgtggtagccgggcggcgcaatgcgagtcgttaccgcattttgatcgtggacgattcggagatgaaccgtatgattctctcagaaatgctgaaaggcgaattcgagattctggaggcagaaaatggttcagcatgtctcgacatgctgaaccgttatgagacgaagatttccctgattcttctcgatatcgtcatgcctgggatgaacggcttcggggttctggaatacatgaaccgcaacaacctgatcggggatatcccggttatcatgatttcgggcgaagattcgggcgaggtcatcaagcaggcgtatgagtggggagtttctgattatatcaagcgcccgttcgatatggaggttgtacaccggcgtgtcttaaatacgatcaaattgtatgcgaaacagcgccgcctggtggcaatggtgacgaaccaggtttttgagaaagagaagaatagccggatgctgatcagtgttctgagcgagatcgtggaatttcgaaatggcgagagcggtatgcacgtactcaatattaatatattgacgacgatgattctggaacagctcgtcaagaagacggacaaatatcccttgtcctggtcgaaccggatgctgatcagcacggcatcatccctgcatgacatcggaaagatcggaattgacgagaagattttgaataaaccgggtcgtctgacgccggaggagcgtaagatcatggaaaaacatacagtgatcggtgcggacatgcttgcgaatcttcagatgtatgaggatgagccgctgatgaaagtggcgtaccagatctgccgttggcaccatgagcgctatgatggaaaaggatatccagatggtctaaaaggggaggagatcccgatctcagcgcaggtggtggcgctggcggatgtgtatgatgcgctgacaagtgagcgcgtctataaaaaggcttattctcatgaggaggcggtgcagatgatctgcaacggagagtgtggtacatttaacccgctcctgcttgagtgcctgtgtgagattcaggatcctattaaaaaggagctgcaggaggcagcataccggagtgagatgagtgatccggagcgaaaaaataagaaatttgaacattatgacaattcacagaagaagtttttcggcgcggtgacgcaggcgattgaaaaagagtatggaactgcgggcgaggagctgagccgtatgaaaactgaggaagagaaataacaggaggctgtcatgacaattcaggaatgctacaaagaaatgggcggggattttgaaggagttcagaaacgctttggaggtgtggcgctggtggaaaaatttgccatcaagtttctgagcgattccagctttcaggatctggaggatggattaaaagaaaaggatgcggagaaagcattccgcgcggcacataccctgaaaggaatctgtctgaacctgggctttgatgccttctatgaggtaagcgcagcgctgaccgaaaaactgagaggcagagaactgaccggatacgaggcagattttgcatcggtaaaagagtgttatgagaaaacggttgcggcgattaaggcatttgaggagagcaattaatagaacggggagaaatggaatatttcagttctccccgtaaaatttactaaaattttagcactcaacacttgacggtgctaacagaacgtgttataacatacttcgtaagaagaagatacatatctgattacgaaagaaaagcaatcagatggaataaatttggatggataaggaggagccaataatgaagttaacaccattatttgacagagttgtattaaagcagttagttgcagaggagacgaccaaatcaggtatcgttcttccgggtcaggcaaaagagaaaccgcagcaggcagaggtaatcgcggttggtcctggcggagtggtagatggaaaagaaatcacgatgcaggtaaaggttggcgataaagttatctattcgaaatactcaggcacagaagttgagctggacaatgagaaatatgtcattgtaaaacagaatgatattctggctgttatcggttaatcgatgggcaggatgtctggaagacagatgctgatcggaacgtttattcaagaaaattatggaggttgataaccatggcaaaggaaattaaatatggcgtagaagccagaaaagccctggaagcgggcgtaaatcagttagcagataccgtaagagttacattaggaccgaaaggcagaaacgtagttctggataaatccttcggtgctccgctcattaccaacgatggtgtgaccattgcgaaggagatcgagctggcagacccgtttgagaacatgggcgcacagctggtgaaggaagtagcaaccaagaccaacgatgcagctggtgatggtactacaaccgcaaccgttctggcccaggcgatgatcaacgaaggtatgaagaacctggcagcaggtgctaacccgatcatcatgagaaagggtatgaagaaagccacagatgcagccgtagaggcaatcaaaggcatgaagaaggacgttaagagccaggcagatatcgcaagagtcgctgctatctcttccgctgatgaggaagtaggccagatggtagcagacgcgatggagaaggtttccaaagacggtgttattaccattgaagagtccaagactatgaagaccgagcttgatctggtagaaggcatgcagtttgaccgtggctatgtatctgcatacatggcaactgatatggagaagatggaagccgttctggacgatccgtacatcttaattaccgataagaagatctccaacattcaggagattctgccgctgctggaacagctggtacagtctggttccaagctgctcatcatcgctgaggacattgagggcgaggcgctgaccaccctgattgtcaataagctgagaggtactttcaccgttgttggtgtgaaggctccgggttacggcgatagaagaaaagaaatgttaaaggatatcgcaaccctgaccggcggtactgttatttccgaggaactgggacttgaattaaaggataccaccatggatcagcttggtcgtgcgaaatccgttaaagttcagaaagagaacaccatcatcgtagatggctgcggcgataagaaagccatcgcagaccgtgtggctcagattaaggctcagattgaggaaaccacttctgattttgaccgtgagaaactgcaggagagactggctaagatggctggcggcgtagccgttatccgtgttggtgcagcgaccgaggctgagatgaaggaagctaagatgcgtatggaagatgccctgtccgcagcaaaggcagctgttgaggaaggcatcatcgcaggcggcggatctgcatatgttcacgcagcagcagaagttcagagggtagtagacggactggaaggcgacgagaagaccggcggccgtatcgtcctgaaagctctggaagctccgctgttccacatcgcagcaaacgcaggtctggaaggctctgttatcatcaacaaggtaaaagagtccccggtaggcgtaggttacgatgcttacaatgaggaatacgtagatatggtagaagcaggcatcctggatccggcaaaggtaaccagaagtgccctgcagaacgcaaccagcgttgcatctaccctgcttacaaccgagtccgcagttgccaacatcaaagaagatgcaccggcaggtccggcagcaggcgctggcatgggcggcatgatgtaagtaagagagccggaaaatggcggaagatgttacatcagagatgcagtatcgaatgtagaaaataaaaatggtaatttatagaaagaatctctgacaggcagctgccaggggagagaaggactgctatgcgaaggtgtggcagtccttcttttttggtgaaaaaattggcagggaaatgaggctaaggatgactgcattattaatacttatctgattggtattatttataagatacactaattaaatggcgtaagtaaattctatcgtcaacccctttattctccggttgacatatttcaaaaaacttgctaaaatcaattattaacatcagacagttttcaatgtccagtgtttaaaatttacgaaagtgagggtaatataatgggtaagattattggcgatggcattacatttgatgatgtcctgcttgtgccgtcctattctgaggttattccgaatcaggtaaacttgacgacacatctgaccaagaagattcagctgaacatccccctgatgagtgccggcatggatacggttacagagcaccgcatggcgattgcaatggcaagacagggtggaattggtattattcacaagaacatgtcgatcgaggcgcaggctgaggaggtcgataaagtaaaacgttctgagaatggtgtaatcactgacccgttttatttatccccagagcatacattaaaggatgcggatgagctgatgggcaagttccggatttccggtgttccgatcacagagggaagaaaactggttggtattatcacaaaccgtgacctcaagttcgaggaagatttctccaagaagattaaagagtgcatgacttctgagcatctggttaccgctccggagggcatcaccctgacggaggcaaagaagattcttgccaaggcacgtgtcgagaagcttccgatcgtggacaaggattttaacctcaagggtcttattactatcaaggatattgagaaacagatcaagtatccgttctctgcaaaggatgcacagggacgtctgctctgcggcgcggcagtaggtatcactgcaaacgtgctggatcgtgtggaagccctggtgaaagcaaaagtagacgtagttgttctcgactctgcacatggacattctgagaatgttcttcactgtgtcagaatgatcaaggaagcatatccggatctgcaggtaatagcaggtaacgtagcgaccggagaggcaacaaaagctctcatcgaggcaggcgttgacgcggtcaaggttggtatcggaccgggttccatctgtacgacccgtgtcgtagcaggtatcggcgttccgcagatcaccgctgttatggactgctacgcagttgccaaagagtacggcattccgatcatcgcagacggcggtatcaagtattccggcgatctgacgaaggcgatcgcagcaggcggcagcgtctgcatgatgggttccatgtttgcaggatgcgacgagagcccgggaacttttgaactgtaccagggaagaaaatacaaagtataccgcggcatgggttccatcgcagcgatggagaacggcagcaaggatcgttacttccagagcgatgcgaagaaactcgttccggagggtgtagaaggacgtgttgcatacaagggaatggtagaagataccgtattccagatgctcggcggtctgcgtgctggtatgggttactgcggcgcatcggatattccgactcttcaggagactggacgtttcatcaagatttccgcagcatccttaaaagagagccatccgcatgatatccacatcacaaaagaggctccgaactacagcgtggatgaataaaaattggatagcataagcaatcgataagattgtaaacgatataaaagcggcgtttctgcttcagcagggatgccgcttttttggcgggttactgttcacgcatacgtgcccagtgacggaatttgccgtggcttcgcatttaaatacggcaaattcctgctgccaccacgttttcttacggcactttcggttccaaaagtgcctacccgtgaacagtaactttggcggattctttttctcaaactcttgtgaaaaaaccggggatacggtataatgatacattagaatagtagaaatataacaattatgcaggaaagactgtggatattcagaaaacgattgcggcggattacgaaagggatatttgcgataccgaggcagcaaatcgggcgtatcagacggatagaaacaggtaacaggaggattagtatgaccagaagagaactgagagaacattgctttaagctgcttttctgtgcggatttttacccgacggatgagatgcaggagcaggtggatgtatattttacagagccgaaagaggaggacgatgttccgagcggaatcggcgatatcatccataatccgatgttagacacctttgacggcggatacgtaaagagcaaggttgagaagattctggatgtgcttccggagcttgacaaggcaatcgatggggttgcacagggatggactacccgccgtatgggcaaggtggaactgacgatcctgcgcctggcattatacgagatcaagcacgatgacgatgtaccggagaaggtagcgatcaatgaggcggtcgagctggcgaagaagttcggcggcgatgattcaccggcatttatcaacggcattttagcgaagctggtataagcgatggctggcgtatattcggtttcgcaggttaatgcatacattaaaaatatgttcgcacaggactttgccctgaaccggatttcggtcaagggcgaggtttctaactgcaaatatcatacgtccggtcatatttattttaccttgaaagacggtctgggagcgatgcaggcagttatgtttgccagtaggcggaagggacttacgttccgtctggaagaaggacagcaggtggtcgtcaagggcagtatcgaagtgtatgagcgggatggaagataccagctctatgccagcgagatcacgctggacggcacgggcgatttattccggcgctttgaaaaactgagaaatgaattagaagaaatggggatgttttccccggaatataaaacgccgatcccaaagtatgcaaaaacggtcggtatcgtgacggcgagcaccggcgcagcaatccgggatattatcaatatctcgggacggcggaacccttacgtgcagcttgtcctctgtccggcactggtgcagggagcaggggcagcgccgagtatcgtgcgggcgatccagaccctggatgcgctgcatctggatgtgctgatcgtcgggcgcggaggcggttcgattgaggatctgtgggcgtttaatgaggagagtgtggcgcgggcgatttttgcgtgccggacgccggtaatctcggcggtcgggcatgagacagacgttacgatcgcggactatgtggcggatctgcgtgccccgactccttcggcggcggcagaactggcggtttttgattaccacctgtttgagcagcagtgcattgcggcggcacagcagatgacgaagcggatggagcagaaggcggagcagtatgcctatcgcctggagcagtttcgtctgcgcctgcagcttcacagtccgcagagccagttaaatgagagacggcagtatctggaagatgcgagagttaagatggcgcgccagatggagaaaaaggtgtccgatctgcgccatcgtctggaactggtgtgcagccggatggatggtctctccccgttaaaaaagataagcggcggatatgggttcgtgacggatgcagatggaaaacgtgtggagacagtgacaggattgcaagctggggatacgctgaccgtccgtctgccggatggacgcgtggaggcagagatccgggaggtttatcaggaaaacctgcctgggtaaaaaagtggttcattgtgttgcgtgtgaatcataacagagagatttgagaacacgttttctttcaggaaagattccgagagtatattagataaaacaggaggcaggatcgatggaagaaaataaggaagaactttcgatcgaggaaatgtttgaccgtctggatggcattatgcggacgctggaggacagccgcagcacgctggaagaatcgtttgcgtcgtatgaggcgggaatgcgtctggtccgcgcctgcagtgaaaagatagataaggttgaaaaacagattatggtcgtaaacggcgaggagacggaggcgtgacagagatggaaaatgcaaaggaacggctggcacaggcagtcaaagaagcggaagagattgtatattcttatcttccggcagaggaagggcatcagaaaacgatctttgaagcgatgaattacagcgtgaaggcaggcggcaaacgccttcgtccgattctgatgcgtgaggtataccgtctgtttggcggtcagggaaaagagattgagccgctgatggcggcgatcgagatgattcatacatcttccctgattcatgacgatcttccgtgtatggacaatgataagtaccgccgtggcaaaaagacgacctgggttgcatatgggtatgatatggcagttctggcgggagatgcccttctgatctacgcgatcgagacggcggcaaaggcatttgcgatgacgccggatgcggcaaaggtgggacgttgtatccagattttatccgaaaaaacgggtatttacggcatgatcggcggtcagacggtggatgtggaactgacgaatcagccgattccgaaggataagctggattttatctaccgtttaaagacgggagcacttttggaggcttcgatggtgatcggagccgtgatggcgggcgcgagcgaagctgagtgcgggacagtagagcgtatggcggcggcgatcggtctggcgttccagatccaggatgatattctcgacgttaccagcagccaggaggtgcttggaaaaccggttctgagcgatgagaaaaacaataaaaccacttatgtgacattggagggaatcgagaaatcgaagcatgatgtcaaacagctttcggagacggcggttgatatcctctattccctgcctggaaagaatgaattcctcgaagagctgatcgagatgctggtcagccgtgaaaaataaaaaatccaatcgaagaccggggacgacagcggatgtggaaaacggtttgggggatgaaagaatggtattagatacgataaaaggaccggaggatgtaaaacggttgagcgaggaagaacgcaaggagctggcggcggaaatccgcgagtttctgatcgagacgacaagccggacaggcggtcatttggcgtccaatttaggcgtggtggaactgacgattgcaatgttctgcgcactgaatcttccgaaggataagattatttgggatgtagggcaccagtcctatacgcacaagattttaagcgggcggaaggataattttgatgggctgcgccagtatgggggcttgagcggtttcccgaagcggaaggaaagcccgtttgatgcgttcgacacgggacacagctcgacttcgatttcggcggggcttggtatggcacaggggcgcgatctgctgggcgaggattattcgatcgtttccgtcatcggggacggcgcgctgaccggcggtatggcgtatgaggcgctcaacaatgcgggacggctcaagacgaattttattattgttttaaatgataataatatgtccatttcggaaaatgtcggcggtatgtcgcggtatctgaataatcttcgtgcagatgagggctacaatctgttgaagaagaatgtggcgggcacgttatcgcgtatcccgatgatcggttcggatctggtcggcacgctgctccggacaaagaacagcatcaagcagcttctgattccgggcatgtggtttgaaaatatgggaatcacgtatttgggaccggtggatggacatgatattaaggggttgatccgtattttcagcgaggcgaaaaagatcaaccgcgcggtactgatccatgtgattacgaaaaagggcaagggataccgtccggcggagaagaatccgtcggcatttcacggagttgaaccatttgatattgaaacgggaaaaccgctccggaaaaaggaacatccgggctatacagatgtattttccagagaaatctgccgtctggcagcggaaaatccgaagatcgtggcggtgacagcggcgatgccggatggaacggggctcaaacggttctcgaaagaatatccggaccgctttttcgatgtgggaatcgcggaggaacacgcggttacctcggcggcaggtatggcggcagccggtctgaaaccggtggtggcggtgtattcgtcctttttacagagggcatatgatcaggtcattcacgatgtctgtatccagaatcttccggttgtgttctgcgtggatcgcgcgggactggtcggaagcgatggggagacgcatcagggtatttttgatctgacatttctctcctctgtgccgaatatgagcgtgatggcgccgaagaaccgctgggaactggaaaagatgctgcagtttgccatctcctacgatggaccgattgcgatccgttatccgaggggcgaggcctaccggggcttgaaggaatttctggcaccggttgagtatggcgtcagcgagatgttgtatgaggagagcgggacggcgcttctggcagtcggaagtatggtcagcacggcagagcatatccgggagaaattaaagagtgccgggcagccgtgtacgctggtcaacgggcggtttgtgaaaccgatggataccgacgtgatcgaccatctggcaggaacgcaccatacgatcgtgacactggaggaaaatgtcctgcgcggcggttacggcgagcgggtgacggattatgtacagaagcattatccgcagatcaaggtagttaatatagcgctgccggatgcctacgtcgaacacggaaatgtgtcggtgctccggaatgagctgggaattgacagtgattcgattctggcgcagctgaaacgtgaaggtgtgctggagactgacgcggaagcatgatgggaaacaaaagagtggcagcagcggaaggaagaacatagaatgaaagaacggttagatgtacttctcgtcaagagaggtctggcagaatcccgtgagaaggcgaaagcgatcatcatgtccgggattgtatatgtagaagatcagaaagaggacaaggcgggtacgaccttcgatgaaaatgcgaagatcgaggtacgtggatctaccttaaaatatgtgagccgcggaggtctgaaactggagaaggcgatgacgcatttcggagtgacgctggatcaaaaggtctgtatggacgtcggcgcgtccacaggcggatttaccgactgtatgctgcagaatggcgcggtcaaggtgttttcggtcgatgtaggacatggacagctggcgtggaaacttcgcaatgatccgcgtgtggtctgcatggagaagacaaacatccgttatgtgacaccggaggatatcggcgagccggtagatttctcttcgatcgacgtttcctttatttccctgacgaaggttttaggtccggtcaaggagattttaagcccgggcggcgaggtggttgcactgatcaagccgcagttcgaggcgggacgtgagaaagtcggaaagaagggcgttgtccgcgagaagagcacgcatctggaggtcattcagatggtgatggcatatgcggcagagatcggttttgagatccggaatctggaattttccccgatcaagggaccggagggaaatatcgagtacctcctgtacctgcataaaccggagcaggcatcggaggaaactgtgactggtgaggaagcacttgcaaaagcggaaaaagagtgtccggtttcaccggaacaggttgttgaggaagctcacagggagttagacaaaacatgagaaatttctatctgattgtaaaccgcgaaaagccgcgtgtagaggaggcagccgatctgatttgcagcttttttgcagaacagggctgccgctgcatccgtctggatcgccatgatggacttcgcagggacgcagaagtggctgcggcataccgctataccgatcgtcggaccgtgccggaggacacagactgcgtgatctgtctgggcggtgatggaacgctgattcaggcggcgcgtgatctggcgggacggaagattccactgtttggcatcaatatggggcatctggggtatctgacgcagatcgggcatgaggaggacattctgcctgccatgcgggatctgatggaagatcactaccgtctggaaagccggatgatgctcaaggggtgcgtgatttccggcgggaaggttgtcatggaggatatcgcgttgaatgatatcgtcctgaaccgtatgggaatcgatgcgttccggtttgagctggctgtcaatggacagctgtttaacgagtattcggcggacggcatggtggtttcgaccccgaccggttcgacggcatacaacctgtcagcgggcggtccgatcgtggcgccggaggcggatctgatggtattgacaccgctctgcccgcattcactcaattcgcgcagcatcgttctgccgccggataaccatttgagcctgcggattcagacgaccgggcggacgaaggtttcgctgagctttgacggcgatacggtggttgatattgagccgggtgatacaatcgagatagcaaaatcagagatcgagacgacattgattcagctcaaacaggtgccatttttggaaaatatacggaacaaaatgaaacagatataaaaggagtcagagccatgaaaatggaacgtcacagcaagattgtggaattgattggaaaatatgagattgaaacgcaggaggagctggcggaatatctgaataaagagggatacaatgtcacgcaggcaacggtttccagggatatccgggagttaaagctgtctaagatccagacagaaaacggcggacagaaatatgcggttttccatcctcagacggcgttcaatgataaatatacccgtattctgcacgatagcttcgtttccatggatatggcgcagaacatccttgtcatcaagacggtgtcaggcatggcgatggcagtcgcggcagcgcttgacgccatccatttttcagagattgtcggctgcatcgccggggacgatacggtcatgtgtgcagtccgtacggtggacgatacgatcgtgctgatggacaagatccgcaagctgattgcgggatgagggaaggtgggttcacgcattttttgcgggaaccgctgataaggaggaacggaaagcggatgctttatcatttacgagtgaaaaatctggctctgatcgattcggcggaggtggagttcggggacggactcaacattctgaccggtgagacgggagccggaaaatcgatcatcatcggttcggtccagatcgcgctgggcggaaaagcaccgaaagagatgatccgccggggctgcgacagcgcctacattgaactggttttttccatcgatgatgagagaaagcgcgagcagctgaaggaacacgatgtttaccctgatgaagagggaattttaatcatttctaagaaaatcacaccgacccggagcatcagccgcatcaacgacgagacggtaacggctgcaaggctgcgggagatcacgggtcttctgatcgatctgcacggacagcatgaacaccagtcgctggtgaatgcgtcaaaacatctggaaatcctcgatgcgtatggcggggagaaacttctcccattcaaacagaatacggaagctgcctatcgcttgtatatgcagttaaaacagaaatgtgccgcatttgcatccgatcaggagacgagactgcgggagatggatttctgccggtttgagatcgaggagattgaaaatgccgcgttaaaggatggcgaagaggaaaaggtggcagccgattttaagcggttttccaatgccagacggatcgctgagagtctttcacaggcatatgacgcggtgtccggcgatgcggtgtcgcgggcgttccgtgagatcgatggtgcgatggcatttgacgagggattgaaggggatccgtgacgagctgtgcgatgtagattcccttctttcggatctttccagggagatcgccggatatatggacgatatgacctttgacgaagcggcatttcaggagacacaggagcggcttgacctgatccggagcctggaaaccaagtatgggaagacgatcccggaggtacttcaggcgttggaagaaaagaaagcgcgactgcaggaactggagaattacgatgaacttcgggaacgagcggaaaaagaactggaacaggcggaagcagtactgaaagaacattccgaggcattgtcagcagcgcgtaagcagtttgccggggagctggtggagaagatcgcagacgggcttcgggaactgaatttccttgatgtgcagtttgagatggagtttaggcggctggatcatttcacggcgggcggtatcgacgagccggaatttctgatttccacgaatccgggcgaaccggttcggccgctcggtatggtggcgtccggcggtgagctgtcgcgtatcatgctggcaatcaagacggtgctggcggagaccgatcaggttccaacgttgatttttgatgagattgacaccggtatcagcgggcggactgcacagatggtatcggagaagctgcggatcctctccaaatgccgtcaggtcatctgcatcacgcacctgccgcagatcgcggcgatggcggaccagcacttcgagatccgcaaatctgcgtccgatggacggacggcaacctccatccgcgccttagaccgcgaggcgatggtggacgagcttgcgagactgctgggcggcgcagagatcaccgagactgtgcggcagaatgcggaggagatgaagaagctggcaaagaagcggaagctggaggtgtgattataaatcaaatataagattcagattcagaaaaatgtcgcgtaaggcggcatttttttgatccccagataccaattaggtcgaagtttgaccgtttgcgtcgaagtggttttggaatagatgcatatatgataaagttaaaatagaaagtattggggataaaaataagaacggcagaaatcttaactggaacaaagacatttcaaaaagcaaaaacatgtatttataatacggatggaatgcccgtttatgtggatattccgaccgaatatggaaaaacatggttgaaggatctggtcacaggaaatgcatccttttttgatcctgtagcagtcagaaggttgaacaagataaaaacaaagaaaaccacacaaaatcaactgtgtaaaatataaatgtgctataaatgtgtaatgaatcattattgcacaaaaatacaaggcatgatagaagcctccgtttttctgggattttgttttatattgtcagaaaaacaggacgacataatatgtattatgtggcacataaggggaatacagaaataagcagaggtatttctttttcaaaaatgctggattttactgaatttttcaaaatccctgcaactcataagtttataaaattatactgatatgcttctaagggattgatttttttgtctttagatggtagtatcatgttgattataaaaacaggaggagaccgcgcaccacataatacatattacgtggtacagggggagtatatgggacgtgaaaacctcgttgggatgaagttcgatcatcttctggttttaaaaagagatgatacgaggaaaagcatacattcctactggctttgtcaatgcgactgcggaactatatgttctgtagccgggacgcatctgaagacaggacacaccaaaagttgtggctgctatcgaaaaagaaaacctgcgcttgggaaaaaccagaagctgtggctgccttaggcaggaacagagaaaagtaaatatgcgcaaatccatccattttgcagaaaatacctgtctggagcggatcgcgagccggaaagaggcagtgaacaacaccagtggacaccgaggtgtataccggagagaaaatggaaaatggcgtgccagcatcgggttccagggaaaagtttataaccttgggacatttgtggactatgaggatgcagtaaaagccagattggaagcagagaaaaagtattatgacacatttttagagcaatatcagaacaggacgaagtaggtggacagcaaaaaacgatggtgtaagctgtctatttcgcgtgtattcagacagaaaaatgactgactaaggagagaagtgcaatggcgcgcaaaacgcagagaagaccggacaagatagagctgggtgtggtggatatccatacacacgtgctcccggggatagatgatggggcagagaaaatggcactcagttaccggatgcttcggagatcttataagcagggcgtccggaaggtgatagccaccccacactatgtagcgtatcactggcggacaaaaccgcagcagatacaagagcttatggagaagttggcggctcgtgtccagaaggcgatgcccgatcttgaactctaccgggggcaggaaatccaatacttcgaaggcatggtcgagatgctccgggaaggaaagcttctgacactggcgggcagtcggtacgtgctgaccgagtttctgccgacatcctcctggagccagatcgagggcgctgtccgggagctgacgatggcgggctatctgcctgtgctggcacatatcgagcggtaccagtgtctgcgggaaaaaggacgcctggaagagctaatgaaggaaggcgcgtatctccagatgaactacggaagcctcacgaaactgagccatttctggaaaataagggagcgcctggaccggaggtggtgccgccggacacttctagccggttacatcagttttctgggaaccgacatgcatggcaaccgccaccgggttcccaacagtgcgaaagccatcgcatggatccggaaaaagggaggcagtgaacttgccagacagctgtcgatcgaaaatccggaaaagatcatactggatgagaaattgtaaaagaatagatgtttgcgaaaaaatgcaaatgtttttcgaaatcacgtggttacagaacattgacaaattccgttaccgggcatgtatgcgtgaaccgtaacattgtaacaatgtctgacagataaaaacaatacgaaaagggaaaaggaaggtatggaaaagagaaaaaatcaaggacaagaatgggaagacgaggaagtaatcgatctgggtgaaatcttttatgcattactccggaaactctgggtcatcattgcagtggcggtgctcggagccggaatcggcggagcatacagctattttctgctcacaccgcagtacagctcaacggcgaagatttatgtactgacgaaagagacaacgctgacctcgttagccgatctgcagatcggcacgcagctgacacaggattacaagacgatcatcaccggtcgttccgttatggaagaggtggttgataagcttcatctggatatggattataaagaactggtcagaaaaattaaggtggagaacccgtcggatactcgtattttaaacatttctgcactggatccggatgcggagatggcaaaaaaaattgtcgatatgaccgcaaaggtggcatccgactatgtcggcgagatcatggaaatgacgccgccgaaactcatcgagagcggtgaggtggcaaaacagaaaaccagcccgagcaatacgaaaaacgcgctgatcggcgcactgattgccgcagtgatcgtgtgcggatacattacactgacggttatcctgaatgataccatccgttcggaagaagatgtggagaaatatctggaactgccggtactggcaacgctcccagagagcaagatccacggacggggcgagaagaaggtaaaacgtacctctggtatctgggatatcatcaatccatttgccggaaaagataagaaggaaaggtaggagaccatggcaattcagaacggattcatccagatcatacaggatgagaaaagagattatcagtatgaggaagcaatgaaaacactccgtaccaacatccagttttccggaaatgggctcaaggtcatcatgctgaccagtgcaatgccggatgaaggaaagagtgagacctcctcccagcttgcgatctcgatggcacagaccgagggacgcgtgttatttatcgatgcggatatccgtaaatccgtgttggtatcccgtttcgggggcggacagcagatttacggactgacacagtacctgaccgggcagcggcttttaggggaggttctgtatcacacgaacctgccgaacctggatatcattttctccggtccgatggcaccgaatccggcagagcttctgagcgaggatgcatttagtaagctgattgcgtgggcgagaaatgagtacgacacgatcatcatcgatacgccgccgctcggaagtgtcattgacggtgcgatcatcgcacagcgctgcgacggagcgatcctggtagtcgagagcggtgcgcttagctatcgtctggtgcagaaagccaaaagccagctggagcggaccggctgccggattctcggcgcggtgctgaaccgtgtggacatggcaggcagcggctactatcacagatactatggtaaatattcgaaatatacaaaatattatgaaaacgagccagtcaaatgagaaagcagaaaatgatccggtggatcgcctgggcggtggcaggaatcgcctgtgtagcgggcggcattcatgtttatcagaaatatcaagaaagagaagcggcaatccgtgcgattgaagcccgtgatcaggcaaaaagccaggaggaagaagaccttgcaaatggaattttgacctggaatggcaaaaaataccgccgcaacacggcgatgcgggcgattctctgcataggtgttgataccaaaggggagatggaagcccagaacgtcgccggaaaaggcggagacgccgatgcactctttttagtggcgcaggacgctgccaaggatgaggcacagattgtgttaattccgagaaatacgatgacagagatcgaggtttttgattattttggaaacccaatcggaaccgagacgaagcagctgacacttgcctatgcgttcggggacggacgcgaaaaaagctgtgagctgacagtgggagcgctttctaagctgctatttggacttcagatagacggatattttgccgtcaatatggactccatcccctattttaacgacgcggtcggcggcgtacccatcacggttgaagatgagatggtcgcagagaaatatcctgacgatttcaagatgggagaaaccgtcactctgaacggtgacctgacggagaaatacgtccggttccgagatatcaacgaagatggttctgctacagtgcgcctgcaccgtcagaaaggatatctgaaatcctttattcagaaagccaaagaaagccagacagcggataaaacaacgattacgcgcctggtagatggcatccaggaaaaggcgatcaccaatatggcaaaagaccagtacatggacatgggacttgcaatgttaaacagcccgaaaaccatggaggacggcgattttatcgagctgtcgggagagatttatcagggtaaattcgaagaattttatccggatatggatgagttaaaagagattgttatcaatcttttttataaagaaaaagcttaaaaggcgcaggcttaaaaagctggaaaggaaagggaagtacaatgaaaaagaagtacgcagcacttctggtagcagccgctatcatggcagtgccgggcactctggccatggctgccggaagcccgaacacaaacgcgacggttagtcacggaggaggacatagctcaagcgcgtcttccaagtccgcaggtctgaatgtgaatgcaggaaccatcacaaacaagaccaccacaggtatcaagaacaacggacagaatggttccaacggaatcactgtttcccagggaacttctggaagcaacaatgcagttggatttgcatccgatcagcagatcaaagacggcaacagctgggcagttgctgagaaagtatttgagatcaatgcaggtatcccactgtaccgtgtaaccggtgatccggctctggttggatactctccgctgatgccggcacagcagctgcaggcaactgatgcaaacggcgctgtaacgaaagaagcagtgattgtcaatatttcagttgcagccctgggcaatgctcagaacatccagctgtatttctacaatgagacaacccatgcatgggaactggcagctgtaaacagtgttgattatgcgaccaacacaatcaacgttacgatgccgggcaatgccatatttacactggttcataagaactaatctgtagataggcggaaagcggcaggaacctgtttgggaaagcctgctgcttccctaaacaataaaaataatttctaaatttctaactttgagtgggacagaccattacaagaccaatatagatagatggtcatgacccgtcaatgtcaaataagaaagtcagattcgttagattatcggaacgaaaatgaactggcggaatatacccgaaaacaaaatatcgttgattttgccggaaacggataagggatttatctggaatataggtttcatccagagaacagagcaaaaattgacaagggggaagaagtatgtacaaaagaaattcgggcggctggatgaaacacgttgattttatcatcctggatatactctgcctgcaggtagcactgacgcttgcatatgcgtgcggtgggtatggatgggatatatacacaccgatcttatatcggaatgtggctatgtttctgggactggcagatctgatgttgctcatatgccgggaaacgatgaaaggcgttatacggagaggacatttccgggaatttaccatgacggtaaagcaggcagtttttatagaaggaattgcacttttatatctgttccttttacaggaagggcagaactattcgaggccggtattgcttctgatgccggtatgctacagcgttgtggcatatgcagtccgggagctctggaaatggcacctacagaagaaaaagacgagcgacgagggaaaaagcgcccttctgattgtagcgagtgaagatgtcgtcgagcgcgtcgtcaaaacaattaaagaaaataactatgcacaatatatagttgcaggtgtttctctcatcggaggtggaaaatattccgtcggagagaaaatagatggagttccggtcgtggcagaggaagcgggtattccgcactatgtctgtcaggactggatcgatgaagtcctggtggtcacctcagacgaggtgccgtatccgggaaagcttttaagccagctgatggaaaccggcgtgacggtgcacctgggtctggcaaaggtaatgagtgagccggggaaaaaacagtttgtcgaaaagataggaccgtacacggtgctgacaaccagcatcaactatgcgtcctccttccagcttttcttaaagcgcgcaatggatatcatgggcggtctggtcggctgcacaattacagtactattacttccgtttgtcggcacagcaatctacctggcgtccccgggaccgatcttcttcgcccaggagcgtgttggtaaaaacggaaaacggttcaagatgtataaattcagaagcatgtacatggatgccgaggcacgaaaagcagagctgatgaaagataaccgacttggcgatggaaagatgttcaaacttgatttcgatccgcgtgttatcggaaacaagatcctgccggatggaagccacaagaccggaatcggcgatttcatccgccgtaccagtttagatgaatttccgcagtttttcaatgtgctgaaaggtgatatgtcgatcgtcggcacgcgcccgccgttgatttcggaaaccaatctttatgagctgcatcataaagcccggctggcgatcaagccggggattaccgggatgtggcaggtaagcggtcggagtgacattaccgattttgaagaggttgtaaggcttgaccgagagtatatcagtaactggaatatcgggatggatatcaagatactggtgaagacggtgatggtggttttgaaggaggatggatcgatgtaatgaccggtagaagaagagcccagagacggattggatgtttggataataaatgtctactcaacaaaatcagttgaggtctgatggtctatggtggagttgaatatggacaaccagagaaaagcctgatttcatgcgggtttgcgcggcttgaccttttcacctcaacttgtttctgcttgtcatggtgcgttatgacctgcgtgttttcgggagttaatggcttctggttgcgctctatacttaacccaccacagcgaaagctgatagagcagaaaacagaatgaggaggtacgaggacaagcctgcgtatagattgttgctgcaatttgtatacaggcttgttgttgtgctatgaagtaggaaaggtgaatagtgaaagacgagcatgacaatttaaggaaaagaactgctgggattggtgtataagcctaggacaagaatagaaactatggaatgacggttggagagaagtaatggaagaaaaaatcagacttgcggttttcggacagaaacgtctttcgcgtgaaggcgggatagagattgttgtaaaggagttatgcacccgaatggcacagaatggttgtgatgtgacttgctacaatagagcaggccatcatgtaagcggtgcagagtatgacaaaacaattgaatatgatggtatccgtcaaaaggttgttccgaccattgagaagaagggggctagagatataatagggtcaaccaagaaaaaccacgataactaaagggttttgacggctcgactcgttcaacaaaagtatttatttgctgacaggctgcggagaagctgaaatccagaggttataagtgggaggctttggtgcagctctgttttgacccacaaaatgagcagcaagtaaaaaatcaaggagaacgaatcgagcctacggtggattgccattgagtgatccgccgtgggcttgtttactgtttgtaaataataattcaaaagtactttgatgtgggaggaaagatgaaacgatgatggaaaacaagacgaaaatcgacttgaaaaacacaagcatttttattacgggtgcggctggttttattggctcgaaccttgcgaaacggattctcacaaccgtagagggagcaaaggttgtgggactggataacatgaaccactactatgacgttcgcttgaaagaagcgagactggatgaactgaacaagtttgaaaatttcagctttgtaaaaggaaacttagcagataaggaaacaatcacaactatttttgagcagtataagccgcagatcgttgtcaatctcggcgcacaggcgggcgttcgttactctatcacgaatccagacgcttatgtagaagcaaacttgattggcttctataacattctggaagcttgccgtcattcctacgatgagggacatactccggtagaacatctggtctatgcgtctagttcttctgtctacggcagcaataagaaagttccgtacagcacagatgataaggtagataatccagtttctttgtatgcggcaactaagaaatctaacgagctgatggctcacgcatattccaaactctacaacattccgtctacgggtctgcgcttctttacggtatatgggcctgctggccgcccggatatggcttacttcggtttcactaataagttgctgaaaggtgagacgattcagattttcaactatggcaactgcaagcgtgactttacttatgtggacgatattgtggaaggtgttgttcgtgtcatgcagggcgcaccggaacgcagaaatggagaagatggtctgccaattcctccgtatgcagtctacaacattggcaatcagaatcctgagaaccttctggatttcgtacagattttgcaggaagaactggttcgggcaaaagtgctgccggaagattatgactttgaagcacacaaaaaactcgttccaatgcagccgggtgatgtgcctgtgacctatgcagatacaagcgcactggagcgtgatttcgggtataagccgagtacaagtctgagaactggtctgaggaagttcgctgagtggtatgcagaattttataaataagaaagaataggaaatcagataaatgaagtgtgttgaggtttataaggaattataccatcaggaaccgtatggtgtagctttctgtccgtaccgcatcagcccgcttggagctcacattgatcaccagtatggcaagatcaatggtttggcaattaataagggcatccacatggcataccatccgaaacacaatggtgttgtggaattgcagtcgttgaatttcccgaaacgtgcgcagttcttcgtgaatgcagtgccagaggaaaaagaaggagattgggctgaccatctgcgtggcgcagcaaagatgctgagcgagaagtaccggctgaaagttggtctgtccggcatcatcgaaggaagtctgccgattggtggtctttcctcttcggcagcggttattatctgctttctgtcggcactgtgcaaagttaacggtattcatctggaaccgatggagatgattctcactgcaaaagccgcagaaaaccagtatgtaggtgtttcttgtggcaagcttgaccagagttgtgaagtcctttccaagaagaaccatctgctatacctcgacacgaaagatgacagctacgagttgattccgaccaacgagacaatgaaaccttacaaagtagcaattttcttctctggcctggaacgctccttgaaaaactccaaatacaacctgcggcaggatgaatgcaaagcagcggcttatgcgttgatgggttatgcagggatggattatgacacctttgccaatacccgcttgcgggatgtgccgtttgaagtatttgaaagctataaggatcgcctgccggaactgtggcggcgcagggcagagcattattacagcgaattcgctcgtgcagaaaacggtgcagagttgtggcgcaaaggtgatctggaaggctatggtcagcttgtttttgaaagcggcaagtcctcgatttatagctatgagtgtggttgcgatgagctgaaaaaactgtatgagatcatgacagataccgatggaatctacggtggccggttctccggtgcaggtttcaagggttgttgcatggcattgattgatccgaacaaagcagaagaaattgaggcaaaggtcggagcagaatatctgaaagctttcccggaactggaaggaaagtatagcttccacctgtgtgagagcgcagatggtgtggagttatgaaactgagttcgatacaccatatcgctataattgtttccgacattgaaaaggcgagagagttctatgttcagaagctcggctttgaagtgattcgggaaaattaccgggcagagcgtggtgactggaagctggatcttcgagtagatgaacacacagaacttgagatatttgcagaaaagaactctccccaaagagtgaaccgtccagaagcctgtgggttgcggcatctggcatttcgagtagaaagcgtagaagaaacggtcaaagaactgaaatcgctgggaatagagtgcgaaccagttcgatttgatacctacacgaaagataaaatgacattctttcatgacccagacggactgccgatagaaatacatgagtgaggaaaccatagatgaaatgtttgattttagcagcaggatatgccactcggctttatccgctgacagagaattttccgaagccgcttctgaaggttggcgagaaatccattctcgactggctggtggacgatttagtggaaaccactgatattgatgaatttgtagtgatttccaatcacaagtttgcacagcactttgaggactggaaaaataataagaaaaaagttcatccttatgagatcacggtgattgatgatggaaccagcacaaatgaaacgcgtctgggcgctgtcaaggatattcagcttgcagttgaaatgctgaatatttccgatgatctgctggtcatggccggtgataacgtgctggacttcagcctttccgctttcgtggattttgcaaaggaaaaagaaacttcctgcgtgatgtgccacgaggaaaatgaactgaaaaaacagcagaaaacggcaatcatcacagtggatgataataacctgattacatcctatgaggaaaagccacaggagccgaaaggcaatctggcggttccgccgttctattgctatcgcagtgaggatgtaaaacgcattcaggaagcactggacaacggctgcggttatgacgcaccgggtagttttgcagcatggctgagcaagcagaccccgatgcacgcttataggatgccgggtaagcgttatgacattggcgatattaacagctatgagtatgtaaaaagcgtgttttcaaagtgagggtaaatataaacagaagaaaaaacagatgaggagataagtattatgagagaatttaaggatttgaaaattgcagtggcgggcacaggctatgtaggactttccattgctacgctgttgagccagcatcatcatgttacggctgtggatatcgtcccggagaaggttgaactgatcaacaatcggaagtctccgattcaggacgaatacattgagaaatatctggcagaaaaagaactggatctgacagcaactttggatgctaaggaagcatactccgatgcagatttcgtggtcattgctgcacctacaaattacgatagtaagaagaatttctttgatacatccgcagttgaggctgttatcaaattggtaattgagtataacccggaagccatcatggtgattaagagcaccattccggttggttacactgcatcggttcgtgagaagttccactgtgacaacatcatcttcagcccggagttcctgcgcgagagcaaggcactctacgacaacctgtatccgagccgcattattgtcggtaccgacgtggagaatgctcggctggtgaaggctgcgcacacctttgcagaactgcttcaggagggtgccatcaaggaaaacatcgacacgctgttcatgggcttcaccgaggcagaggcagtcaagctgtttgccaacacatatctggctctgcgtgtcagctacttcaacgagttggatacttatgccgagatgaagggactgaatacccagcagattatcaacggtgtttgcctcgatccacgtatcggcagtcactataacaacccatcctttggttatggtggatattgcctgccgaaagacaccaagcagttgctggcaaactatgcagatgtaccggaaaacctgattgaagcaatcgtggaatcaaaccgtacgcgcaaagattttattgcggatcgtgtgcttgaaattgctggtgcttatgaagcgaatgacagttgggatgagagcaaggaaaaagaagttgtagttggcgtttaccgtctgaccatgaagagcaacagtgataacttccgccagagctccattcagggtgtcatgaagcgcattaaagccaagggtgcaacggttattatctatgagccgactctgaaaaatggcgaaaagttctttggcagcgttgtggtaaacgatctggatgagttcaagaagcgcagccaggccattatcgcaaacagatatgataagtgtcttgatgatgtggaagagaaggtttatacgagagacattttccagagagattaattagttgagggtggagtaatgaaaattgcaataattggtcataagcgtataccatcaaacgaaggtggaatagagaaaggcgtagagcaacatgcggttcggatggtgcaaagaggaaatgatgtcacagtatataaccgtggcggtcacaatgtttttggaaaagaatttgatggcaagaagctgaaaaaatataaaggaattaatatagtaacggttccaacagtaaagggagcggcgtgtgttccgatttattcttttcttgcaacaattcatgcagcattcagccggtatgattgtgtgagtttccgtgcgtcaggatcatgtgctatgattccacttgctaaactttttgggttacgagtagtggcatcgctacatggtatagatagccaaagagataagtggggcgggtttgcatcaaaataccttgaatttggagagcgaatggctgcaacaaaagcagatgtgtgtttggtgctttccaaaaacatgaaagaatatattgacacaaaatatggagtgaattcgattctatttgcgaatggtattgataagcccaaaagccatgcaccggaaattattaaagaaaaatacggattagaaaagaatgaatatattctatcattgggaagaattgtgccggaaaaagggcttcagtatttaattaaggcatttagagaatgttcaagtgataggaaacttgtaatcgctggaggatcggagtcgaacaaggattactataatcagctccttgcattagcagagggagacgaacgaataattttcacgggttatgtgtatggacaagaggtgcaggaactttacagcaatgcttacatctttgcgcttccgagtaacttggaaggaatggctaatgctttgttggaagctatgagttatggcaattgctgtttgattagcgacattccagaaaacacagaggtagtacatgacaaggccctgtcctttgaaaaaggaaatgaaacagaccttcagaagaaattacagatgcttttggatgacgaaaatcttgtgagaaaatataagaaagaagcggcaccttatatcttagatagatataattgggatattgtagtagatcaaatgttgcgcgtctatgcgggtgatgtcgtagattataataccgtactgcaagaacgggaaagcagaaacggagtaatacaaagcaaatgaaagtggatttttatattagtagcctctctagtggtggggcagagcatgtcttaacgaatcttgcagctaactttgccgaacatggtgaagatgtcagtgttacatcttatgaaaaacggccacagttttatagtgtggcagacggtgttaagctaaataaagtcaattataacggaaagggtaaattccttgagtggatttatgatttccatgcgacttgtagatatctggatcagagaaaagcggatgtggcaatttcctttttgagcagatgcaattttatgctgattttagcagggcttatgtcgaggacaaaggtaattgtttgcgacagaaataatcttttacggaaatatcctaaatatgtttttcaaatcacatgcttcttatatcgatttgcggataccatctgtgtacagacgaatgagatgaaatcattttatccagcatatttacaaaaaaagattgtggttctggaaaaccccttggactttgacgagatgggcaaacaatgtgtgggacaggatattgaaaaagaaaatacggtgatttcagtaggtcgattggaaaaacagaaagattttgtgacattgattaagtcctacaaagcggtggcagaaaaacatccgtcttggaagttgaagatttttgggcaaggaaatcgtagagaggaacttcaaaatttaataaggaaagaaaatcttgaggaaaatgtaaaattgtgcggtgtgacgcatacaccatttcttgaaatgaaaaaagccaaagtgtttgtgctttcatcattttatgagggatttccgaatgtactgtgtgaagcaatgcacgcaggtttgccctgtatttctacaagatgtgaatgtggtccctcagagttaattgatgatggcagaagcggtttccttgtaccaatcgggaatgttgatgtgctgtctgaaaaaattatggcattgatagaagatgaaaacttgagaaatgaattgggcaaaaatgctgagattgcaacagaacggttgaaactggaaacgatctgtcgaaagtggagagaattggcatatagtgtatgcggaaaggaattgaaaaatgagtaatataatcaaaaaaggaatagcggttctaaaaagtcctaagaaaagaacgattatattggcacagcatggttttttcaagaatatgagcgatgaagagttcttgaaaatgcagtttaagaatgtgtttggatacccgctggatttgaacagtccgaaaacatatagcgaaaaactccagtggctgaagctttatgacagaaaacccgaatatacgatgatggtggataagtatgaagtaaagcaatatgtagcatctaaaattggagaagaacatattattaagacactgggtgtatgggatcgttttgatgatatagacttttcaaagctaccgaatcagtttgttctgaagtgtacacatgattccggaggattggttatttgcacagataaatcaaaactggatatgacggtggcaaaaaagaaaatcgagaagagcctaaagaacgactattatatgcaaaatagagaatggccatataagaatgtaaagcgcagaattatcgcagaagaatacatggtcgatgaatcgggctatgagttaaaggattataagatttttgcttttgacggtgaagcaaaggcaatgtttattgcatcggatcgcacgaatccgaacgaagagacaaagttcgatttctttgatatggattttaaccatctgccttttacgaatggtcatccaaactccaaagagtgggataaaatcaaacggcctaagggattggatgaaatgaagaaatatgcggagatcttgtcaaagggattgccggaagcgcggattgacttttacgacatcaatggcaaagtgtatttcggggagatcacatttttccattggagtggattcgaacgctttgaaccggcagaatgggatgaaaaatttggctcttggattaccttgccgacgaaataaaagaagaatggggaggaaagagcaggagtaatggaaaaaagaaacattttatttgtaatgagcagcctaagaaatggtggagctgagagaagcctagtaaacgtattacagttgctggattatgatcggtataatgtggatttgctgctgtttcagaatgaaggaatgttcttaaagcaagttcccaaagaggtgaatatcatctcgaattgcaataaattatatacactgtatgataacaacaaaacagaggcgttgaaacatccatatctttcggttgttcatatgataggaacttttatttcccgtaaaaaaacaaactctgttgcgaaaagccgccaatacagatgggagcatttttacaaaaaaatcataccagaacttacaaaagaatacgatgtggcaatcgcttatatgcagcgcgaacaaacatattttcttgtagataaagtaaaggctacaaagaagattgcatgggtacataatgaatattcccagcttggacattttaaagaaatggaccttgagtattttgaaaaagtagacaaggtggtaacgatatctgatttgtgt

SEQ ID NO: 11005 - DNA, 1952 bp, Unknown
  gut microbiota DNA sequence
tcaccaagccggttgaggaaacaaagccggaagtagttgaaacagttcctgaaattacagaaccgacaccggaggaaaagccgaaatccacaaatatgctcccggcgattcttactctgattgtgcttgcctgtggtggtggattcttcgtatttaagaaagtccaggaaaagaagaaggcacaggaagcggcaaagcctgacccagatgctgattatgtggacgatgacgaggactatgggtacgatccggagtttgaggacgacgatgaagatagctccgtcgatgaagatgataatgaacctgtgtaaacaggataggcttgatgcctggggcagccttcgggttgcctttacatagtttccgctttcaaaaaataaaaaaatttgcgtttttgaaagtgacatcttgcatatactattagcagacagtataataagtacagcgaagcggtttcgagaaatgaaaaaacttcaatttttgaaagcgggtgactatatgaaaacaatcacgagagcaaaatatctcgatagaatcattgaactgaatggtactcctgacatcaagatcatcacgggcattcgtcgatctggtaagtccaaattgatgcaggcgtatattgcgtatctgaaaagcaattttgaaaacatcaatattatcttcatcgacttcatggatttggcgtatgaagaaatcaaggaataccatgccttacacgcctatgtggaagaacattatcaggaaggaaaaacgaactacctgtttgtagacgaggttcagatgtgtcccaagtttgagttggcaatcaatagcctgtactctaagggaaaatacgacatctatgtaacaggctctaatgctttcctgttgagtgcagatctggcaactctgtttaccggacgctatattgaaattcatgtgtttcctttcagcttccaggaatattgccagtattatgatgatattagtgacaaagataagctctttgatgagtacgctatcaagggcggtttagcaggttcctatgcttatagaaccgaaaaagacagaacaaactatatcaaagaggtctacgaaacgattgttacaagggatttggtacagaaatatactctcccggacactttggttttacaacgtctgagcgagttccttatggataatatcagcaacctgacttctccgaataaggtcagtcagctactgacagcaaatgagactccaaccaatcatgtaaccgtcggcaagtacattaagtatttgtgcaatgcttttgtattttatgatattaagagatatgacatccgaggtaagaaataccttgaaagctctgaaaagttctatttgtgtgacagcggtattcgatatgcaatactgggaagcagaaatatagactatggcagagtatatgaaaacgttgtttgtatcgagcttcttcgccgtggatatgatgtctatgtcggcaagctctatcaaaaggaaatcgactttgttgctcagagaggtagcgaaaagatttatattcaggtcagcgacaacatttccgggcaggaaacatttgagagagaatgctctcctctgcttcagattcgagacgcttatccgaaaatgattattgccagaaccaaacatccccaatatagctatgaaggaatcgaaattcacgatatagccgattggttgctacaagaataagcaaggtgaaatatctccgtcattctcttttgaaatgatggagatatttttattatgacggagattgtagaacagaaaattgtatcaggttgcaaaaatcctttccgaactttttacatagcagtcatgcactacggtgtgtggctgcttatttttttgtgaaaggagcagatgcaaatgaaattagttttggctgaaaagccttcggttgcacagagtattgccaaagtgttaggtgctgccaagcgtgaggatgg

SEQ ID NO: 11006 - DNA, 43127 bp, Unknown
  gut microbiota DNA sequence
ataaaaaatattaaatatattaattttactaatctataaaaattgtgtatgataaaggcagatgctagaagaaggcatttgccttttatgctaaaaaatgaatgtattttacagaacatgaaacattaaaatacgaaaaaacaggaggaaaacatgagcgtaagacgtattttcgttgagaaaaaaccggaatttgccgtattggctcacgatctgaaagaggagatcgcaagctatctggggatcgacacgatcaccgatgtccgcgtactgatccgctatgatattgaggatgtatcggaggatgcatatcagaaagcgctgattacgatcttctctgagccgccggttgattttgtctatgaggaggcattcccgtccaaggaaggcgatacgatcttttccgttgagttcctgccgggacagttcgatcagagagccgattccgcagaacagtgtgtgaaacttctgaatgaagaggaaaatccggtgatccgttccgcgacaacttatgttatttccggaacactgaccgcggagcagatcgagggcatcaagtccctgtgcattaacccggtggattcccgtgagaataacaacgcaaagccggaaacgctggtaacggtatttgagcagccggaggatgtcaagattttcgatggcttctgcggttatggcgaggcagagttaaaagaactctacgattccctgaaccttgcgatgacgttcaaggatttcgagcatatccacaactactttaagaacgaagagaagagagatccgtctgtgaccgagatccgcgtgctggatacatattggtccgatcactgccgtcatacgaccttccagactgagttaaaggacgttacctttacaaagggcgattacaatgagccgatggaagcttcttacaaacagtacctggcagatcgcgaggttctctacaaagatcgcgatgacaagtttgtctgcctgatggatctggctgttctcgctatgaagaagcttcgccgtgaaggcaagctggaggatctggaggagtctgaggagattaatgcgtgcagtatcgtagttccggttaccatcgacggcaaggaagaagagtggctggtaaactttaagaatgagacccacaaccatccgaccgagattgagccgtttggcggcgctgccacctgcttaggcggtgctatccgtgacccgctttccggacgtacctatgtatatcaggctatgcgtgtgactggtgcggctgatccgacccgtccgatgtcggagacactgcacggcaaacttccgcagaagcgcatcgtaaaggatgcagcacatggctacagctcctacggtaaccagatcggtcttgctaccggctatgtaaaagagatttatcatccgaattatgtggcaaaacgtatggagatcggtgctgttatggcagcagctccgcgcaaaaacgtcatccgtgagacttccgatccgggcgatgtaatcatcctgatgggtggacgtaccggccgtgatggtatcggcggcgcaaccggttcttccaaggtacataccgaggagtccatcgaggtctgcggcgcagaggttcagaagggcaatgcaccgaccgagcgtaaattacagagactgttccgccgcccggaggtcagccgtctgatcaagaagtgtaacgactttggcgccggcggcgtgtcggtagcgatcggtgagttagctgacggacttcagattgaccttgacaaggttccgaagaaatatgcaggtctggacggaacggagattgcgatttccgagtcacaggagcgtatggctctggtggtagacccgaaagatgttgataagatgcttgcttatgcagcagaagagaacctggaggcagttccggttgccgttgttaccgagtccccgcgcctggttctgaactggagaggcaagacgatcgtagatttaagccgtgcattcctggataccaacggtgctcatcaggagacaaccgttaccgttgaggttccgaccagggaaggcaatgtatttgataaacaggaagtaaaggatgtcaaagaaaaatggctgtccatgctttcttccttaaatgtatgctcccagaagggtctggttgagatgttcgacagtaccgtgggcgcaagcagtgtattcctgccatatggcggcgttcaccagatgaccgagacacaggcgatggtggcaaaactgccgatgagcgagggcaaatgcgatactgttaccatgatgagctacggctatgatccgtacctgtccagctggagcccgtaccacggcgctacttacgcagtgctggattctgttgctaagatcgtggcaaacggcggtgatttccacaagatccgctttaccttccaggagtacttcaaacgtatgacggaagatccgaagagatggggcacaccgttctccgctctgctcggtgcttacagtgcgcagctcggatttggacttccgtccatcggcggcaaggacagtatgtccggcagcttctatgatgaagagcacggagaaatcgatgtaccgccgacactggtttcctttgcagttgatatttccgataccaaacacgtggtatctccggaatttaagaaagcgggcagcaagattgttctctttaccatcgagaaagatgcacatgacctgccggtttacagccagatcatggatggttacgagaaaatctaccgcgatatggagtctggaaagattatttccgcatatgcggttgagggtgctggtgtggcagaggctgtcagcaagatggcatttggtaaccgcctgggcgtaaagattgagcacaatgtagatccgagagacttcttcgccgctggctggggcaatatcgtctgcgaggttccggatggcaaggtaggcgagctgtccatcccgtacactgtgatcggtgaggtaaccgacaagggaaccttcgagtatggcagtaccatgatctctatggaagaggctctgaaagcatggaccggaaccctggagaaagtgttcccgaccgcttccggcgcaccgatgaaggcagcagaagagacactttacaataccgataaggtatatgtatgcaaacataaagtggcaaaaccaaccgtatttattccggcaatgccgggtaccaactgcgagctggacagcgcgaaagcgtttgaggcagccggagcggagacgattgtgcgtgtattccgcaaccagaatgcatccgatatccgttcttccatcgagcagtacaaagaggatatcaagaaatcccagatcattatgttcccgggtggattctccgcaggtgatgagccggatggttcggctaaattcttcgctacggtattccgcaacgaggcgatgatggaggagatcgacaaactgcttcatgaccgggatggcctggtactgggtatctgcaatggcttccagacattaatcaaactgggacttttaaccggaggcaagattgagccgcagaaagcagattccccgactctgacaaccaacaacattggacgccacatttcccgcatggcatacttaaaggttgtatctaacctgtccccgtggctcagaaaagcagagctgggaggcgtatactgcaatccgatgtcccatggtgaaggacgtttcgtagccaacgaggagtggcttgcaaaacttcgcgcaaatggtcagatcgcgatccagtacagcgatccgaacggaaacttatccgtcagcgaggagtggaacccgaacggttcctaccagtgcatcgagggtatcacaagcccggatggacgtattcttggtaagatgggtcacaacgagcgctgctggagcgatacaggcatgaatatctatggaaatcaggatatgcagctgtttgcttcaggtgtggagtatttcaaataaaatgaacacctgcttttaagcaaggtagaaatagaccggaccgcagaaatctgccccggtctattttttgtgcgatagaaaattccttggaattccccatcacacaaaaaggtacattctttttatgtcacagaaaatagcaattatgatataaattttatcattgacgaaaatgtcagaaaaccttaaacaaaaagttattctcaggtaataaaagtgtgctatcctgtcaataacagaaaacagacatttacttcaaaaaacaaggtaaaaattttgaaaataccgacagtttattttgacgcaggcagatatgtttgttataatggaaacaagagtttgtacgcgagagtacattaaaaaaggaggatgggatatgagacataacctgaaggcagcggcggtttccgctcttgctatcatggcggcactggcgatgagtattccggcatacgcggctgacaaaaagatctcggaagttaagttccgtgtcaatgcgaaaccggaagcgggcgacagcatcggggatccggatgtacaagttacgaagggtaatgttgagattaccgagcaggagtttgacaatgacgacagcgagtgggagagaggtgataagccggtcatctacctgacgatcgaggcaaaggacggttatcagttatccggcacaaagctttctgcaaccaagtcggcttacaaagttacgaagcgatctggcgataagagcgagtggaaagttaagattacgatgtcagctgttgacggcgatttggatacggtcgaggatcttagctggagcaatcgtaccgcaacctgggacagtgtatcggatgcaagcaagtatgaagttaagctgtaccgcaacagctctaccgtaacgactgttacaaccacaggcacaagctacaatttctacccatacatgacgaaatccggcgattatacctttaaggtacgcgcggttgacggaagcgacaagggtgagtggagtgatgagtccgatgaatattatatgaattcttcagatgtgtatacaggtacacctccgaccgataattcttctggtggttccactccggcaaatgcgaatggtcagtgggtaaacagcatttacggctggtcttactacatcaatggtgtaccggttaagaataactgggtatatgttgataatgagtggtatcatctgaatgcaaacggcttcatggatacagactggatctatactgataataactggttctatttaaacccagtatccgatggtacgagaggcaagatgctgaccggctggcagcagatagggccgtacaagtattatctgaatccggtatccgacggcacccgtggtgcaagaaagacaggctatcagttcatcgatggcgcatggtatctgtttgacctgaatagcggagcactctggacaaatatggtagctccgaacggtatggtagcggatgcaaatggtgttcttcactaaggagctatctggcagcagaccggaagaggatctgaaatgcggaaacatacataaatgaaacaaaaatcagacagcggcagacagcggacgagcgaaagcaagtggctgatgccgctgtttttttgtttttcttgcacagaaggggagaaaaaggatataatagagaatcatattgagaagccggagaattgatgaggcgggaataagaaacagagaggagaatcgataaattacgatgaaaccaactgtattattgtataattttactgattccaaaagaaaaatgaaggtgcagcaggcgcttatgccactgggattccgtttaagggcagtgaaaaaggaggagtacgggctgccggtgggcgtgctggctggcgtgaaaggactggatgaggatgtcctcaaggaagccggacaagcaatagaggctgtggaggaaacgcaaaaagaagagtccgctcagaaactggcagacgggaggctgcagcgagaagtgccggagaacgattcttccaggaaaatggatttctcagatgagatggcgatcatggcaggcttttcttccgcccagatcgatgcatttatccacgcactccgaaaaaagggagtcggacggatcgattataaagcagtcctgacaccgtataatatgaagtgggattcggtacaattatatgaagagatcaaaaaagagcatgagatgatgacggggaaaggtaaagacgaagcattgtgatgccatgggattggtgaaaggtcattttactgcttgatgtggaggtggaaagatgctggaaaaagttgatttgaataaatcagtggataaggaaaactacaagaagcttcgggaagagatggatgtgaagctgggagaattgcagcgcgcctgtaaggaggaaaagatcccggttgtcatcgtatttgacggattcggggcaggcggtaagggaacgcagatcaaccgcctgatccagccgctggatccgcgcggctttgatgtttatgcgagccgggagacgggggaggaggaacggatgcgtccatttctctggcggtattggacgaagacaccggaagatggacgtatgatgatctttgacaagagttggtacgataaggttaccgttgaccggtttgacaaagagacgaagcggcaggagctaaacggggcgttccgggatatcctttcatttgaaaagcagctggcagattccggcatgattctgatcaaattgtttctgtatatttccagggacgagcagaaaaagcgctttaaacggctggaagaaagcaaagagactgcgtggcgtgtgacggaggcggactggaagcgcaacaaggattacgatacatttctggagatgaatgaggaaatgctgcagcggacggataccgggtacgcgccgtggacgatcgtggaagcgactgataaaaattatgcggcagtcaagattttatccaccgtcacagaccggctggagtatgagctgaaccgccgccgaatggaacgcgaggaaggggcggtgcatccgccggtcaaacttccagatgagcggtttaaaaatggcgtgctttccggcgtggatctgacgaaaacgctgacacgcgaggaatataaggaacgtttggataagctgcagaaaaagctggaggtgctgcacggcgagctgtaccggctgcggattccggtggtgatcggctttgaaggctgggatgcggcgggaaaaggcggtgcgatccggcgcctgacaagccacctggatccacgcggctacaaggtcaatccgacggcggcaccgaatgatgtggagaaggtacaccattatctgtggcgtttctggcgggagatgccgaaagcggggcatattgcgatcttcgaccgcacctggtacgggcgtgtgatggtggagaggatcgagggcttctgcagtgaggcggactggaaacgggcgtatcaggaaatcaatgagatggaagagcacatggcgaattttggcgcggtgatcgtgaaattctggattcatattgataaagatgagcaggaacgccgctttaaggagcgcatggaggctccggcaaaacagtggaaaatcacggacgaagactggcgcaaccgtgaaaaatgggacgcatacgagcaggcagtcaatgagatgctggtgcggacctctactacctatgccccgtggacgatcatagaaggaaattccaaatatttcgcgcgcgtcaaggtgctggaaacggttgtggaggcgatggaggagaagatccgtgaggtaaaaaagctgcgtaagtgatagaaagaagcggacggccgatttgataatcatgtgtggaaatatgaagaagcgcggttgcaattcttcgtaagatacagtaaaattaatatttaaagaaaaagacggcaattttgaaaaatacaaacatttgtgtaaactttgcgttaaatgtagcgatagaaaggaagcggacaaaatggagcagacagcaaaagagcgcacactagcatttatggcagagcatgcgggggatccaaccccgatggaattatttcatatgcacgtaaaacacgtgggaatcaatacgaaatcggaagacgaggcctgggaggttgctgagacactggcgcgcctgatggggctgatgccgcgcgagacggagaaagcggtgttcagcggtgacctgacggaaaatatgaaggtggagagccacggaatctacggccatattggctttggcgtaaatgattgcgaggcggcgatccgatactttgtgaaccgcggtatgacgattcgggaagagacgaagcgctttgatgagcagggacgctgcattttcgcctattttaaagaagaagtcggcggatttgcgattcacctggtacaggattgatagcaccaggcaatataaaaacgaaaaggatagcaatatgaaaaaaataatcgtgatcggcggcggggcagccggtatggcggctgcgattgcggcggcggaaaatggctgcgcggtaacgatctatgaaaagaatgagaaactgggaaagaaaatctatatcacgggaaaagggcgctgcaatgtgacgaatgactgtgatatggagggtctgtttgacagtgttgtgacaaacagccgctttttgtacagtgcattttatggttttaccaatcaggatatgaaggattttctggaggcgaacggctgtcatgttaaggtggagcgcggcaaccgtgtctttccggtgtctgaccgggcgtcggatgtgacatcggcgcttgcaagacggctgcgggagctgcgcgtgaaagtagaattgaatcagggagtccgggaactgtggctggaggatggtgtattaaaaggtgtgattctggcgcagggcggtaatgagcgtgggaaaaaggactcctacatagctgcggatgcagtgatcgtggcgacgggcggtttgtcctacccgacgaccggctcaaccggcgatggttaccggtttgcggaggcagcagggcacaaggtaacggaactttcgccggcgcttgttccgtttgagacgaaggaagatgtgaaggagctgcagggactctccctgcggaacgtggaagctgctgttttaaatggaaagaaagaggtttaccgtgaatttggtgagatgctgtttacccattacggcgtttcgggtccggtactcttgagtgccagcagttatgcggcgaaaaaactgaaaaaggctccgctgactctgatgatcgatctgaaaccggcgctttccatggaacagctcgatgcgcggattctgcgcgattttgaggcggagaagaataaacagtttaaaaatgcgctgaaccatctgtacccatcaaaactgataccggtcataattcgccgcagcggcattgagccggacaagcaggtcaacgccgtgacgaaggaagagcggagacggctggcggaggtgacaaagcattttacactgacgctgaccgggctgcgaggtttcaatgaggcgatcattacccagggcggtgtgacggtaaaagaagttaatccatccacgatggagtcgaagaagcttccagggctttattttgccggggaagtgctggatctcgatgcagtcacgggcggctacaacttacaaattgcgtggtcgaccggtgtgctggcaggacggagcgcagcggaaaatcatgaattataacgatatgaaaaaggggaaacgaaatgccgattaatatagcgattgatggaccagccggggctgggaagagcacagtggcaaagaagctggcggaagattatggatatatttatgtagatacgggggcgatgtaccgggcgatggcattgtattttctgcgccagggcatcgacagccatgatgaggcggcgatcggacgcgcctgtgagacggtttccatttcactggaatatgaaaatgggatccagcaggtttatttaaatggggagaatgtcagcagcgagcttcggacggaggcggttggaaatatggcttcgaatacctctgtctatgcgccggtccgcaaaaaactggtggagctgcagcgtgaattagccggacgccgggatgtcgtgatggatggccgggacatcggaacggcggttctgccggatgcgaccctgaaagtatatctgaccgcgagcagccgtgtgagagctggacgccgttataaagagctgaccgaacgcggggaaagctgttccctggaggcgatcgagcaggatattatcgagcgcgattaccgtgatatgcaccgggaattgtcgcctctcaagcaggcggaggacgccattttactggatacttctgagttggattttgaagaggtaatgcgggagatggagaagctggttgaggcggcgaagaaaaagcagaaaaatcccattgccgtaggcaatttttgatggatttttgcgcgtgactgtgaaggtactgaacagttacgaaaatgccaggaaaaaggagaagtgggaaaggggcggcagcaaacatgagacgattgaaacaaacatggatcgccgcagcacttgggatgagtgtatggatgaccgcctgtgcgggcgcggcatcggagacagccacacaggaaggggctgtcgatgaggagagccagggggcgctctgtgaggctgtggctgaaaatgatcaggcgcaggagcagcccaaacgggataaaacgcaggaaactgagcggacggaaccgctcacggttgaaccagtccgggaaaccctcaatatgacgcattttgacaactgtacctttgcagctgggttcaaaccgcagcagatccatcaggatgaaagcaatgttatcatcacattgacggtctatgactatgagcattttcataaggcagatatcgatgaactgcaggcgggagatacgctgcttatcgatgggaaagaatgtctcattacttcgattgaccgacaggagtctgggcggatcgagatcaatggcggtccggcacaggggggagaagagctgagaatggtagaggaggattccttttatggctcggagatggcagtcgggagaagttaccataagctgggagaggttacgctgcagatggatgagaactttgtcctgacagatgattctgacccggatacaccgccgcaggtgtataccgcggaagaattattcgcgatccgtgatcggctgatcggggagtttaagccatacaacacggctgtgacggtgaagaatgagaaaattatttcgatttaccggaaatttatgccataaaagatataaaatcattaagaggaggagagcaccttttatccggatgagaggtgcttttttgtgtaacaggaaattccttggaactccctattacacaaaaaggcactaacgtgccaatgatgcgcactcgcgcgaagcagaaacatgtcgcaagcgaccgcgctcggcgcgagaatgtgccaaggcacattctttttcaatataatttccaggataaattgacttttaaacataccccatctataatgaaacaagctgatatgggcagtgggtgccgctgtttgtgccagaccagtcagattgctcggattggcaggcgcggacagggggtaaaagggaaacaggtgcaaaacctgtgcgatctcgtcactgtgaaccggagagtggcgccgcagatgccattgcgaaagtgagaaggcgcggcgtgcatgatgacccgaaagccaggaaacctgccggctgtcgtgaacatatcggttagaactatttttgtgcgagtcacacaaggaggaaaacatgagaaaaaacaaaaaagtagttgtaagtgcagcggcagttacgatgtccgtattgcttggagcctgcggtggcagtacatccagccaggcaacctcgacggaggcggcttctgaggcagagaccgaggcagctgagagcgccgattccgatcaggaagcagcagataaggtggcaaagctgatcgatgacatctatgtacaggagcgcaccgatgacacggatgagcagtgcaaggcagccaaagaggcatgggatgccctgactgacgagcagaaggagctggtagaaggcgagaacgcagatccagattattttggtcgtgataccggcgacgcgagcctggacgatccgcgcaatcaggatgagattggcgacaaggagatcctggtagtcagctttggtacttccttcaacgacagccgtgtgaaagatatcaagagtatcgaggattccatccaggatgcattcccggattgggcagtccgccgtgcatttaccgcacagatcattatcaaccacgttgaggctcgtgacggcgagtgcatcgacaatatggatcaggcactggagcgcgccgtggagaacggagttaaagagctggttgtccagccgacccacctgatgcacggtgctgagtatgacgagatggttgaggcgctcgagaagtatcaggataaattcgagcagatagctgtcgcagagccgctgttgggtgaggttggcgacgatgcaaccgttatcaatgcagataaagaggcagttgcaaaagcagttgtagcagaagaagcttcggaagctggttttaaagatgcagctgacgcagccgatcagggaactgcattcgttctgatggggcatggtaccgcacacgttgcaaaggtaacctacagccagatgcagacccagatgcagaatcttggatatagcaatgtatttatcggtaccgtagagggcgagccggaagagacctcctgtgagtctgttatcgaggcagtgaaggcagcaggttataagaatgtcgttcttcgtccgctgatggtagttgcaggtgatcacgcaaacaacgacatggcaggcgatgacgaggattcctggaagagccagtttgaggcatcaggtgcatttgacaaggtagatactcagatttccggtctgggcagaattaaagcagtagaatcattctatgttgctcatacacggacagccattgattctattgtgaaataatgtatatgaaaaagaaattaaatttagcggcgcttctgcttgctgccgctcttctcggagcgtgcggaggacagaaacaggacgcagccgacaccgtggcgcagacagagagcgcagaaaccgagaatgtcgaacagaaaagcagcattgaccttgcagacggcatctacaccgtcgattttaagacggacagcagtatgttcaaggtcaatgaatcgaaaaatggaaaaggtgtcctgacggtcaaggatggcgaggcgatacttcatatcagcctgacctcgaaaaacatcgtgaacctgtatctgggtactgcggacgaggcaaaggaagatgaagccggttggctgcagccaaccgtagacacggttacttacagcgacggtctgagcgaggaggtcaacggcttcgatgtgccggttccggcgctcggagaagaatttgatctggctctgattggtaagaagggcacctggtacgaccacaaagtaaaggtagaaaatccggtttccggagaggcagaggacgcggaagcggcatcatccgagacggagaatagcgatgatgcggcagatgcccagaaaccggcagggcagactgcagatgtggcagacggcacttatacctgtgaggtaaccctgcagggaggttccggcagagcatcggtggacagcccggcgaccattatcgtcaaggatggaaaggtgactgccgatattgtctggagcagcccgaactatgagtatatgctggtggatgacgtgcagtatgatccgatccagaccgagggcaattccgagttccagattccggtaacgctggatgaggatgtagcggtcagtgccttgacggtggcgatgagccagccgcatctgattgattatacgctgcattttgacagcgtgacgttatcagaagttacgaaataaaagtagatagaaatacctgtccaggaagaacctcccggtccttttgtacatattttgattacagaaggatccgggaggtttatgtctatgcgtatctgtgaactcaaacagcgggaagttataaatgtaaaagattgcaagcgccttggttttgtgggcgacgtcgattttgacatcagcacgggaaaaatgcttgcgatcatcgtgccaggaccgggctgtgtctggggctttctggggcgggaaaaagagtacataattccattctgcgacatctgccagataggggatgacattattctggtgaggctgaaagaagagagagaaaagaaggaataaagaaggaatagcggaaaacttctgcttgcagaagcgcacttcctgcgatattataataagtatgatatgttatgaaaacttggcgggggcatatcaataaaaccagaaaaggggaagagcgattgaagtgtccattttgcaacgcggctgacacgaaagtaatcgattcacggcctgcggatgacaacagttctatcagacgccggagacagtgcgagacttgtggaaagcgttttaccacatatgaaaaacttgagacgatccctctgatggttgtcaaaaaggataatacccgggagatgtacgaccgggcgaagatagaggcaggaatcctgcattcctgccacaagcgcccagtctctcagggacagatttcggcgttgatcgacgatgtggaaaacaatttatttaaccgggaagaacgggagatctcgaccgcggtgatcggggaacttgtgatggagcggttaaaggatctggatgtggttacctatgtgcggtttgcatcggtataccgggagtttaaagacgtcgatacatttatggaggaactgcagaagatacagcagcggaatgtgccgtcgtatgagtctggaaagaacggggaagagaccagatgatgggaaatgcgttttatccggatgaatggctggattctgcgtatgatatcccgtatgagcagttttaccagaagggaatgcggggtatcatatttgatattgacaatacgctggtgccgcacggtgccccggcggacgagcgggcagtacagctgtttgaacgtttgcgggcgatcgggttccacacctgtctgctctcgaataataaggaggcgcgggtcgccccgtttgccggacaggtaggttcggattatatttacaagggcagaaaaccgaagcgcagcggatacaggcaggcgatgctccggatgggaacgggcgagcgctcgacgatgtttgtcggggatcagctctttacggatgtgtacggggcgaggcggacaggcatctattcgattcttgtaaagccgatcaatccgaaggaagagatccagatcgtgttaaagcggtatctggagaaaattgtcctgtggttctatgtgagaagacaggaaaaaaatagcggaagtttgtagttgggtgtttttgaacggtttgaaagagcttgccaagtggcagaactggatgctgacaggagtgccggaaacggtggaaaatcagttgttttcagaaaaaatatcggcaattttagaaaaataaggggcggaattgacatgatgtgccctgtgttttcaaaaaagtagttgaaaaagaggattttatagtataaaataaaaaagataaagcgagtattttcaaggaggagcatcatttatgatatcagcgggcgattttagaaacggcatcacactggagattgatggcaacgtataccagatcatggaatttcagcacgtaaaaccgggaaagggggctgcgttcgttcgtactaaaattaagaacgtaatgaatggcggcgttgtagagaaaaccttccgtccgaccgagaagttcccgtctgccagaatcgacagagttgatatgcagtatctgtattccgatggcgacttatacaacttcatggatgtaaacacatatgagcaggtagctttaaaccaggagacaatcggcgacgcactcaagttcgtaaaagagaacgagatgtgcaagatctgttcttacaacggcaaggtattctccgtagaaccgccgctgttcgtagagcttgagatcacagatacagagccgggcttcaagggcgataccgctacaggcgctaccaaaccggcagttgtagagactggcgctactgtatatgtaccgttattcgtaaaccagggcgataagatcaagatcgatacacgtactggtgaatatctgtccagagtctaagttataacatatacgtcagaaaggtcttcacgataccgtttgtacccttgtggggaggcagtcgtgtcactgacaggtttctgactggaaacagagattactgtttgtggcaggcattttcctttgctggttatgtagcgcatgaacagtagcaagcagagaaactgttgtaagatccggaggaaacgtcgagattttacaacagtttttttgcttaacatattggggaggcgtctatgacgcgtccgttggttcatctcagagagcgggttcggagtgagcggtgctcatggggagtgataaatatggagaacggaagagaagaccgtctgcgtctgggggaagaggatgagccggcgcgcagatctggtggcaggaagaggcgtacatccggcaggcagacggcaatccgccgggagcggacgaggcagcagaagaagcgccgtgtgatgatgcagctgtttttgtgtctgcttattttcctcctgggtgcgggaacaggctggacgctgcgcgggaaaatgatccgcaagctgatcgatccgtccacgatcgagatgccaaactgggttgatgagcagcttctcacggtcaaccgatattccagaccggggacgaatatcccggtcatcaacgggatcgtgattcactatgtggcaaatcctgggacgacggcacagcagaaccatgattattttgaggggttgaaagatcagagcggcagtaacactgtttccgtcagcagcaatttcgtgatcggtctggacggcgagatcattgagtgcgttccggtcggggagaaggcatatgcctccaatgagaggaatgcggacaccgtttcgattgagtgctgccatccggcggtagacggaaagttcacagacgagacgtatgactcgctggtaaaactgactgcatggctgtgcaagcagttcgatttaagtccgaaagacgtgatccgtcattatgatgtgactggaaaggcgtgcccgaagtatttcgtggatcatgaggatgcctggaagcagttccgcaaggatgtgaaaaaggcaatgcggaaagatatataatatacgatataaattatgaaagggaatctagtatgaaaacgattttagatttgatcgtggaagaactgaaaccggcgtttaccggctgcgggtacgatgagaagtacatccgcgtaacggtatcaaaccgcccggatctctgcgagtatcagtgtaacggcgcgatggcagctgccaaagcgtataaaaagaaaccgatcgatattgccaatgaggtggtggaaaagacagccggaagcaagatgttttctgagatcaatgccgtgatgcctggatttatcaatatccgcctgaatccgtgctacctggcatcctatgtacagcaggtggcagaggatgaaaagctgggactcaacgcagctaagaagccggagacgatcatcatcgattacggcggagccaatgtagcaaaaccgctgcatgtcggacacttacgttctgcggtcatcggagagagcatcaagcgcatcagccgctatatgggacaccatgtcatcagcgatgtgcatctgggtgactggggattgcagatgggactgatcatcgaggagctgcatgaccgtcagccggatctggtatattttgacccggattataccggcgagtatccgtcggagccgccgtttacgatttccgagctggaggatatctatccggcagcgagcgcgaaatccaaggtagatgcggcattccgtgagcgggcacagcaggcaaccttcaaactgcagagtggctatgcaccgttccatgcgatctggaagcacatcatgaacgtgtccttgaaggatctgaaaaagaactatggcaatttaaatgtatcgttcgacctctggaagggcgagagcgatgcgcagccatatattccgggactgatcgaggatttacagaaaaaaggtcttgcctatgagagcgatggcgcgctggttgtcgatatcgcacaggaaggggatgcgaaggaatatccgccttgtatcgtccgcaaatccgatggtgcggcgctgtatgcgacttccgatctggcgacgatcatcgaacgtgagcaggatttccatccggaccgctacatttacgtcgtagacaagcgccaggagcttcattttatccaggtattccgtgtggcgaagaaggcgggcatcgtcaaagaagatacgccgatgatcttcttgggcttcggtacgatgaacggcaaggacggtggtccgttcaagacacgtgagggcggtgttatgcgtctggagcacctgatcaagaatatcgatgagaaggtatatgagaagattcaggagaagcagaaggttccggcggacgagatgacacgcacggcggagattgtcggtctggcggcacttaaatatgccgatctttcgaatcaggcgaccaaagattacattttcgatgtagaccgctttatttccttcgagggaaatacaggtccacatatccagtatatgatcgtccgcatcaagtccattctggagaaatacaaggaactgcgcggtgcggatgctaaagtggttccgatccgtccggctgagagcgagacagagaaagcacttcagatggcgctttgccgtttcggcgaggtgacagaatctgcattctacgagacggcgccgcataagctctgccaatacatggcggcagtggcggatgcgttcaatgcattctatctggaaaataagatcctctccgaggaggacgcagcgaagcaggcagcctttatcagcctgatcacgctgaccaagcgggtgctggatacctgtatggatctgctcggaatggaatcgccggaacacatgtaatctgtaatatggaggaatcctcatgaaaataataaaaatgtccgtagataccttctggaagggcgaagtacgggtacagggacagattgaggatgagacaaaggtatatcagacaagaatttttatcaagggtagtcagatctatgactactcttgttcttgtgcggagggaaattcattccggggtccctgcgtgcatgcaaaagcgcttcaggaggcgtttgcccgccagcagaaagccgagcatacaccgccggtttcgacttcgccggagatccggatgatgatccgggagtacacgaaccgggaagtagcgcggattctgggcgaggaagagcgggaaccggtctatctgcatccctatttacagatccggcgcggcgaagtgcttttggaggcacggatcggacgggaaaaacggtatattgtgaaaaacctgctggaatttgcacaggcggttcacagcggaaaacgggtggaatacggaaaaggcatggcgtttgaacacgtcccgtctgcctttgcgccggaaagccgcccatttttagatcttctgctggaggaggcggacgcctacatacgccattatgaggagatgcgcggtcatgcggggctgccgcttccggtgatgcgggcgttaacgctgggatctgcagcgagggatcggctgtttgatcttttagagggaaaagaagtccagacggaggacgagaaaggtgctgaacgtgtgtgccgggttgagcgcaaggatccgcgtttcccggtggaggtggaagcaatgggcgatggaattgcggttacgattccatcggctctaacttcgttccggggagaacagcgtctgtatgtggcagatggattgcatctgtttggatgcagtgaactgtatacagaaacgatgggcgtttttctggagcagatggaacagggcggaagagagtgcggaagccggaaagagaagcgggagctgctggttggaagccgggatattccgctcttttatgcgcgggtgctggaaggcatggaggcacttgggatcttgcagagcccggagatcgattgggagaaataccgcccagaggcgttgaaagcccggtttgagtttgacagtgattcgccggacgagctgcgtctgcgtccgacgctttcctacggagattttacgttttcgccgctggcggacgagcatgttccgcgggagatctgccgggatgtaccggcggaattttatatcagccgcctgatcacgcggtacttctcttactgggaggatgagagcggcgagctggtgatccgcggggatgaagaagcgctgtaccaggttctgagcgagggaatgacgcagtttcaggaggtgggcgaggtatggctgtcagagtctgtccgccatctgcgcgtcctgcctccgccggaagtgtcgatgggggtttctcttggaggcggctggctggatctgaagattgagacggcgggaatcaacccggcggagcttttgcaggtactcagtgaataccgccaaaaaaagaaatattaccgcatgaaaaatggcgaatttttgcagctctcgggcggcggtctgcaggcgcttgacagcctgactgcggatctgggactgacaaagagtgaatttcaggcgggggaggcgaagatacctgcctaccgtgctttttatctggacagtctctcgggcgacggcaggatgaaactgtttcagcgggatgaagcctacgggatgatggtgcgcgatctaaaaacggcgcagagtgtcagctatgcggttccggcggtgctggaaaagacgctgcgggaatatcagaagatcggatatacgtggatgcggacgttggcgcggtatcatttcggcgggatcctggcagatgatatgggactgggaaaaacgctgcaggtgattgcgcttctgacagcattttatcaggaaaaaaccgagcagaaagcggctggaaatgaaggcagtgggtcagaattacctcttccgtctttgatcgtctgcccggcgtcgctcgtctacaactggggacaggaatttgcccggttttcgccggggatccgcgtgcttctgattgccgggacggcgaaagaacggcaggaacagctggaggagcagatgcggatggaggcgtctgagggggcgcaggtgatcatcacgtcctatgatctgttgaaacgggatcgggaggcgtatctgggacgcacgtttgaatatgagattattgacgaggcgcaggtcattaaaaatgcaaagacacagggcgcgaaggcggtaaaggagatttcggcgaatgcccgtttcgctctgacgggaacgccggtggaaaaccggctcagcgagctttggagcatttttgatttcctgatgccgggatttttatacagttaccggaagttccgtgagcggtatgagctgccgatcgtgaaaaatcaggatccggaagcattgacggcactgcggcggatgacgggaccgtttgtcctgcgccgcttgaaaaaggatgtgctgcgggagcttccgaccaaggaagagaggatcgtttattcggcggcgtcggggcggcagcagaagctttatacggcgtcggcgttgaaactgaaagaggcgctggctggcggcgcgtggtcgggtaatggaaaattggaagtgctttcccagctcatgcggctgcgccagatctgctgcgatccggcactctgttttgaagattatacgggggaatcggcgaagctggagacctgtgtttcgctgatcgcatcggcgtctgcggcgggacataagatcctgctcttttcccagtttgcctcgatgctggagcggattcgggaacgccttttacaagagggcatttcgtcccatcttctggtcggcgcgaccccgaaggaagaacgcagccggatggtgcaggcgtttgcctcggatgaggttccggtgttccttatttccctgaaagccgggggaacgggactcaacctgacggcggcggatatcgtgattcattacgatccgtggtggaatgtggcagcgcagaaccaggcgaccgaccgcgcgtaccggatcgggcaggaaaagccggtcacggtatacaaactgatcttaaaggatacgatagaagaaaatcttttgaagctgcagaatgcgaaacttgcgctggcggcgcaggtggtttcagagggaatggtttcactgggcgatttgagccagaatgaactgatggagctgtttgaacagaatccataaaaaaatttgcagaaataacgggcaggaggaaaaagcgtgaagcaatggaaacgatacaaatcatatatactgccatataagagcgcctttattctgggaccgctcatgatggtaacggaggtgctgggtgagattctgctgcccaaatttatgtcgatgattattaaccatggcgtggcgcagaaagacggcggatacattctcaaaatgggacttgtgatggcgattacctcctttttgatggcggcaggcggcattctgggggcatattttgcagcgaaggcgtcgatttcctttaccagcgatctgcgccgcgacttatttgccagagtgcagcagttttcatttaaaaatatcgatacgttcagcacgggatcgctggtaacccgtctgacgaacgatatccagcaggtacagaacctgattatgatgggacttcggatgatgctgcgcgcgccgggcatgttcctgggggcgcttgtgatggcattctggatgaatgcggaactggcagctgtcatcctggtggtgattccgcttctgacggcggcgatcgtctggatcctacggactgcctacccgcggtttacagccatgcagaaagcgctggatacgctcaatagcggcatccaggaggtgctgacgaacgtgcgggtggtgaaatcctttgtgcgggaagactacgaggaaaagcggtttgccgacacgaaccgggagctcaaggaggcagggctgcgggcgctgaagatcgtaattgcgacgatgccggtcatgatgttcgcgatgaatgtgacgacactggcagttgtctggttcggcggaaacctgattatcggcggacggatggcggtcggggatctgacggcatttacgacctacattgtacagattctgatgtcacttatgatgctctcaatggtatttttgcagagttcccgcgcgatggcgtccatccggcgaatcgatgaggtgctggatgagccgattgatctgagcgatgaaaatgcatcacagaaggaccggaaggttgagaaaggacgcgtggaatttaaggatgtttccttttcataccgcgaaggcggtgagccggttctatcccacatcagcctgacggcagagccgggagagacgatcggcatcctcggtgcgaccggaagcggaaaaacgtcgctggtacagctgattccccgcctctatgatgtgacagaggggagtgtgcgggtggatggtatcgatgtgcgggagtattccctgaaaaatctccgggacggcgttggcatggttttacagaaaaacgtcctgttttccggcacgatcgaggaaaacctgcgctggggtgatgagacggcgacggaggaagaagtgcggcgggcagcagtgtatgcgcaggcagattcctttgtgaattcgtttgccgaaggctacaaaacggagatgggacagggcggcgtcaatgtatctggcggtcagaaacaacggctgtgcatcgcaagggcactcttaaagaagccgaagatcctgattctcgacgacagcaccagtgcggtcgatacggcaacggaggcggcgatccggacggcattccgggaagatttgaaagatacgacgaaatttattatcgcacagcggctgagttcgctggaatacgcggatcggattctcgtccttgaggacggcaggattatcggagagggaacacaggagaagctgctggcatcctgtgaggcgtaccgggagatctatgagacgcaatatggaaaacgggcagacggggaggggatggcatgatggatgaaaaacagattgaaagcctgaaacgccgatatggcagccgcatagccgacgcgccgaaacgccgccggggaccggaacggatggcggtcatgaagggcggaaagcccaaggcgggcggtcagacgatgctgcgcctgctttcatacttaaaacgcgaccggatggcgatgacagccgcctttttctgtgtgatcctggggacggtgacgaatctggtgggcgcctatatgctgcgcccgatcatcaatcggtatattgtgcctttagatggcagccggggcgatgtggcggggctgttccgttccctgtgcgtgatgggagcggtttatttagtcagcgttgccgcttcctatatgcagtcgcgcattatgctgcaggtggcgcaaaacgcgctgcagcggctgcgggaagagctgtttaaccatatgcagacgcttccgcttcggttttatgataccggcagcaacggcgatctgatgagccgttttacaaacgatgtggatacgatcggcatgatgctcagcagtacgctggtgcagcttttatccggcgcactcagtattgtgggaacgctggtgctgatgatttacacgaacgtgtggctgacggtgattacgcttgccatgatgccggtgatgctgcgtgccggtaaatttgttgccggacggagccagaaatatttctctgcccagcaggcggcgcttggcgcgatgaacggctatattgaggagaccgtgcaggggcagaaggtcgtcaaggtattctgccatgaggagatcgcagaggaagaatttggatggctcaatgcggatctgaaagaaaaacagatccgggcgcagtttttcggcggtgtgatgggaccggtcatgaacaatttaagccagttaaattatggactgacagcctgcattggcggtctgctctgtgtgttccggaactttgatgtcggtggactgaccgtatttttaggtttttcgcggcaattttccagaccgatcaacgagctttccatgcaggttggaaacgtattttcggcgctggcaggcgcggagcgcgtgtttgcagtgctggatgcagaaccagaggcggcagatgcgtcggatgcggtttcgatcgcgccgatccgcggtgaggtggtgcttgaccatgtgactttcggctatgagccggggcaggtgattttgaaggatatttcgctctatgcgaagccgggacagaagatcgcctttgtcggttcgacgggagccggaaaaacgacgatcacgaatctgatcaaccgtttttatgatatacagggcggctcgatcacggtggacggcgtcgatgtccgccggatgcaccggaaggagctgcgggaaaatatcgcgatggttctgcaggatacgcatctttttaccggcacggtacgggaaaatattcgatacgggcggctggatgccacggatgaagaagttgttgaggcggcaaaaacggcatcggcgcattcctttatcatgcgtctgccggatgggtatgacacgatgctggagggcgacggtgcaaacttaagccagggacagcgccagctattaaacattgcgcgggcagcagtttctaaagcaccgatcctgattctggatgaggcgacgagttcggtcgatacgcggacggagaagcacatcgagcacggcatggaccggctgatggcggaccggacgacctttgtcatcgcccaccggctttcgacagtccgcaacgccaatgcgatcatggtgctggagcacgggcagatcattgagcgcggcgaccatgaagatctgctggcgcagaaagggcggtattttgagctgtataccggaatgaaggagctggaataaggctttcgttgagaattaaatgagaatttgtttcctgtacgcgtgaactcacctatattgaaaaacggatggatctagtgtataatgggaacacttgaaatttttaagtaaaatcggatcgcgtaagctggaaaatagagccggatccgtggcaaattttgtaccgttaggaggaatatctatgagtatccgagttggaattttaggatatggaaatctgggacgcggcgtggagtgtgcgatccgccagaatccggatatggaactgagagcagtatttacacggcgtgcgccggaaacggttaagatcctgaccgagggcgtaccggtttatcatgtagatgaggcagaggcgaagaaagacgagattgacgttttgattctctgcggcggttcagcaacggatctgccgatccagaccccgaaatatgcacagtggtttaacgtagtggacagcttcgatacacatgcaaagattccggagcatttcgcagcagtcgatgagtccgcacagaaatccggcaaggtcggtatcatttccgttggctgggatccgggtatgttctccctgaaccgtctctatgcagctgcctgcctgccggagggcgaaaattatacgttttggggcaagggcgtcagccagggacattccgatgcgatccgccggatcgagggcgtcaaggatgccagacagtacacaatcccggttgagagtgcactggaggcagtcagaagcggcagcagcccagagctgaccacccgtgaaaaacacaccagagagtgctttgttgtggcagaagagggcgcggatctggcaaagatcgagaacgagatcaagaccatgccgaactacttctctgattatgacacgacggttcattttattactgaagaagaactgaaacgcgaccacaaccgtctcccgcacggcggtttcgtactccgcagcggcaagaccggctggaacaaagagaaccaccatatcatcgagtacagcttaaagctggattccaacccggaatttacttcctccatcatcgtggcatacgcacgcgcggcatacaagatgaaccaggaaggccagaagggctgcaagaccgtctttgatgtggcaccggcgtatctgtcggcagagagtggggcagatctgcggaagaagtatctgtaataatttcaaattttcctttcaacttgtattgtcgcttaaaatgaagtaaaatgtaagacagattggcatgatttgtacctgcgcagcactggcaaaatccgttaaagtccgcgcaatgagtgaacgtaactttacgtttgcgggagctggcgggtaggagaaaagcgaaaatacatacaggaaggacaatatacgatgaataaatggaaaaaatccgtgcgttccctctgcctgggaatggcacttatgatgtctgtgtcatggacggcatttgctgcgacagacggggcgaccggtccgggacaggcggcaggaggcacggtctccggcgcagttccttcgggagcaacggttacttcacagaatgcagctcagccgacggtggcagcgcagggcgcagtgctctatgatgcgacgcacaaccagttcctgttttccaagaatgcggatacgcagtattatccagccagcatcacgaagctgatgacggcgcttctggtagcggaaaactgtaatctgagtgatacggtaaccttttcccagacggcagtttcgaatctggaatcgggcgcggtgacgttgcaggtcaaggcgggcgatacctttacggttaaggactgtctctatggtctgcttttaaaatcggcaaatgaggtggcaaacggactggcggagcatgtgtccggcagtgtcagcgcgtttgcggataagatgaatgagaaagcagcgtccttaggatgcacgcatacgcattttgcaaatccgaatggtctgaacaatgcaaaccattttacaaccgcacatgatatggcgctgattgcaaatgctgcattcaataatgcgacggtgcgtcaggttgcatcgaccctgcattacgatttcccggcgactgccagcgtgccgacggtgcggacgcttacgattggacataagatgctcaatccggcaaattcccagtactatgagggaatcataggcggaaagaccggttatacctccctggcaggcaacacgctggtaacgtgtgcagagcgaaatggcgtgcgcctgattgcagttattttaaagagttcgcagacccattatgacgatacgaagaagctgctggactatggttttgcagtggcgggaagcgcatccggcacaccggctggcacgaacacctcggtatcggatgcggcgaacaacggtacgtcaaattccagcaagccgtccggcaatacgaccagcacaaatacctcgtcttccggcagtcagggcggaccgggtagctctggagctggcaatacagctgctcagggcgacggtgcgtggcagcagtttggaaatgaatggaaatacctgaaagcaaacggaacctacgcggcaaatgagagtctactgatcaagggagagacatactatttccatgcggatgcgtggatggcgcgtgactggcagatggtagacggctcctggcattattattataccgaaagcggggctatggcgaagagccgctggattcagacgaatggatactggtattatgtgagtgctgacggagcattgtttgtcaatggaacgacaccggacggatatagagtcgatgcgaatggtgtctggattcagaaataaagaagagaataaaacggagccgaccggcagaaaagaccggggcggctccgtttttcacagctctgcggtcgcaaaaagaccggcggcatagctggcagatgggggtgatgttattatagtgtgatcaattcatactcccggcttcccagaccgatcttctccgcgtgtgccaggcagcttttccactcagattctggtgtggaatttgtgaaatggtcatggtgatcgtggaaatccggatcagcaagatgttttgcaagctggctgcccggcatcggagcagcggccagacaggcgtccacacaggcctgatcgagtgccagcggatcgaaagaagcaaacataccaagatttggaaggatcggtacgtcattttcaccgtggcagtcgcagttcggggagacgtcaacgaccagggaaatatggaagtttggacgtccatccacaacggcttttgtgtattccgccatacggcagtttaacagctcgttggctgcgttgttgtcaaattcgattgcgtcaaaattgcaggcgccgagacaccgtccgcagccgacgcagtgctcagcatccacgtgcatttttctggaggcttcatcgaaaacgagaccgccgttggcacattccttctgacagcggcggcagccccggcagagcttttccttgacgtgtggttttccactgctgtgctgatcggtcttaccggcgcgagaaccgcagcccatgccgatatttttgatcgtaccgccgaagccggtcatctcatgtcccttgaaatgggtcaggctgataaagacatcggcgtccatgacggcgcggccgatcttagcttctttgatgtattcgcctccggccaccggaacagcgatgtcatcggtgccttttaatccatcaccgatgatgattggacatccaacagtcaacggggtaaatccgttttcccaggcgcattccaggtgctcgagcgcattcttgcggctgcctggatacatcgtattgcagtctgttaaaaatggtttgccgcccagctctttgatgacatcaacaacggctttggcataattcggacgcagataactgatatttccaagttcaccaaagtgcatcttgatagcgacaaatttaccatccatatcgatggaaccgatcccggctttacggatcagtttttttaatttggtagggagaccgtcgccaaatgcaatggtgtggaaatctgtaaaatatacctttgctttttcgttttttgacatatgaatacctcctgatagatggctttttttgatttttttctcagtcgagaagacgcccacctctttaggtggcgagtaatagtaaagtgataaaaatatcaattctattataccggaatcgggtggatgtgtcaaaaatttacttttctttttaatgtagttcctatataataggaaaatacggaaaaagcagatttcagctgcagggggattctggcaagatacctgtatctggaaacctgcttttgaaaatacgaggggacttgtctgcatagaagggacagtgacccgggcaggagatgacagtatgagaaatgcaccggttatctatatcgtggtgccttgctacaacgaagaggaagttctgccattgacggcagaatttttaggtaaaaaattagatgatttaacccgcagccgccggattcatccgggaagccgggtgctgatggtagacgacggttcgaaggatagaacatggaagctgatcgaggaactccatgagaaggacgagcggtttgcaggtgtgaagctgagccgcaaccgcggtcatcagaacgcgcttttagccgggctttttgaggcggcgagacggcggtgtgacgcggcgatctcgatggatgccgatctgcaggatgatgtggacgcatgcgacgcgatgatcgagcggtatatggctggctgtgacatcgtgtacggtgtgcgccgtcacagggcgacggatacattttttaagcgtacaactgcgctgggattttataagattatgaatgcgctgggagcgaacaccgtgtataatcatgcggattaccgcctgatgagccggagggcactggaagggctggcggaattttcggaggtcaatctgtttctgcgcgggattgtcccgatgatcggttatccgtccgatgtggtatattatgaccgtaaagagcgggcagcaggggagagcaaatatccgctgaaaaagatgctggcttttgcgatcgagggcatcacttcgctgagcacaaagccgatccggatgattacgttcatgggaattgcggcattttttgtcagtattggattccttatctgggcggtggttgatttcttccggggcaatacgatcaccggctgggcgagcatgatggtatcgctctggtttatcggcggactgcttcttctctcggtcggaatcgtcggagagtatgtcggaaagatttatctggagtcgaagcaccgcccgcgctatatcattgagagccgcacgccggatcgcatccgcgagcgtgagaaagggcgcagccggaaacaggagatgccaggagaaaatttgcgccgcagccgtgcagaagcacgggaactccagacatcaaaaagaagagaagctgtgcaaaaaccggagcaggagtgaaatagctctaaaaaatagctcttaaaaattcaggaaacacttgacaaacccggaaaatgggtgtatcttcataaacaaataattcctatcaggaataagggaatataagctgaaaggggacaggtccgatgcgtcagagtaaagccatgcagatgaatatgatgatgaacggcatgtgtatgatgtgctgtcatatttgtgtgcatgaaagacggaacgggctggtcggatagacctgtaagtatagcataggaagccgcgatccgtactggattcgcggcttttttgtgtcataggaaattccttggaattccttatgacacaaaaaggcactaactgcttcctgtgacagaaaaacagtagtggcatcttttatgcgacagggtatcaatgctgtatattcgaaaaagagaggggaaaagacaatggagcagagaaagaaagcgatcatctgcctggaaggactgggaaagcaattccagacaacgaacggaacggtgaccgcgttagatgatattaacctggaaatcctgcaaggtgagatttttggaattatcggtctgtcgggtgcgggaaagagtacgctggtccggtgtatcaattatctggagacaccgacggcgggacgggttatttttgagggacagaacctgtcgatgatgaaggagtcggagattcggaaagccagacagtcgatggggatgattttccagcagttcaatcttctggcacagagaaatgtactccagaatgtgtgctttccgatggagattgccggtgtcccgaaagcagaggcgaagaaacgggcggctgagcttttaaaattagtcggtctggaagaacggatgaaggcatatccggcacagctctccggcggacagaagcagcgtgtggcgattgcacgtgcgatgtccacgaacccgaaggtgctgctttgcgatgaggcgacgagtgcgctcgacccgaatacgacaaaatcgattttggagcttctcaagaagattaaccgcgaactcggcattactgtgatcgtgattacccatgagatggcggtgattgagtctatctgtgaccgtgtggcgatcatcgaccacagccacattgcagagtctggcaaggtatcagagattttctccggtccgaagtcggagattgggcggcagctgattctaggagagacggcagggcagaagacaagctttgccagagcgcgccagatccgcgttattttcaatggacaggaatcttcggagccaattatttctaatatggtattagcctgcaaggttccggtcaatatccttctcgcggatacccacgatattgggggcaaggcgatgggacagatgcttctgcagctcccggaggacgaggtagatgcagggcgtatctgcaattatttaaaaacggtcggtgtgacctatgaggaggtgcgctaagatggtatttgatgcgaagacagtcagtatgctggtaaaagagacctggagaaccttatatatggtaggtctttcttccctgatttcttatttgatcggcatcccgctcggcgtggcgctggttgtaaccgataaagacggcattcgtccggtgccgctgttcaacaaagtggcgggcgtgattgtcaacctgctccgttcggtgccgtttatcatcctgttagcgatggtaatgccgctgacccgcgcgatcgtgggaaagacgatcggagcaaatgcggcagttgtaccgctggtaatcgcggcgttcccgtatatcagccgtatggtagaggcatcgttaaaggaaattgatgcaggcgtgatagaagcagcaaaatcaatgggcgcttcgacctggcagattattttcaaggtgctgcttccggagtccaagccgtccctgttagttggcgcggcgatttcgatcacgacgatcctcggatattccgcgatggcaggctgcgtcggtgccggtggtctgggcgatgtggcgatccgatatggataccaccgttatcaggcagatatgatgctggttaccgttgtgattctggttattatcgcacagctgattcaggagatctttacgcggagttcgagaagaagtgataagagaatccgttaataagatatttacagaaatgaaatgcagcctatcgtctgtggcagatgcaggacatttctgaaatataaatttaaaggaactgtttaaacacacaaagaggaggaaatcactatgaaaaaatcattcttaggaaccacattcctggcactgctggcagctgcatccttagcaggctgctcttccagctcgaatgagacaactgctgagaccgctgcagaggcagcagaggagactaccgcagaggctaaagaggcagacggcgatctggagaagctggtagtaggcgcaagcccggcaccgcatgctgagatcctggaagctgcaagagaccttctggcagacaagggctacgatctgaagatcgtagagtatactgattatgtacagccgaacaacgcactggagtccggcgatctggatgcaaactacttccagcacaaaccatatctggataccttcaatgaggagaatggcactcacctggtaagtgcaggtgcaatccattatgagccattcggcatctacgcaggcaagagcgattctttagatgagctggctgacggcgcagaggttctggtgccaaacgatgtaaccaacgaggcaagagcacttctgcttcttcaggatcagggtcttctgacactgaaagaggatgcaggtctgaccgcaactatcaatgatattacggagaacccgaagaacctggatatcgtagaacttgaggcagcacagcttccgcgttccttacaggatgctgatattgcagttatcaacggcaactacgcaatcgaggctggtttaaaggtaaccgatgctctggcagtagaggcttctgactctctggcagcccagacatacggaaatgttgtagcagtccgtgagggtgacgaggagagcaacaagacaaaagctctgatggaagtcctgacaagcgatgatatcaaagaatttatcgagacgaagtacgatggagcggttgttccgctgttttaattgacggcagggacctgattacagcaacgaaattgggaagaggcggatgctttgcggtgaaaaccgcaggcggaggtctcttctttcaatttatgggaatgtgcgtcagatgaaaaatgttttgcgtgaatttttttaaatcatgtgatagaataagaaaaagataaaggtgacaggcgggtgataagaatggaaattcatatacagaacaggaaaaagggctttacgctggcggagcttttggtagtcgttgcgatagtttccattttaactgcaatttctattcctatttttaccaggcagctggagaccagccgggaggccacggatcttgccaatgtccgttctgcatatgcagaggttatggcagcggtcatgattgaggatacagagaatgaagtgaaggttgtaaagctgaagcagaaaaaagaaaaatggcagtcgcatgacccggtgacgataggtggagtgatgcattataatgatcagggtgatacggccaactggattggttatccggttccgggtggggagtgtgaagtttcctatcggccggattcgggagtgctttttaactggaaaagcggaaagggtacaggcggttcggaacagaaatacgcgtttaatatcaattgcgatgtacatgcgcccttgaatgacagcggcatattggaaatgctgggtgataacaacaattttgaaattgattccaactgtacaaaatccaatatgcttcccaagatacaggcgaagattgaggaggacagcctgttaaaaaagggaacctgggcctatctgggagatgcaaaggataagtcgaagcgatatttattttggacatctgtagatatatcctcagattcggttggtgcaggaaagaagataccggttattatcagtacagcagatggaaggttttatatttcagaaacaactaccgctatgcgagtgaataaagctggtaattatatagcaatcgccggtcatctgactccaacacagtataaggaatatctttcgaaggataaaaagtatgagaatctgcaggaggcatatgatgcatacgcaaagctggtgacagatgggacgtatccacagtataaggatacgctgccgaagtaggggctgtgcggctgttacagcggggcgtctttaaagtgggagaagccagggcatatgttactgttcacgcatacgtgcccagtaacgggcatatatcatttaccaacctgtgccgaaaaccttgacattttcctaaaaaacctctatgataacaaggaactgaaaaatgaaaggcagtgaagaagaggagtacacatagaagccctgacagagagaaccgcgcaggttgagagacggttccgggaaacggatgtggaaggtagcttcggagccggatttctgaaaaactgcgttctgctatgacttaggaatggtgtgaaagagagtggtggataagagatcccgggagttcccgttatagaatcaagaggattgggataaaatctggatgtgtgcaaagaaaacaccggcagatggaaatcctgattgaattaaggtggtaccgcgtatatgacgccctttgcagatgatatgtctgcaaggggctttttcatttcataggaaattacgtcctatgaaatgaaaaacgctccgcgaggatgcgcgctcgcgcgaagcagaaacatgtcgcaagcgaccgcgctcggcgcgagaatgtgccaaggcacattctttttcataggaaacgcgctccggaaaggacaaaacagatgaaaaaacaaggtccgctgacaagctgtgacacgtgcggcaattatgtctatgacgatgattatgggtattatctgtgcgaggcagatctggatgaggacgagatggcggcatttttaagcagccagcgttttgtctgcccgtactaccagacggatgatgagtataagattgtccggaaacagatgtaagaaactgcatcggaaattacacgaaatgaaggtaaacaagatgcggttcatgatagaatgcagggataaacagcatttgatgagttaaaacgcaaaaggagaatcgatcaatgaaagaactggaaaagacatataatccggcggatattgaagatcgcctgtatcagaaatggctggacagcaaatatttccacgccgatgcagagcgcggacgcagaaacggtaagaagccgttcacgattgtgatgccgccgccaaacattaccggacagcttcatatgggacatgcgctggataacaccatgcaggatatcctgatccgttacaagagaatgcagggctatgaggcactgtggcagccgggtaccgaccatgcggcgatcgcaacggaggttaaggttatcaacaagctgaaagagcagggcattgacaagcatgatctgggtcgtgagggcttcctggagaaagcatgggagtggaaagaagagtacggcagccgcatcgtaaaacagcttcacaagctgggttcctccgctgactgggaccgcgagcgtttcacgatggacgagggctgttccgaggcggttctggaagtatttaccagactgtatgaaaaaggttatatttacaagggatcccgtatcatcaactggtgcccggtctgccagacttccatttcggatgccgaggtagagcatgaggagcaggacggctttttctggcacatcaattacccgatcgtcggcgaagagggacgtttcgtcgagatcgcaaccacccgtccggagacgctgttaggcgatactgcggtagctgtcaacccggaggatgagcgctacaaggatatcgtaggcaagatgttaaaactgccgctgaccgaccgagagattccggtcatcgcggatgagtatgtagataaagagttcggtaccggctgcgtaaagatcacaccggcacatgacccgaacgactttgaggtaggaaaacgccacaacctggaagagatctgcatcatgaatgacgatgcaaccatcagcgtaccgggcaaatatcagggcatggaccgctacgaggcgagaaaagccatggtagaggatctgaaggaaatgggacttttagtcaaagtcgttccgcattcccacaacgtaggtacccacgaccgctgcggcacaaccgtagaaccgatggtaaaaccgcagtggtttgtcaagatggaagagatggcgaaaccggcggtagaggcacttaaatccggcagacttaaattcgttccggagagctttggaaagacctatctgcactggcttgagggcatccgtgactggtgtatttcccgtcagctctggtggggacaccggattccggcatattattgtgatgactgcggcgagatgaccgttgccaagaacgcaccggcggtatgcccgaaatgcggcggcacccatctgcatcaggatgaggacacgctggatacctggttctcttccgccctgtggccgttctccacgctcggctggccgaaggacacaccggaatatgaatatttctatccgaccgacgtgctggtaaccggatacgatatcattttcttctgggttatccgtatggtattctccggtctggagcagactggcaaagagccgttccacaccgtcctgatccacggtctggtacgtgattctcagggacgtaagatgagtaaatcccttggaaatggtatcgatccgctggaggttatcgacaagtacggcgccgatgcactccgtatgaccctgatgaccggtaacgcaccgggcaacgatatgcgtttctactgggagcgtgtagaagcaagtcgcaactttgcaaacaaggtgtggaatgcatcccgtttcatcatgatgaacattgagaaagcgccggtaacggatgtaaaactttctgacctgcagatggctgaccgctggatcctctccaaggtcaacacgctggcaaaagatgtcaccgagaacatggataagtacgagctgggaatcgccctccagaaggtttatgatttcatctgggaggaattctgtgactggtacattgagatggtaaaaccgagactctggtccgaggaggataccaccaaggcagctgcactctggaccctgaaaacggttctgatccagtccttgaaactgctgcatccatatatgccgtttattaccgaggaaatcttctgcaacctgcaggatgaggaaccgtccatcatgatttcttcctggccggtctacaaggatgagtggaactttgcagaggaagagaaggcagttgagacgatcaaggatgcagtccgcgcgatccgcggtgtccgcacatccatgaacgtaccgccgagcaagaaggcaaaagtatacgttgtatctgaagatccggaagttctgtccatcttcgagcacagccgcgtcttctttgcaactcttggctatgcgagcgatgttattcttcagaaggacaagagcggaatcgcagacgatgctgtatcggctgtgactgcaaaggcaaccatctatatgccgtttgcagagttagttgatctggacaaagagatcgaacgcctcagcaaggaagaagagaagctgaaaaaagagcttgcccgttccgagggtatgttaagcaatgaaaagttcgtcagccgcgcaccggaggcaaagattgccgaagagcgcgagaagctggagaaataccgccagatgatggcacaggtacaggagcgcctggcacagctgcggaaatagttgaatatgaagtaaaaggcaggatcgagagatccgcctgatgcgtgaaataagccgatgtgtatggggaaaactatatgcattggcttatttgcaaagaaagaaccgaaattattctgtttttatttatatgggcgaatgcctttgaagagagaaaggagattatttttttatcctcgaacgaggataattggatgatacgagatattatggagataagaacagcgacaatagcagatctggctcagattgcagccgtggaagcagaatgctttccggcagcggaagccgcaacgaaagaggagtttgaggagagaattaagtattatggaaatcatttctggctcatgtttgaaggcgaaaagctgattgcgtttgtggacggcttcgtcacagacaagccggatctgacggatgagatgtacgaacgggcagaaatgcacgatgaaaacggcgcatggcagatgatttttggtgtcaatacgatcccggcataccggaaacatggctatgcgggacagttgctccagtgcgccatcgaggatgccagaaaacaggggaggaagggacttgtgttgacgtgcaaggaaaaattgatagcctattatgccaagtttggatttgtgaatgaggggatctcggaatcggtgcatggaaacgtgatctggtatcagatgcggtataagttttaaatttaagaagaaatacgtgattgcccgcaaatactaataatacttattataggaatcgaaatggcgtttttaatagaagtgtgataagatacaagtatcagaattaaaaatgagacgccatttcgattttttgtaattgtttgcaacaagcattacaaattcttttccatctttctgcgtgtatcttttgcgtgtgttttatatgcataacgggcatcggaagcaggctgcacgggattgggtgaaaaagggtcaaaaggggcgtccgcaaacaggaggggttagagaaaacatgaaatcattgcaggcgcgttatctggatcgactggcagagctttacccgacgattgcagcggcatcgacggagatcatcaatctggaatcgatcttaaatctgccgaaaggaacggaacatttcctgaccgatatccatggggaatacgaggcattttctcatgtattgaaaaatggttccggttccgtcaagcgaaagattgacgatgtatttggaaataccctgagccgtcaggataagcagtcactggcaacccttatttactatccggcggagaaaatgagccggattctgcagacggagaagaacccggatgactggtataagatcacactctatcgtctgattgcggtctgccgccgggcagcgagcaagtacacgcgttcgaagatccgcaaggcgcttccgaaggaatttgcctatgtgctggaagaacttctgactgagcgcggtgatctgcaggacaaggaatcctactacgatgccatcgtccagacgattgtccgtgtgggacgggcgaaagcctttattatagcgctaagcgagctgattcagcgcctgacggtcgatcatcttcatatcgtaggcgatatctatgacaggggtccgggaccgcatatcatcatggacaagatgatgacctatcactcgattgatgtccagtggggcaatcacgatgtgctctggatgggcgcggcagcgggacagatgggctgtattgcaaacgcaatccgtatctgcgcgagatatggaaacctggatattttggaggatggttacggcatcaaccttcttccattggcaacctttgcgatcaatacatatggggatgacccgtgcacctgcttccagttgaagggcagtgactcttacagtgcgtctgagcgcgagatgaaccagaagatgcacaaggcgatctcgatcatccagttcaaggcggaagggcagatcatcaagcgccatccggaatttggtctggagaaacgaaatcttctgcatcatattgattttgaacgcggcgttctggaaatggatggcaaagagtacaagatgctcgatatgaatttcccgacggtggatccgaaggatccatatgcatttacaccggaagaagcggatatcatggaacgtctggaacgtgcgttcatgaactgcgagaagctgcagcagcatatgaagtttctgctggcgaagggaagtctctataaagtatacaacaataaccttctctaccatggctgcgttccgttaaataaggacggtaccttcaaggaggtagagatctacggcaagcaatataagggaaaggcgctgtacgatattttggacaattatgtccgcaaggggtttgtcgcggtcgataaggcagagcgggaaaaaggcagggatatgatgtggtatatctggctgaatgaaaattccccgctgttcggcaaggacaagatggcaacgtttgaacgctattttctggcagaaaaagagacacataaagaagtaaaaaatccgtattacgatatgctggaaaatgaggaagtgcttgaccgcattctccgtgaattcggtctggagccggagggcgcgcacatcatcaacggtcacgtcccggtcaaatccaaagacggcgagagcccgctcaaatgcggcggtaagcttctcgtcatcgacggtggtttctcaagggcatatcagaaagaaaccggtatcgcggggtatacgctgatttacaactcctacggtctgattctggcagcgcacgatccgtttgagtccaccgaggcggcgatcgagaaggagagtgatatccactccgagagccgtatggtcaaatgggtgccggagcgcaagtgcgtcggggataccgatatcggacgggaactgaaagagaagatcaaggatctggaaaaattgctgaatgcgtactatagcggtgctatagcagaaaaatttacgcgatagcgatttgagaacgaaatcttaaataaagataaaatggaaaatcgctcaacccggaagagggaagagcgattttttgtgaatgctatagtattatttcgtaccaaaaatccgatcccctgcatcccccagacctgggcagatgtaagcgttttcattcaggcagcgatcgacatgaccgacatagatctggacatccggatgtgcctcatgcagtctctttaatccttccggagcagcgatgattgccatgaatttgatgttctttccgccgcgtgctttgataaagtcgattgcctccactgcggaaccgccggttgccagcatcgggtcggtgacaacgatggtacgcagttcgatcggggttggcagcttgcagtagtattcgtgcggctcatgggttgtctcgtcgcggtagagtccgatgtgaccaacctttgcggacggaacgagtgccagaataccatttaccataccgagaccggcacgtaagatcgggacaacggcaagttttttaccagccagcatcggagtgctgcaggtttcgatcggagtttctacttcctgatcttccagcggaagatcgcgaagcgcttcatagcccatcagcatcgcaatctcatcggtcagggaacggaattcgttggttccggtgttcttgttgcggaggagcgagatcttgtgctgaatcaacgggtggtcgagaattgttacatttttcatattcataacctgccttttcttgaattttgatgatgaacgttttttcgtaacggtgcatagcgcagaccgcttgcgaattttgtgctatcttcatgccgtcatttcccaaaatctgtatacatatgtgaaatgtatcgccctgatggcatattttctttaattatacaccgaattgtacagattgaacagtctgttttatgatgtattttgttcacaagcatcggtaaagttactgttcccgggtaggcacttttggaactgaaagtgccgtaagaaaacgtggtggcagcaggaatttgccgtatttaaatgcgaagcc

SEQ ID NO: 11007 - DNA, 96317 bp, Unknown
  gut microbiota DNA sequence
cggtaaaagggcggtttgtcatgaagtagtgcagagcatttgtaaaagaatgcaggtgcttttatatgtttattagaataaaaaataataccagtattatatataagcaatacttctgaaaacaaatcaataaatctaactggaaatgagaatagaatgtggtaaaatataaagtagtgaattattgcacaacaatgaaggaggaagctttgccattatgaagactgtatcgatagcagaggaactgaaaaacaattcttatccgggacgcggaattatcattggacggacgccggacggaaagaaggcggttacggcatactttatcatgggaagaagcgagaacagccgcaaccgtgtgtttgtagaagaaggtgagggcatccgcacacaggcatttgatccggcgaagctggaagatccgagtctgattatctatgcaccggtccgtgtgctgggaaataaaacgatcgtgaccaacggcgatcagactgatacgatttatgagggaatggatcgccagatgacctttgagcagtccctcagaagccgcgagtttgagccggatgcgccgaactacacacctcgtatttccggtatcctgcatatcgaggatggcggttacaactatgcgctgtcgattctgaaatccaacgacggcaatccggattcctgccatcgttatacatatgcgtatgagaagccggttgcaggcgagggacatttcatccacacctatatgcacgacggcaatccgcttccgagcttcgagggtgagccgaaaaagatcgagattccggacagcctggatgagtttgtagcgacactctgggagaatctgaacccggataataaggtatctctgtttgtgcgctatattgatattgcgaccagagagacacagacgaagatcattaacaaaaataagtaggaacagactggaaaatagttaaaaaagtcaaaaaccgtctgaaaatgaaaacaggtcagaaacaaaattgtttatctcagtcgagaagactcccacctcatcaggtggtaagtaatagcaagtttgtctcagtgggagtccattctccgactgagataaacgctccgcgaggatgcgcagtgattctgtaaagaatatgtcagcttcgctgaccagaatcacgcgccaagtctcacggacgttcgacttgaaacagcatttgaatcatgcgtttaaatgggtatacaggaggaatgaagatgaacgaacttgagttaaaatatggatgcaacccgaaccagaaaccgtcccgcatttttatggcggacggcagtgagcttccgatcaaggtactttgcggcaaaccgggatatatcaatttcctggatgcgttcaatggctggcagctggtaagagaactgaaagaggcaactgggcttccggcggcaacttcttttaaacatgtttcgccggcaggtgcagcggtaggacttccgttagacgagacgatgcgtaagatttactgggtcgatgatatgggagacttatctccgcttgcgtgtgcatatgccagagcacgaggtgcagaccgcatgtcttccttcggcgattttatttctctgtcggatgtctgcgatgcagatacggcgcgcatcatcaagagagaagtatcggatggcgtgattgctccgggatataccaaggaggctctggagattctggaatcaaagaaaaatggcaagtacaatgtcattgaaatcgatccggattatgtaccagctccggtggagcgcaaacaggtatttggcgtgacctttgagcagggtagaaataatctggcaatcaaccgtgagctgctggagaatatcgtgactgagaataaagagctgccggataacgcgaagatcgacatgatcgtatctttgattaccctgaaatatacacagtccaactctgtctgctacgtgaaggatggacaggcgatcggtatcggcgcaggtcagcagtcccgtgtacattgtacccgtctggcaggtcagaaagccgacaactggtatctgcgccaatctccgcaggtgttaaatcttcagtttgtggatggaatcaagcgtgcagaccgcgacaatgcgatcgatgtttatatcggagaagaatatatggatgtgctggaagagggcgcatggcagaaaattttcaaggtaaaaccgccggtatttacccgtgaggaaaaacgcgcatggctggacggcatgaagggtgtaaccattggttctgatgcattcttcccatttggcgacaacattgagcgcgcgcacaagagcggcgttcagtacatcgcacagccgggcggatcggttcgtgatgacaatgtaatcgaggtttgcaataaatatggcattgtaatggcatttacgggaatccgtctgttccatcattaatgaaaaagggcgtgtgaaaaaactctcgttttttcacacgccctttttatttcgaaataaagtggctatgatttcttatattttgcctcataatcccgcaggcttacaagcgcttctttcgacatcggaatcagcgcgatcaggttgaagacggtcatcagaccgacaccgacatcaccgagatcccagacaaaggtgtaggcggtcagtccgccgacaaacatcatgatcagggcgagaatcttgtacgccgtctgggcggcccaggtgtctccgaagaggtagctcacattggagcgggcgtagaagaggatgccgatgaaggtagtgaaactgaacagccacaggattacggctatgaaaatgacgcctaattccccgaaatgccagctcattgccgcctgcagcagatccatgccctccagaccggagattttatcagccgggaccagcagcatgatcatggctgtacaggtgcagagaagcgtgtcgatgaaaacgcccatcgcctgcatcagtccgactttggcaggatgggaggtttctgccgtcgctgccgcacacggggcggaaccgcttcctgcttcattggagaaaagtccccgtttgacaccgttcatcaatacggcgccgaagccgcctgcgattgcctggcgcagaccgagtgcttcctcaaaaacgcgggcaaaaacgcctggaagctggcggaagttcacgataattaaaaacagggtcaggataatgtaaatgcctgccatgatcggaaccagcagatccagaaccctgacggaggcatttttccgaagaacgatgactgccgcaaggaaaactaaaaacaagcatgagtagatcggcgggatgccgaatgcattcttaaaagaagaggtcacggaattactgatgacctggctgataccgcaccagcagatcagaccggagaacgcaaacagtacggagagaagatttttcttcgaaaccggcgtgccctgtttctggcgtttgctgttgatccagtcgtgaatgtagtaagcaggaccgccgcggtaaccgccgtagagcggatccggctgtttgtgaagctgggctaaggtcgcctcgatgaaagcggttgccgaaccgagcagcgcggttacccacatccagaacaacgcaccggcgcctccggcggagagagcggcaacgataccgacaagatttcccataccaacgcgggtcgcagttgacacgatcagtgcctggagtgcggagagagagccacctttgtgtccggtttcggccttttccagcagcgcgcgcagcatatccggaagcattcggatctgcaggaaccgcgtccggatagtacagaagataccggtcgggacgagcagaagaaccagaagcggcaggttgatggttgttccgccaggaagcggcagatgaatccagtcaccccagaggaaatagtaggttttttcgattaaattgataattgtattcatgttttcaccccaaaattttatatagtaaaggtgcgcccgcaggtgcttgacgattgattgaaagatagttataatgagtggcagggagttttcagactctcagtatcataaggaaaaggagaattcatatgcagtacgcaattgcacatttagatccgaatgaggacaatccttccatggaagagaatccatgcattaatgttgattttgaaaacgaagaggaatcatgtctggaagctgcaaccatgatgatggatgaaggctacaagatggtaactccatttttcattgaggatggcggcaaagcgggcacatactcctgggagtatgtcaatgcccatctggttgtccgtaccaaataatgtttcacgttgttgtttaaaactgtattgttttaaagtgtgtgagacttaaaatgccggaaagagaagatctttccggttttttatatttacatgttagctgtccttgcacgtttataataactatttcttgaatatgtaattaaatctacttatttatattccgtattgtaccgcacagttgaggaaagtgcaaggggaaaatgagggattgttactggaattttaaataaagataaatagtaataagttgaaagtcgggtgtaaatctcctataatggacagaagaatcttcaggcagaaaatggcatacagggaggcagatggagacggaaaagaaacagacagatgaaaaaaaggaacttcgaaccggatttacgaccggaacctgcgcggcggcgtgtacgcgggcggcggtgttgtttctctgcacaggggaagcacctgcggcggcagagacagtgacaccttccggcgtccgggcgattctgccgattgtccgggcagagcgggaggaagatagcgcagtatgcggtgtacagaaggactccggtgacgatccggatgtgacgaatgggacattggtttgtgcacgggccgttctggcttgtcatgatagcataactgaaagcggttacacagacccggcgtatccgggaattgaggtaaccggcggcgagggcatcggcatggtgacgcgggacggtctttcgtgtccagtggggcattacgcgatcaacccggtaccgcggacggctattttccgggaggcggctctggcacgccgggaggcgggcatgccggagttacctttgcggattgagatttctatcccttccgggcgggagctggcggagaaaacgtttaacccgcatctggggatcatcggtggtatctcggtgcttggaacaactgggattgtgaacccgatgagtgaggcggcattggttgagacgatccggctggatatccgggtgcacgcccaggaggatgtttcgctgctggcagtggcgccaggcaattatggagaacgatttttaaaagaagaaaccgggctttcgatggaaaatttcatcaagtgcagtaattttatcgggaccagctttaaaatgctttcacaggaaggaattcaccaggcgcttttggcagggcatgttggaaaactggtcaaagtggcaggtggtgtgatgaatacacattcccggtatggtgacagacggatggagattttgtctgcatgcgcgcgaaccgttggatttccggaggcagatgccctgctgccgatgaatacgactgaggaagcggcagatttcctatatgaacatggatatctgaaacaggtcatggagcaggtggcgaatcaggtcaaagcggtattggaagaagagagcggcgttcagacggaggtaatgctattttcaagcaattatggactgatggcgcggacagctggggcggatgcgtatgtgcgggagctgctggagatggagagaggcatggaagtaatgatagatagaagaatcataaattacgaaaagttgagattcgaatattaaataaaaaaggagaaatcacatatatggtatatttcgtcggagcaggttcgggagcgccagatttaatcacagtgcggggagcacgccttttgaatcaggcagaccagattatttacgcaggttctctggtcaatccagagcttttggattataaaaaagaatcagccgttgtctatgacagtgcgaaaatgacgctggaagaagtggtcgaaaagatccaagaagcggaatcgacgggtaagatgacggtgcggcttcacacgggcgacccctgcgtgtatggtgcgatccgggaacagatggacgagctggacaagttaaatatctcttataaggtatgcccgggcgtcagctctttctgcggcgcggcatctgcattgaatctggaatataccttgccgggcgtttcgcagagcgtgattatcacccggatggcggggcggacgccggtgccggagagggagagcatcgcgtcgtttgcagcgcatcatgcgactatggttatatttttaagcacgggaatgctgaagaagctttcggaagagctgataaagggcggatatgaggcggacacgccggcggcgatcgtgtacaaagcgacctggccggatgaaaagcgggttgtctgcacggttgccacgcttgcagaggcggcagagcgggaaaatatcaaaaaaacagctctgattatcgtcggggatgtgactgcccaggcgggatacgagcgctcgcgtttatatgcgccagaattcacaactgaattccgtcaggggacggatggttttgtatatgagtaatagaaagggattgttataaatggagcagttgaaacttcgggtcaggaacggtatctgcatttgctttactgcacagggaaaagagacggcgacgcgcctgctggagaaattaagccagcagatggaagaggcgtttgactttttagattatacaggatccgaacattcgaaaccgctgaaacaggtggtcaaggaagcatttcaggagaaggaagcaattttgtttgtcggggcggcggggattgcagtccgtttgattgcgccgtgggtgcaggataagctgaaagatccggcggtgctggtgatcgatgagcagggacgttatgcgatcccgattttgtctggacatgtgggcggatgcaatgaactggcagaggcagcggcgcagattctgggggcagaaccggtaattacgacggcaacggatctgcggcaggcatttgcagttgatgtatttgcagcggaaaatgagctggtgattagtgatcgggaactggcgaaacaaatctccgcggcggagctgcgcggtgaaaaaattggctttttcagtgattatccagtagatggaatcgttccggcagagattactccgggcgtatggcagaaggaaaacatctatgtgacgctgaaacagggcggatgcccgaaaaatgccccagcgtctctggtgcgccgggatatggtgattgggctgcaggagaagaaggaacagcgggatgcagtcaaagcagcggcggtagtggcagtggaaaccggcgattcggcgaaggcggctgagatagatatgtctgtcggaaaatccgatataggatctcctgggcagaaaagtgagcagaagaaagagcaaagttatgagtcggaaaatgaatcaggtacgccggaacttctgcgcctgtatccgcgaacggttgttcttggaatgggatgccgccgggattcctccctgaatgctgtccgggagatggcaagagtggcactttctcgggcgatgattgataaaagtgcggtgcgggcgattgcaacggtagatcggaagaaaaatgagatggcatttctggcgcttgcgaaggagtgggatgtggaactgtggagttttaccccggaagagctggaaagtgccggtacgaagtttgcagaatcgccgtttgtgcggaagacagtaggggtaggaaatgtttgtgagcgtgcagccgtcatgggggtgcgccggatttaccgggaacgggagatggatgagaaaaatctgcctgcgattgatctgagagtacagaaaatggcgtttaacggtgtgacggcagcagtagcggttccggcatcggagcaagtaaggaggcagcagtggaagaaaaaaaattatacgtgatcggaattggaccgggggcgagagaacagatgacggtccgggcagaccgcattttgcgggaaagccaggtgatcatcggttatacggtatacgtggacctggtaaaagaattttatccacaggcggaatttctgacaacgccgatgcgccaggaaaaggaacgctgtgagatggcattaaaagcggcgcaggatggtcggaaaacagcaatgatctgcagtggggacagcggcgtctatggcatggcggggctggtgttgcagatggcagaggcgtacccggatgtgaacgtggaagtaattccaggagtgacggcagcgctgggaggcggagccattctcggtgcaccgttgggacatgattttgcggtgatcagcctgagtgaccttctgacgccgatggaagtgatcgaaaaaaggctgcgtgcagcggcggaagcggattttattatctgcctctacaatccatccagccggaaacgccacgattatctggagcgtgcctgccggattcttttagagtataaaagtggtgagactgcctgcggatatgtacagaatattggccgcgagggcgaggcggtgcaccttctgacactggcagaactggaaaagacgccggtggatatgtttacgaccgtatttattggaaataaggaaacgcagatgttaaatggatgtctggtgacaccgaggggataccgcgatgtgtaaaatatggatatttggaggaacgacagaagggcgcctgctggcggaatattgcagccgggaaaagattgaggcgtgggtcagcgtggcttcggagtatggagaggagcttttgcaggaggagctgatggaatctgggaatgcagggaatccagatttgaaccacaatacttgccttgcaaagaaaaacttgaaaacggttcaggcatcctcagtgataaaagtcttacgtggacggatggatcgttaccagatggaagaatttatccgaaaccaggggattcatcttgtgatcgatgcaacacatccgcatgccagacttgtttcagaagaaatccaggaagcgtgcggacggaccggtgtccgcctggaacggtgcctgcgcgcagagggcgaacaaaacaaagcacgtgattgggtcgaggttgattccattcaggaggcagtgtcatttctttcttctgtttccggcgtgatttttgccacaaccggcagtaaagaactggaagccctgtgccagataccagattatcaaaaacgggtgtatgcgagagtgcttccaacttcgaatgttttgaagaaatgtgaaaaattggggataactggcagccatctgattgcgatgcagggacctttttccaccgaaatgaatacgctatttctccggcagacaaaagcggagtggctattgacgaaagattccgggcgtgcgggcggatttcaggaaaaggtggaagcggcgcgtgaaaatggaaccagagtggttgtgatccgcagaccggaggaggatggtatttcgctggaagaggcaatggaggtgctgaagaaggcggatgaggggaatgttggagagttaaaaacacatttgattctggcgggaattggcatgggacagccgtcccagatgacaggggaagtccttcgggcaattcgagagagtgacgccttgattggcgcggggcgtatgctggaatccgcggagagagcgctgcagaatgatttgctgattagcaaggaaggaaaagctgaaaacagacaggaatcagcggctgcggtggaaaaagaaacgaagtgctataaagcatatcttcctgacgatgtgatacagattgtatcgaagcacccggaatggaagcaggcggtcatcctgtattcgggtgataccggctttttcagcggggcatccaggatggcagagcggctgcgggaagctggttatccatttaccgtctatccgggtacatcctgtgtcagttatctggcggcacgcctggggacgcactgggaagatgcggcgatttattccgcacatggaagagaattgtctgtcgatcgggtgatgaaacgtctgtgtgatccagaagaaccggctaagcgtgcgtttatcctcatgggcggcaaaaatggagctggacagttttgtgaacgtctgacacaggcgggatatggaaatgtacaggtgacggttggtgaaaacttatcgtacccggaagagcagatccggagcggaaccgcggaagaaatgaaaaaattggaatttgcggatttgagcttgatgctgctggaagtcacggatgaaataaagcgtgggcagaacgaagaggaaaagattacagatggtaacaatacagaaacaaaaaatgtagagaagttgatatatgaacagaaaatggtgtcagaaaaaatgccatccgatgttcgagtaacagaatcatataaaaatgatgcagataaacttttgccacatgaggcttctgtcagagcatgtccacgcatcatgcttgccgcccccaaaagcggcagtggaaaaactcttttgacctgcggactgcttgaaatccttcgccgccgcggtctgaatccgatcgcgtgcaaatgtggaccggactatatcgatccaatgtttcaccgctatgtgctcggcatttccgggcgaaatctcgatagcttttttctgccggcggaaggcgtgcggaaggttttggtggatgcagtgcgggaagaacaggcgggaattgcagttttagagggtgtcatgggctattatgacggcttgggcggaacagaaacgtccgccagcagctgggagattgcagagatcacagacacgtcggcgattctggtgctggactgtaagggcgcatcgttgtcggcggcagcaatggcatctggatttttgcatttccggaaaaaaagccatattgccggagtgattttgaaccgggtttcttcgatgtattatgagcggctggcagcagccgtggaagaggcgtcggggcttccggtgcttggttatctgccggaatccgaggaataccgcatggaaagccgccatctgggactttttctgccgggcgagatcgatcggctgcgcgagcggatcgggcgattggcagatcagatggagaagtcgattgcggtggatcgggtgctggaagtagcggggatgctgccattgaggatagaaaacaaagagaaagaaaaagcagaaaacgaatcaatggaggcggaaagtatagcgaaattcccagcatgtcaagagcaaaaagtcacctcgcgcgtccgcatcggtgttgctcgtgacgaggcattctgcttctactatcaggaaaatttccgccttctggaacagatgggtgcggagctggtttatttcagtccactgagggataaaaaaatcccggacagagtggatgggcttttatttggcggcggttatccggagaattatgcacgggagctggcaaagaacgcggcgatgcgtgagagtatccggcggtcgattgcggcgggaatgccgtttctggcggaatgcggtggatttttatatttacaccgtactcttgaaggaagcgatggaaaacactgggaaatggctggcgtttatccatttgacgcttaccggacgaaccgcctgcgccggtttggctatgtgcgtctgctgacctcatccggtcaggaaattcacgggcatgagttccattactgggagagcgaagatccgggcaccgactgggaggcagtcaaaccgaccggaaaccgaagctggcgctgcatccatgaaaagggaggacagattggcggatttccgcatctctattatgcatcctgtccagattttttgcgaaaatggctggatgaatgtgccaaagggagtcagcaaaaatataccaattgagtgaatttatatgagaatttagaaaatggggagtaccaaatgcgagatgaatggtttatccggggcaaggtcccgatgacgaagagtgaggtgcggaccgtgtcattgtccaagctggaattgtatgaggactgtgagttctgggacattggcgcgggaacgggttctgtcagtgtggaagcggcggtaagctgtccggggattcatgtgtgtgcgtttgaatataaggaagaggcggttgatctgatccgggcaaattgtgagaaagccagaacagaggcggtcacgatcgtgccgggaaaggcgccggagacatttgcacaggtaagtgttcaccgaccggatcgggcatttatcgggggaacaaccggacagatgcgcgagattctggatgaattgttccgcttgaacccagatatccggattgtgatcaatctgattgcgctggagtccctgacagtgcttatgagttacctgaaagagcgcgggatagaggcggagattctgtccatgcagattgcaaaagcggagaagattggttccagtcatttgatgaaagggcagaatccgatctatatcatatcactgggaggaaatgaagcgtgaagaaaatgattcagccagaggcattaaaagtgggcgcgaatcgtataagcgcgaacgatgcaaggagtgtaaaattagattttgcaccaatggagggaatcacgggatacgtattccggcaggcgcatgcagtcatttatgggggcgttgaccggtattacagtccgttcattgcaccaggttccagccataagctgatatccagggagaggaacgatattcttccagagcataatcagggattatgcctgatcccgcagattctgacacattcggcggaagattttctgtgggtttgcgaggaactggcggagtatggatataggacggttaatctgaacctgggctgtccgtcggggacggtggttacgaagaaaaagggcgcgggatttttagccgagccggaagatttgagcttgtttctggaggaagtttgcaacggattggaaaaaatccacgcgtcggatggaaagccggtgcgtttgtcgatcaaaacccggatcggcatgaaagaagcgtctgaatttccacgcctgcttgctatctataatcactatccgctggaagaactgattgtacacccgagagtgcgcgaggactattataaggggaaaatacggatggagtcatttgcgtatgcgctggagcagagccgctgcccggtcagctataatggaaatcttttttcggcggcggatgcgtctgcacttatgaaagaaattgtaggacaagatgaagcatctgatagcggtaaaacgcagaaaaaaatgaaattagccgcactgatgtttgggcgcggtgcggttgcgagcccgtggatttttggagaggtgcggaatctgccatcctcgaatcatctccaatctttccagcagttccacgatcgcctcctgaccggttatgcagaaatcatgtccggcgaccggaatactttgtttaaaatgaaggaactctggtactatttccagtgccattttccgggatgtgaaaaagaattgaagaggattaagaaggcacagaagctgtctgactaccgggcttctgttcaggcgatgtttgcgagcgggcggtttgtggaagatggttttcgcaacccggcaccataggagtgataccgggctgtcctgtaaccatcctctcattcaggcagtacagtgttgcgaatatcaaattttacacagattttacatttcctgctggttatttttacatttatttgatatagtgaagacatactatgtgtaaagatcaaaagatgatgggagaatatgtatgtctattagtactttgggaacactctttcagttcattggaggactgggaatgttcctgtatggaatggagtcgatggcggatggtctgcagaagtttgcgggcaaccgtttacaacgtgtgcttgagatcctgacttcgaaccgcttgctgggcgtgctggtgggcgcgggtgttaccgcgatcattcagagtagttccgcgacgacggttatggtcgttggtttcgtaaatgccggaattatcaatcttctgcaggcgaccggcatcatcatgggtgccaacattggtacgactgtgacgagctggattgtgtcgatgagtgagtggggcgaggtgttaaagccagagttctttgcaccggttctcttcggtatcggcgcattcatcacgatgtttgcgaagagccacaagaaaaaagagggtgccgaagtcctgatcggttttgcactcctgtttatcggtctttctttcatgtccggttcgattgagccgtaccgggatgcgccgatcttctccgagtccttccgggtactgggacagaatccacttttaggtattttagtcggtctggcagttaccgcaatcatccagagtagttccgcgtccgtcggtattttacagatgctggcgatcaacggcatggtaaactggcagtcagcagtctttattacattgggacagaacatcggtacctgtgcgaccgcgctgttatcttgtatcggtacgacccgtacggcaaagcgtgcggcggtcattcaccttctgttcaatgtgacgggtgcagttgtatttggcgtcgctttatacatcgtgtttatgatgaatccggagcttgcgatgacgcgtgcggacagtgtgggaatttcgattttccatacgatatttaacgttgtcaacacctgcattatgttcccgtttgctggtttcctggtaaaggcatcggatgtgattgttccgaagccgaaggagacagagaaagagtggtcggcaaacagtgtcgagaccgagatgatccgtcacttagacgaccgtatcctcgaaactccgtcctttgcgattgagacggcgtgcaacgaggttgtcaacatgggcaaggtagcggttgccaacttaaaaatagcgacagcagccttagtagatgcagatgataatttttgtgaacaggtatttgaaaatgaagagacgatcgaccgcatggagaaaatgctgaccgaatatctcttaaagatcaacaacctctccttgaatgatgaacagcatcttctcgttaagaatatgtattatacaatcggtgatcttgaacgtgtcggtgaccactgtgaaaacttagcagagcttgccaagaaacggattgagaatgtgaatattgatttctcggatctggcgctgaaagagctgcggacgattgcagatgcaacgcttaaatcggtcgaggcgtccgtggaggcgcgtcaggcgcatgacatgcagaaggtgcgtcagactgcccgctgggaggaagaggttgacagtatggaagaggagatgcgcgagaaccatatgaaccgtctttccaatggagactgcaagattgagggcggtgttatcttcctggatgcactggcaaattatgagagaatcgcggatcatgccaagaatgtagctggctacgtaaaggaagagatgcagtaatgaaatatcggatatatgtgattgaggatgatgaaaatatccggaatctgatctgcgtggcactggaaaacttcggttactgcgccagcggatttgagacggcagaggaagcgcttgacagcctctcggagctgctccggagaggcagggaggcgcagcgggagtatccggcgatgtttgtattcgactggatgctgccggggatggacggcatggcggcgatccgcaaaatccgggagatgccggacttttccgcagccccggtcctgatgctgacggcaaaggatcgtgagatggatattgtacagggacttgacaacggtgctgacgactacatgacgaaaccgttcggtattctggagctttcggcgcgcgtcagaaaccttttaaagcgggtggaacctgcaaaagaggaggtttccagcctgacgatcggtgaagtcagcatcaaccgggagacgcgtgaggtgattgcctgcggcgaccggacggagcttacactcaaggaatttgaacttttaacatatctcatggaacatatcaaccgggtggtgacgcgcgacgagcttctcgatcatatctggggctatgactatgatggggagacgagaacgctggacatgcacatcaagacactccggcagaagctgcatgatgccggagctcagatcaagacagtgcgcggcgtgggctatcggtttttaagggaaaaagaagcgggaaagtgatgaaacgatgcgaaaagcgattttgacgaaatttattcatctgttattcctggcgctggttctgaatacatttatcgctctggtggttaccagcagtgtattgctcaaacggtcaagggaggacatgcattttgcattggaatccgttgaccgtatgttggattatacgggaaatgtggaagaacagctgatggatttgagcgaccttacggacgacaataatagccgttatacgctgatccggatggatggcacggtggtggctgatacggaagtagcgcaggtgaatcagatggaaaatcatctggagcgcaaggaagtgaaggatgcgctggcgacgggctatggatattcggtgcggcgctccggaacgttaggaatgcagatggcgtacgcggcgatccgttcatcggacggcaaatacatactgcgcctttctgcctgttcaaccggtttgggtgaatatatcctgatgttgattccggccgcttttttgagctttggaatagctttttttgcatcggcaatggaggcggaacggttttcccagtccatcacgcgtcctttgcaggaaatttccagtgaaatggtgcggatggatgacgactacacgcgttttcagtttgaaaaatgcccgtatgaggagatcaatgtcatcgcggacacgacgacgcggatgtcccgaaatatgaagaaatatctggagcgcattgagaaagaaaaacagatccggcaggagtttttcagcaatgcatcgcatgagctgaaaacaccgatcacttcgatccgcggttacgtcgagcttttggaaagcggcatggcacaggatccgggcacggcacgtgattttctgggacgcataaaaaaagaggcaatgcggatgacgaacctggtggatgatattttgatgatctcccgtctggaatcgcgcggtgcgaaagcagatattgtgacgatccgcacggtggaactgctggaggacagcctgtcttcgattgccgcgcaggcggcgtcgcgcggcatcacagtccataaagagtgcgagaatttcacgattcgtgccgatctgcgccagatgcaggagctgtttaacaatctgttgacaaacgcggtcaagtataacaacgagggcggcgaaatctgggtgcaggtcaagcactggggcgcggatatgatactgacggtccgcgacaccggcgtcggcatcccggcggagagccagagccgtatttttgagcggttttaccgggtggataaagggcgcagccgcaaacagggcggcaccgggcttggtctttcgatcgtcaagcatatcgtgaatttttatcatggaagcgtgaaggtagagtcggaagtcggaaaaggttcaacgtttacggtgaaactgcagatcgcggaagcaaaataaaaaagagtcaacctaaattccctataaaatagtggaattttaggttgactctttttggagtttgtagtatgattgctttaaagcgtaacagttcagctctttaaagtgaaaaataaatcatggtttgatgcataagaggaaaatctgttacatacgttgaaaaggttcaggaggatgatattatgagaaagacaaagaaattagcagccctgatgctggctggcgcgatggcggcatccctggcagcctgcggaggacagacagcaagtacggacacgacagcagcggagtccgcagacggagaagaaagcaaagaggcagagcagacagcagacggcgagacctataagattggcgtattacagctgacccagcatgtggcactggataagaccaatgagggcttcgtggcagcgctggacgatgcaggcatcaaatacgagatcgaccagcagaatgcagctggcgagcagtctgcatgccagacgatcgcagagaaactggtcaacgataaagatgatttgatttttgcaatcgcaaccccggcagcacaggcagttgcaggtgtgacggattcgattccgattcttgtcagcgctgttaccgatccggcggcttccggtctggtagagagcaacgaggttccgggcggcaacgtatcgggtacttctgatctgactccggttaaagagcagattgacctgatgcagcagattattccagatgtaaagaaggtcggacttctgtattgcagcgcggaggcaaactccgttcttcagattgacatggcgaaagaagcacttgatacagctggtattgagtatgaagattacaccgtttccaattccaatgagattcctaccgttgtagaatctatggttggcaatgtagactgtgtatacacaccaaccgacaacatgatcgcagctggtatggcaaccgtaacgatggtaacaaatgagaataaacttccggttatctgcggcgagaaaggcatggtagatgcaggcggtcttgctacttacggtattgattactaccagttaggctacatgaccggtgagcaggccgttaaaatcctgactgagggcgccgatatttctaagatgccgatcggttatctggacgcttccaagtgcgagctgagtgtcaatgaagagacagcgcagacgctgggaatcgatgtatctggacttgagaaataaagagtaccagaaagacctaaacttcaaatgagatggactgtcagatcagaagcataaaataaatatgccgatctggcagtctttacagttaatcagatgaagaaaatacaaaacacgaggaggtaaaagtttgagcggtttattagtatccctgcagggcgcggtcgcacagggtgttctctggggaatcatggtattgggagtttatattacattccgcctgatggatatcgcggatatgacggtagacggaagcttcgcgttgggtgcctgcgtttgtgcagtcctggtagttaacaaaggagtgaatccggtgctggcacttttagttgcagcggcagccggtgtcgtggctggtgcggtaacgggtattcttcatactgtatttgagataccagcgattctggcaggaattctgactcagatttccctctggtcgatcaacctccggatcatgggaggaaagagcaatctgccgcttctgaaagtcaagacacttatcagcggtctggctgcttccttcgggatgacccaggcacaggcatcgatgatcgttggaattgtgctggctgtggcggctattctgtttctttactggttcttcggaaccgagatcggaagtgcgatgcgtgcaaccggtaacaacgaggatatggtgcgcgcgctgggcgtggacacccgtatgacgaagcttttatccttgatggtcagcaacggcctggtcggtctctctggcgcactcgtctgccagagtcagaaatatggtgatgttggaagtggtaccggtgctatcgtcatcggtctggcggcgatcgtcatcggcgaagtcctgatgggacgattgacctctttctattggaaactgacctccgtggttgtcggttcggtcatttactttgtgatccgtgcggttgtactccgcatgggtatggatgcaaacgacatgaagctgctctctgctgtcattgtagcactggcactctgtattccggtagcactcgctaaataccggctgagaaaagattattcagaagggggtgaggagtaatgctgacgataacaaatgtaaagaaaacttttaataaaggaactgttaatgagaaaaaagccttaaacggtatcaacttacacctggcaccgggcgatttcgtgacgatcatcggcggaaacggtgctggaaaatccactatgttaaatatgatcgcaggcgtatatccgatcgattccggtaaaatcgagatcgatggcgtaaacatatccagagaaccagaatacaaacgcgctaaatatatcggcagagtcttccaggatccgatgcgcggcaccgccgccaatatggagatacaggaaaatcttgccatggcgctgcgccgcggcaaatccagaggactcggctggggcatcaaaaagaatgaaaaggacttctaccgtgaggcgttggcacagctcgacctggggcttcagacccgtatgaccagcaaagtgggcttactctccggcggacagcgccaggcgctcacccttctgatggcaaccctccagaagccaaagctccttcttttagacgaacacaccgccgccctcgatcccaaaacagcccgcaaagtcctcgatctcaccgaaaagatcgtagatgagcaaaatctgaccgcgcttatggttacccataacatgaaagatgcgattcagatcggcaatcgtttgattatgatgcacgaaggtcggattatctacgatgtagcaggggaagagaagaagagtctgcaggtagaagacctgttggagagatttgaaaaggtaagcggagaagaatttgcgaatgatcgtatgatgcttgccaaataagcaggggttataagatttgaagggttttatctcagtcgagaagactcccacctcttcaggtggtgagtaatagcaaatttgtctcagtgggagtccattctccgactgagataaacgctccgcgaggatgcgcagtgattctgataggaatatgtcagcttcgctgaccagaatcacgcgccaagtctcacggacgttcgacttgaataaaatcaataaccgataacagacaaaaagtatacggaatgaaaagtgggtcaacaaattaaaaaccacgactataagtgagaaagaatgccctccggcggcgcgagcggtcggagggcattctttctcactaagtagccgtgcattctcctctcccatatttccaactaattccccctttcacgacttaaccgtttatctacaacttaacacttctgtaataattcattcatagaaaattcattttttcctccacatccttccttggcaattccctacgaatatgataaaataaaaattacgtttaagatattaagtcataatttcaagaaaaatcaggagcgatccatatgttagaagaagaaaacaaaaaagaaacgcaggagtcagaacaggtgccagcggcggagcggattcaagagccggaagcagttcagagtcaggaatcagaaccagctcaggatcagacaccaaatccggtccgggaatccgcgggacattcgcgcaggcgccagggcgaagataagagtcagaatctgcgcttcggagtgatagcagcaggggtggtgattgctcttgcagttgcagcatttgcaggcaagtccctgctcagccgtcaggcgggagccggaactgcaaagaatggggcggcgacagcatcagagctttcgaaggacgaggcatccgaagagtccagagcggaggagatcaaagagaaagaagcagtggtagcttcctataaaaatttgggtatcgtgcaggtgtccggttatctgaatatgcgtgagacggcgagcacggatggcaacatcatcggcaagctgatgggcgacagtgcgtgtgagatcgtggatgattcagccgaaggctggtatcaggtcgaatctggcggtatttccggttatatcagctcagagtttgttctgaccggggatgaggcgaagaaaaaagcgttggaactggttgaaaagcgtgcgctcatcacggcagattccctgaacatccgaaaagagccgaacacggagtcagaggttgtcggtcaggcattaaaaaatgagcgctatgtggtcgagagtgagccgaagaatggctggattcagatttcgagcggttatatttccacggattatgcagagatcaaatacgcactcaatgaggcgcggaagctggatatgcgtgcgatggtgctgaatttatacaaaaatctaggtatttccagtgtggataattacttgaatgtgcgcgatcagccaagtgaggatggcaatatcatcggtaagatgacgagcaagtctgccggagagattctggagacgagcgaggacggcggctggtataagatccagtcgggtcccgtcactggatatgtgaaggcggagtatatcctgacaggagatgcggcgaagcaggaggcgatggaggttgcagaactgatggcgatcgtttcaaccgaccgcctgaatgcccgcacggagccgagcacggatgcgccgatctggacgcagatctctaacaatgagcgttacgacgttataagccagcaggatggctgggtcgagattgcgctcgatacgacgagtgcgtatgtggcgactgatttcgtagatgtgcgttatgcattgccggaggcgatcccatttaccccattaaaagaaaaggaatccttgcggacccagattgtcaactatgcgcttcagtttgtcggaaaccgttatgtctggggcggtaatgacccgcattcgggtgtggactgttctggttttacaaagtatgtatacagccatgtggcgggcgtgtccctgccgcgggtgtcccgggaacaggcgcggacgggtacgaagattgattcttcgaagatgcgtccgggcgatctgattttctatacgaatcgcaagggaacggtcaaccatgtggcgatgtacattggcaacggtcagatcgtccatgcggcgagccggagaagcggcatcaagatttctacctggaattaccggaatccgtaccggattgtcaatatgctgggagactgatagggagaggataagatggaagagcaaaagacagaagattataaagaacgcctgcagaaagtacgtcagagacgaaatggcaaagatccgatgcactggttcatgatcggaggctgtgctgtcattgtggtgctggctctggttatcatcgtgaagctggcacagggcggcacgttcggaggttctggaaacgcccgggtggcatcggcatccgaggcagaggtgcaggaaaccgtgatcggagagacgctgccggaggatgaggaacaggcaaaagaggacgaagaaaagaaaaatgtagtcgagtcctaccagaatctgggtattgtggatgtatctggttatcttaatatgcgtgagagcgccagtacaacctccgacgtcattggcaaactgatgggcggcagtgcgtgcgagattctggacgattcccaggaaggctggtatcagatatcttccggcggtctggagggctacatcagttcagaatttgtacagaccggcgaggcggcaaaaacagaggcatttgagctggtcaagaagatggcggtcatcacgactgacaagctgaatatccggagtgagccgagtgaggacgcgcaggtgctggaacaggcgctgaaaaatgagcgttattccattgtcagcgagcaggacggctggattcagatcagcgggggctatatttcagcggattatgtggatgtgcgctatgcgttaaatgaagcgcgtaagctggatctgcggacgatggttctcaatatgtatgacaatctgggtatttccaatgtcaataactacttgaatatccgcgtggagccgaaggaggatgcgaagatcatcggtaagatgacgagcaagtccggtggtgagattctggaaacgaccgaggatggcggctggtataagatcaagtccggtccggttactggctatgttaaatccgaatttattctgactggagatgcggcgaagcaggaggcactgcaggttgcacagctgatggcgatcgtatcaactgaccgtctgaatgcccgtacggagccgaacacggacgcgccgatctggacgcagatttccaacagcgagcggtattcggttatgagccagcaggatggctgggtgcagattgcactggatgagacgagtgcctatgtagcgactgaatttgtcgatgtccggtatgcgttaaatgaggcgatcgagtttacaccggttgaggagaccccggagcctgagaccaaggcggcgagcagcaagggaggctctggaagcaagagcagcagtaacggtggttctggcagccagaaagcatcttcaagcggctcctccaagcgtgcgcagatcgcaaactacgcgactcagttccttgggaatccgtatgtatggggcggtaccagcttgacaaatggtacggattgttctggatttacgatgtcggttatggcacacttcggcgtcggcctgccgcatcattcgggttcccaggcgggagcaggaagaagtatcagttcttcccagatgcgtccgggtgatctgatcttctacacaaacagcggtggaacgatcaaccatgtagcactctatatcggcggcgggcgcgtgtgccatgcatcgaatgcaagggatggtatcaagatttccacctggaattaccgtaccccggcgaagatcgtcaatgtactgggcgattaattccatggaaagtcaataaaaaatatttgaaagagagcagggagaaaaggcagcttttcccagctctctttttctgtttcataggaaattgtgtcctatgaaataaaaaacgcatcgcggggatgcgcactcgcgcgaagcagaaacatgtcgcaagtgaccgcgcgagacgcccgaatgtgccaaggcacatccttgtttgtataaaaagcggtttcagtgaataaagataataggaagacagaatactaagaatgaattaggcagttgagaaaaaacattgaatccgcgtgtaagatggaaagagcgcagaaaagaggaaaatatgattcgggcaaatcgtgaaaacagggaatgggaaaatgaagcgtgggacaagcaggcagataaggtgggagaaagtcgggaacaggcgcaggaggatccgattcagaagcgtgaaaatggacagacggatattacgggaaagaatggcaatcacattgaattaatctcgatcatcggagagatagagggacatgaaaatttgtccggcaatacgaaaacgacgaaatatgagcatattctgcctaagctggcggagatcgaggagagcggtgagacggagggagttttagtcctgattaacacggtgggcggcgatgtaagctgtggactggcactggcggagatgattgcttcgctcagcaaaccgaccgtttcactggtcatcggagacagccattcgatcggtgtgccgctcgcagtggcggtcgatcactcttttattgtcccgaccgggacgatgatggtacatccggtacggatgacggggatggtgatcggtgccgtgcagacgtatgattattttgaaatgattcaggatcgtattttaagctttgtgtccggacacagtcagatctcctatgagcgcctccggagcctgatgctcaatacggagatgatgacaaaagatctgggaacggtcctggttggcggggaggcggtccaggagggactgatcgatgaatgcggcgggatccgggaagcgcttgcatggctgaaccgggcgatcgatgggaagaaacaggaaatagatgcacacgaccggatgacgaagacggattttagtgaaaatctgaaaagaaagtagaacatatgtgcgaaaattttaggaaagcgttgcttttttccctgaatttgggtatactgaatgagataataagaatgaaaaatgagaaaagcagtctgcgggaggctgtattttgtgaaacagggggaaccgcagatacatgggaaatattggaggcatgagacaggtggcagatacaagcaggaaaagacagagtacagagcgtgccggggagacagctgggacagagaaaaaagccgggcgatccagaaagtcccctgcggcgaagaaagcggaggagacgctgaacgagaaaaagagtggggggaagaagaaagcttcgtccggaaaaggcaccgcgaaaggaacaggaagccgaagccgcgccagccaggcgccggagccggtggagaaaagtggtacaggggcatttatgggaacggaagtggcgattattgtatcatttgcaatatcggtacttttgtttttgagcaatttcgggctttgcggctttgtcggaagttttctgcgatcgactttgcttggcgtattcggcgtgatggggtatctggtgccattccttttattcatgggaacttgtttttatctttcaaaccgaggcaaccagaaagccgtagccaagttggtggcggttggcgaggtgcttctggcactttgcggactttcccagcttctcatgggaggcggtcagcatctggactggaatctgggcgattattacgcgcaggtaggcggaggcggctttatcggtggcattctgatgttgctgttgtgcggaacagtgggaacgatcggagcagttctgattctgctggtgcttttggcactcggtgctgtgtgcattacggagcgttccctggtaaacttcgttaaacagggcagcggaagggcatatgagtatgcgaaagaagatatgagccgccgccgtgagatacatgaggagaaaaaggaagaaaaacgccgtctgcgggaggagcagcgggtccgtggcgttgatctcgagggcgccaagctgaccgagctgccagtgatgcggaatttctcggaaggagtcccggagggaaccgtgctgggaccggaggatgcaccggaggaattccgtgagatgcatggaaggcaggaaaacttgcaggatgagacagcggcttatgatgattggtccgatgttccggcagagggaaaaaatctggcacaggattccggacagggagtagagaagaagaatccggcagatgtatttcgcggtcagatatttcacggcggcggagcggtagaaccggaaccggtggagtatgaagaagatccggtggagtacgaagaagaaccagtggaatcggagcaggatccatatacatacgctggttcagaatcccagcttcaggaagaagcggagcgcgagacggcgcgggcggtaagggagacagaatttgcggaggagcctgcagagacagaggacagtgcgagcgaccagttactgaaacgcctgtatgtacgccgtgatacccggacgatggaagaatttgccggcggcgagagtcagaaaggtccaggctattatccggtagagacacgggagagaccggctgcggaggcggtttccggtttgaccgcggaggaggttcatacagatttagggcatcaggatgtctttgaaccatcggaagacgagtgggaaaccgtttcgatggaaaatgagaatgaagggaacgaacctatatctggggaaacagattccgagccaattgatggctattataagacgctggaatcggaacggggcgaggcaaagggcagtttctttgtcccggaggattccaaaacggtcgtgactgcatccggaaaggtgatcgagacagatacagaggcgatacagaaaaaactggagcagaaacgggaagaacgaaaagcacttccagttgaggaactgacggttccagagcagatcgagcgcaaggaagaggaagaaaagaagatccagaaagaatacatattcccgccattgacgcttttaaaacgcggcacgggacagaccgatttctcggatcaggagtaccgggagacagcgatcaagctgcagcagacgctccagaacttcggcgtgggcgtgacggttacaaacatcagctgtggaccgacggttacccgctatgagcttcacccggagcagggtgtcaaggtcagcaagattgtagcgctggcggatgatatcaagttaaatctggcagcggcggacatccgtatcgaggcaccgattcctggcaaggcggcggtcggtatcgaggttccgaacaaggagaaccatgtggttctgctgcgcgatctgctggagtcggagacatttaagaaatatccgtcccggctggcattcgcggtcggaaaagatatcgcaggtcagacggttgtcagcgacattgcgaagatgccgcatcttctgatcgcgggtgcgaccggatcgggtaaatcagtctgcatcaatacgctgatcatgagtgtgatttataaagcgaagccgagcgaggttaagctcatcatgatcgaccccaaggtggttgagttaagtgtatacaacggtattccgcatcttctgattccggttgtgaccgacccgaaaaaggcgtccggcgccctcaactgggcggtggcagagatgaccgaccgttaccagaagtttgcaaaatacggcgtgcgcgatcttaagggtttcaatgccaaggttgagtcgatcgcggatatcgacgatccgaagaaaccggagaaactgccgcagatcatcattatcgtggatgagcttgccgatctgatgatggtagcgccgggcgaagtagaagattcgatctgccgtctggcacagctggcgcgtgcagcgggcattcatctggtgattgcgacgcagcgaccatcggtcaatgtcatcaccggtgtgatcaaggcaaatattccgtcgagaattgctttttccgtctcttctggagtggattcccgtaccattattgatatgaacggcgcggagaaactgctcggaaagggagatatgctgttctatccgtcgggctatcagaaaccgcagcgtgtacagggcgcgttcgtgtccgacaatgaggtttcggatgtggtcgaatttttgaaacaggaggggctgaccgcagagtacagcgccgaggttgagtccaagatccgttcgacggcgatggatgcgggctttggcggtggtgagcgcgatgcctattttgcacaggcaggtaaatttattattgagaaagacaaagcatccatcggcatgctgcagcgtatgtttaagattggcttcaaccgtgccgcgcgtatcatggatcagcttgcagatgcaggcgtggtcggtgaggaagaaggcacgaagccgcgtaaggtgctgatgagcatggagcagtttgaaaacatgatggaagaaggatattaaaaagcggaatcattataaaatatcaaaatcaggaggtatcctatgaagcttaaaagctggctgaaagaattgccgtatacattattgcagggcagcctggagacggaggttgacgaggtggtctacgattcaagaaaggcggcgccggggacggtgtttgtgtgtatgcgcggggcaaacgtcgattcgcacacctttatcccggatgtggttgaaaagggcgcgccggttctggtggtcgagcatccggttgaggcgcctgagaacgtgacggtcattcaagtggagaatggacggaacgcgctatcgcttctttcggcggcacgttttgattatccggcgcggaagatgacggcgatcggtgtgaccggcacgaagggaaagacgactaccacttatatgatcaaggcgattctggaggcggccggacagaagacgggtctcatcggaacgaacggcgctgtgatcggtgagaatcattatccgaccaaaaatacgacgccggaatcttatattttgcaagaatattttgcaaaaatggtggaagagggctgccgttacgtcgtgatggaggtttcttcccaaagctacctgatgcaccgggtagacggacttttctttgattatggaattttcctgaatatttccaatgatcatattggcccgaatgaacatgcaagttttgaagaatatctttactacaaaaagcagcttttgaaaaactgccggacagcgctcgtcaaccgcgatgatccgcactttgatgcgatcgtagaaggggcgacagcagagatcctgaccttttcattggaacaggcggctgattttacagcggatgacattcactatgtacgcgaacatgatttcgtgggtgtcgaatttcagacgcatggacgatatgagagcgatctgcgtgtcggcattccgggcaaatttaacgtggataatgcgctggcggcagcgggcgtgtgcagcttctttgacctgccgaaggagaaagtctgccatgcgctggaacatatccaggtcgatggacggatggagattgtatataaatcagcaaagtgcaccgtgatcgttgactacgcccacaatgcggttagcatggaaagtcttcttctgacgctgcgcgactacaagccgaagcgtctcgtctgtgtcttcggatgcggcggcaaccgggcgcgcgatcgtcggtactcgatgggagagattggcggaaagctggcagatctgtcgatcatcacggcggataattcccgctttgagaaagtgggagatattctggcagatatcaaggtcggacttgcaaaaaccgacggcaaatacgttgaaatcccggatcgccgcgaagcgattgagtacagcttgtcgcatgcggaagatggcgatatcatcgcgatcatcggaaaagggcatgaggattatcaggagatcgagggcgtgcgctatcatttccttgaccgggaagtagtgcaggagacggtgaagaagctgcatatgtaatcaatttggaggcaaaatatggaccatattacagtcagacatatcgtggaagcagtgtcgggaacactgctctgcggagatgcagatacagagttaaaacacatcagcattgattcccggagtatgcgcggggcggatctgtttgttccgctgatcggggagaaatcagacgcgcatcgtttcctggttcaggcgatggacaatggggcggcagccgcactaacttcggagcatgaggcggcaccggagggctttcacggcgcgctgatccaggtgaaagatacgaaactggcattgcagacgatcggacgctgcctgcgggcacgcctttctatcccgttagttggtatcaccggcagcgtgggaaagacgacgacgcgcgaaatggtggcggcggcgctttcagcgaaatataagacattcaagacaccggcaaaccacaacagccagatcggtgtgccgctcacgatctcggagatttctgagaatgatgagatcggcgtgctggaactgggaatgagtgagccgggcgagatggcggtgatcgcggagattgcggcggtggattcggcagtcatgacgaatatcggtgtgacgcatattgagaatctgggctctcgcgagaatatcttaaaagaaaagctgcatatccaggacggtatgaaggcaggcggaatcctgtttgtaaatggagataatgatatgctttccaccgtgcatgcaaaagcaggctgccataccgtccgttatggacttggagcagataacgactaccgcgccgaggatctttcatatccggatggatttccgtcctttacgatggtacacggcgaggtgcgcgtcccggtgaagctgactgttatgggcgagcacaatgtcatgaatgcgctggctgccctggcggttgcggatgcctacggtgtgccgcttgccgatgcagcggaaaagctgcttgaatttggcgggttcaagaaccgtcagcagatttatcataaaaatggttatacgatcgtggacgatacctacaatgcaagcccggattcgatgaaagcggcgataggtgtgctttcttccctgccggcaggacgcagaattgcggttctggcagatatgaaggaactgggagagaatacgattcagttccaccgtgaagttggtgcgtttctggcggaaaaaccggtcgatatcctggttgtatatggcgaactggcgcaggcgatcgccgagggagcaaagaaagtcaaaccggatctgcatgtcgtttcgtttgaagaggacgaaaaagaagatatgcttgactggctggatgcacagatcggtgagggagatgcagtcctgtttaagggttccaacagtatgaagctgggggagacggcagcgaggtttatctcagtcgagaagactcccacctcttcaggtggtaagtaatagcaagtttgtctcagtaggagtccattctccgactgagataaacgctccgcgaggatgcgcagtgattctgtaaagaatatgtcagcttcgctgaccagaatcacgcgccaaatctcacggacgttcgacttgaattagaaatagaaagagaaggaatcatggcgtatcaatacgcggatattattatagatatatcccatgagaaggtggatcgcccgtttcagtaccggattccggcgcagctggcggaggagattacggcgggaacgtgcgtgacggtaccgtttggaaagggtaattcacttcggactggatatgtggtgggaatgggaaatacggcggagtatgacccatcccgcatcaaggagatagctgggatcgcaccgggcagtatgtcggtgcaatctcagcttatccgtctggcgtggtggatgcgggaacgttatggcgcgacgatgaaccagacgctcaaaaccgtacttcccgtcaaggaaaagataaaaccgcgcgagaaaaagacgctgcattgtcttttaaaccaggaagagctggaagcggcaatcctggcggcacagaagcggcattataaggcgcgggtgcggctccttgaggcattccgggacaatctggatattccgatggaatttgcccgacgggagcttgacctgaccctggcgacgatccgcccgatggaggaacagggacagctttcagtgaaagtttcccgtgaggaacgcgggttaaaccatgcaaaactgccgcgtccagccggacagaccgtgcatctcaatgaagagcagcaggcggcggttgaccgtttctgtgaggattatgagacggggaaacgtgaaacgtatctgattcacggcgttacgggaagtggaaagaccgaagtctacatggagctgatggcgcgtgtcctgcgggatggaaagcaggtgattctgctgatcccggaaatttcgctgacatatcagacggtgatgcggttttaccggcgatttggcgatcagatcgcgattctgaattcccgtctctctgcgggagaacgctatgatcagtgggaacgggcggcgcggggcgaggtttccgtgatgatcggaccgcggtcggcgctgtttgccccattttccaatctgggactgattctgatcgacgaggaacatgagggcgcctataagagcgagacgatgccgcgctatcatgcaagggaagtagcggcggagcgcgcccggctttccggggcttcgctggtcttgggctcagcgactccttctctggaatcgtatctgcgggcgcagaatggcgaatatgtgcttctgcccctgcatcaccgggcagtggcgggaagtatcctgccgaaggtacagatcgctgatatgcgtgcggagatgcaggtaggcaataaatcggtgttcagccggacgttggatgcaatgttgacagagagactcgcacgtggcgagcaggcgatgctttttatgaaccggcgcggctattccaattttgtttcctgtcgttcctgcggaaaggcggtgacctgtccgcattgtgatgtttccctgacactacacgggaagaaccgtctggtctgtcattactgcggctatacgattccactgatgaagcagtgtccgtcctgcggatcaccgtatattgccgggtttggggccggaacgcagaagatggaagaatttacgaaaattcggtttccggatgcgaggatcctgcggatggatgcggatacaacggcaaaaaaaggcggacatgaagcgattctggaggcatttgcaaatcgtgaggcagatatcctgatcggcacgcagatgattgtaaaagggcatgattttccgggagtgacgctggtcggaatcctggcggcggatctttccttaaatacgccggattaccgcagcgcggagcggacgttccagcttctgacgcaggcggctggcagagcgggacgcgccgggaagcccggcgatgtggtcatccagacgtaccggccggaacactatgccgtgcaggcggcagcggcgcagaattatgagctgttttacagccatgagatcaattaccggaggctgcttcattatcccccggtctgccagatggctgcggtttattttgcctgcggcgatgaggcggtgctggatgaatgtgcggaaatggcggcgcggcggctgcgcgaaagtgccgagtgtatcggtccggttccggcaccggtatacaaagttaatgacatctacagaaaaattttatatataaagtgtgaaaaatgtgctatactggatcaaatcaggggtcagattgaaaccctggctgccgcagatacaaaatggcaggcggtccagattcaatacgatatatcatagagaggaagggtgtataaaatggcaatccggtcaattagaactattggcgatgaggtactgaaaaaagagtgtaaggcagtgacggaggtaaccgatcacacacttgaactgatagaggatatgtttgacacgatgtattcagccggcggcgtaggtctggcagcaccgcaggtcggtatccgcaaacagatcgtagtaatcgacgtggaggacggcaaccagtatgtcctgatcaatccggtcatcgaggaaatgtccggcagccagactggtcaggaaggctgcttaagcgttccgggcaaggctggtctggtaacccgtccgagccatgtaaaggtacgcgcgctgaacgaaaaaatggaagagtttgtcctggaagcagatgatttcctggcacgtgcgatttgccatgagtgcgatcatctgcacggacatctgtatgtggagttggtagaaggtccgttagaggatgtagcggcagaggaagaataaagcacattggcagaatgagagagaaacaagagtggggtgacaggcagatatgaagatcgtatttatgggaacaccggattttgcggttccgacactggaagcgctctatcagagccggcatgaagtagcggcggtggtgacacagccagataagccgaagggacgcggcaaggcgatggcaatgccgcctgtcaaggaaaaagcgctggaatatggaatcccggtgtatcagccggtgcgcgtccgcaaggatgaggcattttttgaggaattgacgaggattcagccggacgtgatcgtcgtgattgcatttggccagattctgccggagcggattctgaacctgccgaaatacggctgtatcaacatccatgcgtcgcttctgccaaaataccgtggggcagccccgatccagtgggcggtcatcaatggcgatgaggtcagcggtgtgacgacgatgcagatggatgtcggtctggacaccggagatatcctggataccgtggaagtacgcctggatccgaaagagacaggcggcagcctgtttgaccgcttgagccttgcgggaggaaagctgattctctccacacttgagaaagcggaggcaggaatcctgcatccggttaaacaagatgaggcagaggcaacccatgtgacaatgctcgataagtcgatggggcagatcgactggtcgatggatgcggcagtgattgagcgcctgatccgcggcttaaatccatggccgagcgcttatacaaaatttgaaggaaaaaccctgaaaatctggtcggcggatgtcgaggaagatgcggcgggaagaccgtcaccggagacattcggacaggtggtacgtgtcggtaaagatgcattctctgtccagaccggcaaagggcttctcacgatccgggaacttcagctggaaggcaagaagcggatggatacggcggcatttttacgcggatatccggtggaaacgggagtaaagctcggataaaatgaatgcttcagcaggaactgaactgctacaggcagccaggcgtttgaaaggagttggagtgatatgtacggatatggatattacagtatgtttgatccgacgatgattctggtattaattggtatatttctgtcattaggggcatctgcgaaggtaaaaagcacctacgcgcggttttcaagagtccggagcatgactggcatgacgggagccgaggcggcgagacagcttttaaattcacagggcatctatgatgtccagatccgccaggtggcaggcagtctgaccgaccactatgatccgcggaccaagaccgtgaatttatctgagagtgtatatggttctacttcggtcgcggcgatcggtgttgcggcgcatgagtgcggacatgcgatgcaggatgcatctgagtatgttccgctgcgcctgcgcggttcaatggtgccggtggtcaacatcggcgcacagctttcctggcctatgatcctgattggtgtcctgatcggcggcatgggatctccgatcgtttcacttggaattcttttattttccttgtcggtgctgttccagctggtgacgcttccggttgagttcaatgcatccgcgcgtgcggtacgtctgcttgattcaacagggattcttcgcggggaagaagttggatataccaaacaggtgcttggtgcggcggcactgacgtatgtggcagcggcggctggttcgattttacagcttctgcgtctgattatattatttggaggacgacgcgatgactgatggaactgcgctgcgtgaaatagcggcagaaattttgactgagattctggaaaagggacagtatacacatctggccctttttcaggctctttctaaatatcagtatctggagaaatcagaccgctcgtttttaaaacggattgtggacgggacggtggagtataaaatccagattgattatattatcaacgcatattccaaaacaaaagttcataagatgaaaccgtttatccgcacacttctgcggatgagcgtgtaccagatttattatatggaccgtgtaccggattcggcggcgtgcaatgaggcggtgcgccttgcgaaaaaacgcggattttccggactttccggctttgtaaatggtgtgttgcgttctgtggtgcgtggaaaaggcaaactgaccttcccggatgattcagtgcggtattcaatgccggactggattttatctctctgggaggaaaactatggggcagagacgacgcacaggatggcacaggctggtctggagaaacgtccgtttatggtgcggtttgccgagagccgtgcagggaaagaagagattcttgcctccctgtccgcccagggcgtgacggcagaggagacagcgacgggaagcggcgtttaccgtctgacgggagtggactatccagagagtctggatgcgttccgcgaaggactaatccggattcaggacctgagttcgtcgctggcaggtgatgcggcgggtattaaagagggtgattttgtactcgatgtctgtggggcaccgggtggaaaagggcttcatgcggcggatctgctgtacggaactggacaggttgagatccgggatgtgagtgattacaaggtatctttgatcaaggagaatattgcctgcagcggctgtacaaacgtctctgcctgcgcctggaatgcgtgtgaattcgatgcttcgatggagcagaaagcggatgtggtcattgccgatctgccgtgttcaggacttggcattatcggacgcaagccggatatcaaatacaacgcttcaatggacggaatccgggacctggctgcattgcagcggcagatgctgtcggtggtctggcagtacgtgaagccgggtggagtgctggtttacagcacctgcacggtcaaccgtctggaaaatgatgaaaaccgggcatggtttttaaacgaatatccatttgagccggttgatatcagtggtcgtctggggattgattttcaggaagacagcctgaaagagggatacatccagctctatccgggcgttcatccgtgtgatggatttttcatctctgtgatgaaaagaaaaggataactggacggaacagcgtatgaatacaggaaagactccgagagtgcatataggagagagggaggcagtccgatatggaaaagcaggatataaaatcaatgacgcaggaggaactgcgtgcctttttggtgagtctgggtgaaaaaccattccggaccgcccagatctatcagtggatgcatgaaaaactggcatcttcctttgacgatatgacaaacctttccaaggtactccggcagaagctgcaggacgcgtgcgagtatgtatcgctggaaaaggtacgggtgcagatttcgcagatcgatggaacccgcaagtacctgttccgcctcgcggacggcaatgtcatcgagagtgtcctgatgcgttataagcatggaaattccgtttgtatttcctcgcaggtggggtgtcggatgggctgccgtttctgtgcttcgaccctggacggcctggaacggaacctgcgcccgtcggagatgctggaccagatttatcagattcagcgcgatacaggcgaacgcgtttccaacgtggttgtgatgggatcgggtgaaccgctggacaattacgataacctgatccgctttatccatcttttgacggaggaaggcggactgcatatcagtcagcggaatgtgacggtttccacctgtgggctggttccgaagatccgggagctggcagatcagggactgaccatcacgctggcactttctctgcatgcgccgaatgacgaggtgcggaagagcctgatgccgatcgcgcgtacatatgcgttaaaggatgtattggcggcctgtcattactattttgaaaaaacgggacgccgcatgacgtttgagtacagcctggtgcagggagtcaacgacaatctggacgaggcgcgcgagctggcggcgctgattcaggatcagcacgggcatgtgaatctgattccggtcaatccgatcaaggagcgctcttatgtacagtcgggacggaaagcgatcgaagcatttaagggatgtctggaatccaagggaatcaatgtgacaatccggcgcgagatggggcgcgacatagacggtgcctgcggacagctccggaagagctatatggataaagagcaggagaaagaaggtgcggcagtcaaatgaaagcatacgcactgacggatatcggaaaaacgcgtaaggtcaatcaggatgctcagtttgccagcacggagccggtgggagaactttccaacctgtttgttgtggcggacggaatgggcggtcatcaggcgggagattttgcttcgcgctatctgatcgagcatatgccggaatatatcaaagagagtggtgagaatgagccggtcgcggcgcttcgaaaggggatcgaggcagtcaatcaggaactttataccctttcctgtgagcgcgaggagcttgccggcatgggaacaacgctggtagcggcttcaattcagggaaatacactctatgtggcaaacgtgggggacagccgtctctaccggattgagcgctccggcattcatcagattacccgggatcattcctacgtggaggcgatggtctcgctgggacagatgagccgcggcagccgggaatatgagacgaagaaaaatatcattacccgcgcagtcgggatcggtgggcatgtggagccggatttctttgaggtttcactgaacccgggcgattacgtactgctgtgttcggacgggttaaccaatatggtggataattcagcaatttaccggatggtgcttctgccgggaaccctggacaccaaggcaagggcgctcacggcgctcgcaaaccagaacggcgggaaagataatatcgcggtcatattgattgacccgcagatcaaggaggtgagagaatcatgatgctgaaaccgggaacctatctgcaggatcgctatgagatcctctcactgattggtacgggcggcatgtcagaggtgtatcaggcaaaatgccacactctgaaccgtctggtggcgatcaaggttttaaaggatgagtacagccaggatgcgaatttcgtcagcaaattcaagatggaggcgcaggcggcggcagggctttcccatccaaatattgtgagtgtttatgacgttgtggatgagggcagtcttcattatatcgtcatggaactcatcgagggaatcacgctgaaaagctacattctcaagaaaggtcatctgggcgttaaagaaacgattggaattgccatccaggtagcgcaggggctggcagcggcacatgaccagcatattgtgcaccgggacatcaaaccgcagaatatgattatctcgcgtgacggcaaggtgaaggtggcggatttcggtattgccagagctgtatcgtcccagacgatcggggtcaatgcggtcggttccgtgcattatatctcgccggagcaggcaaaaggaaattatagcgacggacgaagcgatctgtattcactgggaatcacgatgtatgagatgctaacaggaaaacttccgtttgacggggataacccggtttcagtggcactggcgcatttggaagaaccggtgcagccgccgagccgcatcaacccggaggtgtcggcaagcctggaccgcattattttaaaatgtacccaaaaaaagccggaacgccgttaccagaatgcgtatgagctgatcgcggatctgcgccatgcgctggtggatccaaacgatgatttcctgaaaaaagaaccggaatttgatgaaaattccccgacagtcgtgcgcggggcagaggaactgaaccgccagatggaggcacagagaaatcgaaatctggaacagacgatggaacatccggcagtgagtgaaaagaccggaccggttccgacagaaaatgaacgtggtgaggtagtctggaaagagccggaaccgtcggagaacgagatagaaggttggcaggaagaagagacggatgtctatgaggaagaaacctcaaggcgcccagaccgtagacggaagggacgccgtatagaagaagacagcgaggatgtcaatccgcagatggagcgcctgcttacgatgattggaatcggtgcagccgtattgattgtggtggttgtgattgtcattgctgcgaagttgacaggcatctttaatctgggatctggtagtcagaagcatccgaagacgaccgttgaagcttcttcggaggcgtctgagagcgagagtctggaatcaacggagtgcagggttccgcctctggacggcatgacggaggatgaggcgaagacagcattggaaaagcagtcgttgaaaatccgttatgaatatgaaaagtcggaaacctctgaaaaggggaaggtcatcggtcagagtattgccagcggcacggttgtctcgaaacagacggaagttatcgtcacgatcggagaaggcaatgaggcaatagatttgacgaaacttggactggaagagatgtccagcgaggatgcagagacgcttctggcagaagaaaataaactgaccgtagtagtgcagaaagagagcagcgatacggttgcctccggtatagtgatccgatacagtccgtccagcgtggatccaggcggtacggtgacgctgtatgtcagcacaggtccgaacgtaccgacggtaccgatgccgaggattacagggctttcagaggaaaatgcaaaagttgttctggaagcggtcggattagggcttggcgagcgcaaggaagcgaagagttcagaagtggcaaagggcaagatcatcagtcaggatgtcctggagaaaacagatacaccggagggaagtgccattggctatacagtcagtctgggaaaaggaacccgctatgtggcggcgatcaacgatgaattccagatgagtgaactgtttggaccaagttccggagatacgcatatccgcgtcagtattgtgatgaagcagacgattgccggcaatactgtgactaagacggtcatggaaccgagggagatcggcggcgatatcacgcttccgattcattataatatcgagggagcggacggtgtgcagacaggtgagctgcagatcctcgatctgacgaacgatcgggttctaaaaacgtatcagcttgaatttgtggaagtttcagataattaataagaggtagttgtaaggtacagatatgcagggaaagataattaaagggatcggcggtttctattatgtacacgacggtattggaaaggtatatgaatgccgtgcaaagggaattttccgaaatcgcggcatcaagccgctggtaggcgatgacgtggagatcagtgttctcgatgaggagaaggcgacaggcaatctcgatgagatccttcctcgtaaaaaccgtctgatccgcccggcggtttcaaatgttgatcaggcggtggtggtttttgccatcaccgatccgatgccaaatttaaaccttctcgaccgcttcctcgtcatgatggaacggcaggaagttccggtcagcatctgtttcaacaagatcgatctggttgatgcagccgagcaggagaagctgcgtgcgatctatgaaccggcgggctatccggtgcattttatcagcacctacgaaaaatcagggctggaggagtttcatcggttgatcattgggaaaacaacggtcttagcaggaccttcgggtgtcggaaaatcgtcgatcacgaactttatccagccggaggcacagatggaaacgggcggtatcagtgagaagatccgccggggcaaacatacgacgcgccattcagaactgtttttcgtggaagagagcacctatatgatggatacgccgggattcagttctctctatatcgaggatttggagccggaggcgctcaaggactttttcccggaatttgaggcatatgaggatgaatgccgtttcttaggctgtgtccacattggcgagcgcgaatgcggcgtcaagacggcggtgcaggagcataagatcgggcagagccggtatgacaattaccgtttgatgtatcaggaattaaaagagaaaaagaaatacggcagaagcagccgttgaggatattatacaaaaaatgggaggaaagaaccatgattatattatcaccttcgattctgggggcagattttacgaagctgggagagcaggtcgctgaggtggacaaggcaggtgcacagtacatccatctggatgtgatggatggcgcgtttgtgccgagtatctcctttggaatgccggtaattaagagcctgcgcccggtgacggatcgtgtgtttgacgtacacatgatggtggaagaaccgggacgttacgtagaggatatcaaaaaagcgggggcggatctgatctgtgtgcatcaggaagcctgtcttcatctggaccgcacgatcgcgcagatccgtgaggcagggctgcaaacaggtgtagcgttaaatccggcgaccccggtcgagacactggatgttattttgccggaggtggacatggttcttctgatgacggtcaacccgggatttggcggtcagaaatttattccatatacggtagaaaaaatcaagaagctgcgcgcaatgtgcagcgagaggggactttccacccgcattgaggtggacggaggaatcacgccggacaatgtgcggacggtattagaggcaggagccgatgtgatcgtggcgggaagcgccgtatttaagggaaacccggctgggaatgtaaaaacatttttaaatatttttcaggaatttgaacagggatgatgaagatgaagcgttgtttgattgtgacaggcggaacgattgatattgcgtttgcgaaagattttctctcacagcgctcgtatgactatgtaattgcggcagatgcggggctggaggttctgcgcccgctgcatatttctccgaatgcggtggtcggcgatctggacacggtggataaaaaggttctggaagaatatcagaaccagccggacatcgaatttgagatccataaaccggagaaggatgagacggatacggagctggcgcttttgacggcggcgcgccagggctgtgaggcagttgatatcctgggggcgctgggcggccgtatggatcacgccatcggcaatatccagctgatgtatcagtttttctgccagggaatggaagtgaatatttatgatgcccgcaaccgcctgtatcttctgggcgggcataaggtatttcaccgggaaaaggtgtatggaaaatacatttcgttcctgccgatgaccgagactgtcgagggactgacgctgcggggatttaaatacccgctccagcggcggacgatcgggctggggacgagtctctgcatcagcaatgaactcaaacgggaagagggcattctggagctggagagaggcgtccttttgtgcgtggaggcacatgattaatcaggataaaaaagtggcaagttataactgacctgcttaaaatgataaaaactgtatgtttttcaggggacaagattgtgctatgatgagtccaataacaagggaggatgaaacatcatggcaaacaaatcaaatcaggcttacaagatcgcgatggtcggtctgctggcagctctctcctatgtcgtatttacatacggacaggtgaagatcacacttccgggcggcgatgcaacttccattcatctgggaaatgcagtctgtgtcatcggggcactcttagtcggcggcttttacggcggtttgggaggtgctatcggcatgacgataggtgaccttctcgatccggtttatattgtatatgcaccgaagacatttatctgcaaactttgcatcggactgatcgccggattcgtagcacatcgtctgggcaagattgaccggagcaccgataagaaccacatccttggttttacgattgcagcagcggtggcaggtcttttattcaacgtcattgcagatccgctgatcggatattattataaactctggatcattggtaaaccggcggcagagctcacacttgcatggaatatcgcagcgacttcgatcaatgcggtgacatctacgattgcgtctgttgttatatatatggcagttcgtccggcactccgcaaggcaggttttctggatgcattgtctgtagaagcgagagcataaggcaatttatctcagtcgagaagaattaaaatgaaatacatacaggagactgtggttgggcagaatgggaaaaacatctgtccgggcgcagtctccttgttgcgtcattggagtgtgcggcttataaaacacaaatgcatagatacacgcttgtaggaaccagaatcatgccgcaggcagtcgtatctgctgcgagaatatgttagattataaggttgcttaaaattgatgttggggtcaaaagacgttttgacccctctgataccagattgctccgcactatatgctcccgcaatcttcaaaaacattcgtaattcgctcatttttcttggaaaaatggctacttactcatgtttttggcgggtcccaaggtcaaaaattctcctgcaggcaagcttgcgtcgaacttctgaccttttgaccctggtatcttaaaattaagaaaatgaggaaaaattatacatggaaggaattcagaagaaaatagcggttttaaatgacctgtcaggctacgggcgctgttcgctgacggcggcgatgccggttatcagcgccctcaaggtacagtgctgtccggtggtgacggcggtgctgtccaatcacgcgggatatccggaatgctatatggatgattataccgatcggatggaggcatacctggagccgtggcggaagatgggatttgagatggacggaatcatgactggattcttaggttctgccagacaggcgtcgatcgtggcagattttatccgggatttcaaacgggaaaatacgcaggttttggtagatccgacgatgggagaccacggacatctctacagcgtctgtgacgaggatctgatcgaggcgatgcgggagctgatgcagtatgcggacgttgtcacgccaaatctgacggaagcctgtgccctgacggacacgctgtatcaggaaaatggatggagtaagcgcaagctctcagatctgacctggaagcttcaccttttgggcgcgcggtcagtcattttgacaggcgtggtcaagggcaaacagatcctcaacgtgatccatgagcgcggcaaggagccggtctttcatgcaactaaatttgtggcgggcaattaccacggaaccggggatgtctttgcagcagtcatcggtgccagcatggtgcgaggtgtgccgatggaggaagccgtcagacgggcggcagcttttacaaaaaaatgtgtggaaaagacagaagaacttggtgccccggagcaggacggactgtgcctggaggagtgtctgtcctatttgacgaaattgagttaaatataatggggcagtctatcctgttttgtatcaagaagaacagaggttacagttcacgggtaggcacttttggaaccgaaagtgccgtaagaaaacgtggtggcagcaggaatttgccgtatttaaatgcgaagccacggcaaattccgttactgttcacgtatgcgtgaacagtaacgaacagaggaactcttgaaacagggcttttcattcgtacaaagttgtagtataattataactagttttcgtgcagttaattgcataacagtaggaggaagatatgttagatcttaaattcgtcagagaaaatcctgacattgtaaagcagaatattaaaaataagttccaggacaagaaaattccgctggtagatgaggtaattgagctggatgccaagaaccgtgcagcgaagaaggaagcagacgatctgcgtgcgaacaagaacaagattgcaaaacagatcggcgctctgatgggtcagggaaagaaagaggaagcagaagagctgaagaaacaggtagcagagcagtctgcccgcctgtctgagctggaagagcaggagaaggatcttggcgagcgcatcttaaagattatgatgaccatcccgaacatcattgatccgagtgttccgatcggtaaagacgacagcgagaacgtagagatcgagcgcttcggcgagccggttgtaccggatttcgagatcccgtaccacaccgagattatggagaaattcaacggcatcgatctggacagtgccagaaaggtagctggaaatggtttctattacctgatgggcgatatcgcaagacttcattctgctgttatcgcatatgcaagagatttcatgattgaccgtggatttacctactgtatcccgccgttcatgatccgcagcaatgttgtaaccggcgttatgagtttcgatgagatggatgcgatgatgtacaagatcgagggcgaggatctttacctgatcggtaccagcgagcactctatgatcggtaaattcattgataccgtagttccggaggaagagcttccgaaaacactgaccagctattctccgtgtttccgtaaagagaagggcgctcacggcatcgaggagagaggcgtataccgcatccaccagtttgagaaacaggaaatgatcgtagtctgcaaaccggaagacagcaagatgtggtatgacaaactgtggaagaacaccgtggacctgttccgttccatggatattccggttcgtactctggagtgctgctccggagacctggctgatctgaaagtaaaatccgttgatgtagaggcatggtccccgcgtcagaagaaatatttcgaggttggaagctgctccaacttaggtgatgcacaggcaagacgtctgaagatccgtgtcaacggcaaagacggcaaatactttgcacacaccttgaacaacactgtagtagctccgccgcgtatgctgatcgcattcttagagaacaacctgcaggcagacggttctgtccgcattccggaggttctgcgtccgtatatgggtggtaagagcgagattcgctaagttcatttgagtccagtaaaaaaacgccatgggttgtgtgcctgtggcgttttttactggactcattgtgaattgcggaaatatagacattgtcttttttcaggcggcattatgatggcagttcttccagctgattcgacggcgtcgccatcatcgaataattcgtatgataaatcacaaatcccggagcagcgcccgctacttttttgacctgctttttctgtacataatcgatctcaactttttcattttcccgtcccttggaatagtaggcagccagcccggcagcttcctcgaaggtgcggtccggaagctcttttccttcggatttcacaatgacatgggaacccgggattccttttgcgtggaaccaccagtcatttccagtcgcgatcttgaaggtcagctcctcattctggtagttgtttttgccgacgtagatatggaatccgtcggaggaaaggtagtggaatgggcggcttgtgattttcactttctttccagccggaccgtgctttttgatgaagccatattccgtcagctcctgcttgatctgggtcagatcttcctcctttaaggcaatatcgagggaggtactgatggattcgaggtgctcgatctcctgcttcgtctcctcaatgagctggctctgagcctcgaaagtacgtttgagttttccatatttgtcaaaatacttctgcgaattttcgcgggcggtcagctgcgggtcaagcgggatcttgacctcttttcctgtgtagtagttcgtgcagacaagttctttttcgccgccggtcagctcataaccgtaggtgtttaacagctcgccgtagagcttgtatttatcccgtttttcggtgtcctttaactgtttctgctgcaaatcgtattttttataattgcgctccagggcagtctggacgatccggcgcagatccgaggatttctggcggattcgtgtgatgacgttcttggacgcatagtaggtctccagcactttactgatcgaatcaaagtgttcgacctgatattccggcgggaacgaggccaatgggagagcggcaaattccattggctcatcttcacggtatacgatgcagggcgagaactgtccatttttgatggattccattgccagttccagcgtgtgcccgaggtgcgtgcgctccagctcattcagttccgatgcggggcggtcggcatcgatcgatgcctcatagcagaattcttctgccatgaccgggctgataccggtgaaattcgtgtaaatggcttttcctgccggtgccggtgactgtgccagaatggaggcgaaatcatcggcagatgcagtcagcggatcctgcttcgcgaccgtctgcgggaggaaatattgccgtcccggcagaacctcgcgcacggagctgacctgcacggagatatgtttgatactgtcgaggatcgtgccgtcagggctgcagaaaatgatattgctgtattttcccatcagttcgacgataagcagcttgcggcagaggtcacccatctcgtccagatgttcgatctcaaaatgaatacagcgttccagacccggctggctgatggacacgatgcgtccgcttccgatgtgcttgcgaagcagcatgcagaaattcggggcagtcatcggtccctgcttgttggtatccgtcagatatgccagcgggagacttgcgttgaccgagagaagaagtcgtttcgtctcccggaagttctttatggtaaaaagaagttcatcgcgctcggtctgcgtgatctttgcgatcttgccgccggtaagcgcgtcactaaactccttaaccaggtttgcgattacaattccgtcaaatgccatggttttggtgctcctttatttgtgtagtatctactattataatgaaagaagacacgaaaaacaatcacttttaaattcggttgacgcttgcggcgatttgcattataataccattatctatggatgaaagagagaggcgtcactatgcttaaaagtatgactggatttggccgatgcgagatggcaacggatgaatataagatttctgtggagatgaaggcggtaaaccaccgttacttggatctcagcattaagatgccgaagaaatttaattactttgaggcggcgattcgcgcgcagctcaagaaatacattcagcggggaaaggtagatgtctttatttcctatgaagattatacggatgagaagatgtccttaaagtacaatcgttccctggccggcgagtatatggattatttccgtcagatggcggacgagcttgggattccgaatgacgcgacggtgatgcgtcttgcacggtgtccggaggtctttacgatggaacaggtgccggaggacgaggagcatatgtggcagattctcgaaaaggcgatcggcgaggcggcagagaaatttgtcgagacacgcacacgcgagggtgagaatctgaagcaggatctgcttggcaagctggactatatggtaacgctggtcgatcagattgaagaacgttccccgaagatcgtggaagaataccgggcgaaactggaagataaggtgaaagagcttctggaaggaagcagcgtcgatgaaggccggattgcggcagaggttgtgatttttgcagataagatctgcaccgatgaggagacggtccgcctgagaagccacattgaggcgacccgcaaggagctgacggcgggcggaagcgtcggacgtaagctggatttcattgcacaggagatgaaccgcgaggcgaatacgattctttccaaggcaaacgatctggaggtttccgattgtgcgattgcactcaagacagagatcgagaaagtcagagagcagattcagaatattgaatagccgatcatgctggaagaggtattcacggaaagctgccgttggcggtgaaaatacggagaatatgaaatattgtaataatagatagaatttagaaagcaggcgaaatatatggataatcagggagtactggcagttatatccggattttcaggggcaggcaagggaacattgatgcgtgcattgctggagcggtatgacaattatgccctttccatctccgcgaccacccgcgcaccgcgcgagggcgaggttgatggaagagagtatttctttaagacccgggaagagttcgaacagatgatcgaacacgatgagctggtcgaatacgcccagtatgtcggaaactattacggcacaccgaaggagtatgtgttttccaacctgaaagcgggcaaggatgttcttttggagattgagattcagggtgccctgaaaatcaagaagaaattcccggaggcagttctcatttttgtcacgccgccgagtgccggggagcttagaaaccggctggcaggtcgtggaaccgagacaccggagaagattgccgcacggctttcgagagcagcagaggagtccaagcagatggatgactacgatttcattctggtgaatgatgaggtagaccgctgtgtagaagaaatgcacgcactgattcaggcgatgcatgccagaacagaaaatcacaagactttgattgaaaaaataaaagaagagatgaagcaattctgaaaggagaaagatgtattatgatgctgcgtccgtcatatcttgacttaattaatgttgtaaacaaagaggctgagccggggaaagaaccgctgattcagagccgttactccatcgtaattgcgactgcaaagcgtgcaagacagctgatcgccggtgatgaggcactggtcattgagaatggaagaaaaccgctttcgatcgcgatcgacgagctgtaccattctaaggttaaaattgtagcagagaacgattccccggaggaagaggtctaaaaggcgacagaagaccgtcccgtgttcattatgtacatggagatggtcttttcttagatatagagtaactgttcagtaggtctgcgcatttactgcgctgaccgtacgaaaacatgggccagcaggaaaaaatcccattgccgtaggcaatttttaatggatttttgcgcgtgactgtgaagatactgaacagttacgatatagaatttttgtgacggttcaaatcgattatggttacagaaattttttaaatatggtattaggagagaattgaatgaaattactttgtatatcccttggctgcgataaaaacctggttgatgcagagcgtatgctgggttcgctgagccaggacgggtacacgtttaccgatgacgagcaggaggcagatgtcattctggtcaatacctgctgctttatcaacgatgccaaggaggagagtgtcaacaccatcttagagatggcagagtacaaaaagagcggaacctgcaaggcgctcttagtcagcggctgtatggcacagcgttacaaggaagagatcctgcaggaggtgccggaggtggacggtattctcggtacgaccagctatgatgaggtcagcaaggtgctggcggaggcgctgaagggcgagcgggtatctgatttccacgatttgtccgaacttccggagacgaagatgcggagcaaacgtctggtgacgaccggcggacattatgcttttttaaagatttccgagggctgtaacaaacggtgtacctattgtattatcccgtccctgcgtggaccgtaccgcagtgtgccgatggagcagcttctcgcagaggcaaaggagcttgcggatcagggtgtgaaggaactgattcttgtcgcacaggagacgacgctttacggcgtggatttgtatggagagaagaccctgccgaaacttttacatgaactggcacagatcgatggaatcgaatggatccgtatccagtactgttatccggaggagatcaccgaggagttgattcaggcgatcaaggcggaggaaaaagtctgtcattacctggatattccgatccagcacgcgagcgatgccgttctcaagcggatgggacgccgtacgaatcaggcggagcttcgggagcggatcgcgcatctgcgggaagagatcccagatattgcactccgcacgaccttaatttccggtttcccgggtgagacacaggaggatcatgaggaactgatgcggttcgtcgatgagatggaatttgaccgcctgggcgtgtttgcatactctgcggaagaggacacaccggcagccggatatccggatcaggtaccgcaggaggtcaaggaagaccgccgcgacgagatcatggagctgcagcaggagattgcctttgagaaagccgagaatatgaaagaccgtgtgcttgaggttatgatcgagggaaaagtggcagacgagaatgctttcgtgggacgtacctataaggacgcgccgaacgtagatggtttgatttttgtcaatgcggatgttccgctgatgtccggcgatttctgccgtgtccgcgtaacgggagcactcgaatatgatttgataggagagttggctgatgaatttaccgaataagcttacgacgcttcgcgtcatcatgattccgttttttgtgttttttcttctctggcagaatggtgaaaaccgtaccttccgtatgattgcactggcactgtttatcatagccagcctgaccgatcttctggatggaaagattgccagaaagtacaatctggttacgaactttggaaaatttatggatccgctcgcggacaagctcttagtgtgctcggcgctcatctgtctgatcgagctgaacgcgcttccagcctggatggttatcgtcatcatcagccgggagtttatcatcagcggattccgtctgatcgcctcggacaacggagttgtcatcgccgccagctattggggcaaatttaagacgacgtttcagatggtatcggtggtgttattgattctggatattccggcgcttgcgtttgtcacgacgatctgtgtctggatcgcgctgctgctgacgattgtgtcacttgttgattatatttacaagaatcataaaatactgacagaagggagtatctgatatgatagtcgaactgatctcggtaggaacagagctgctgcttggcaatatcgtcaataccaatgcgcagtatttatcggaaacgtgtgcaaagctggggcttaacgtctattaccagacgacggtaggggacaaccgggagcgcatgacagaagtcttccggacggcgctctcaagagccgatctcgttatcatcggcggcggtctgggaccgacggaggatgatatcacgaaggatgtctgcgcggagctgatgggaatgccgttagtcgaggatccggaggtgcgggcacatctggaggactggtaccggcagcgcaagcgcaccgatattccggatagcaactggcgtcaggcgctggtgccggagggcgcggtggtattttccaacacaaacggcacagctccaggacttgccctggagaaaaacggtaagaccgcgattcttcttccgggaccgccgaacgaactgtatccgatggtggaagatcaggtttgtgcttatattcagaaacgatctgactgtgtgatctattcccagatgctcaaaatctgcggatacggggagagcaaggtggaggagatgcttctcgacctcatcgaccagcagacgaacccgacgattgcgacctatgcaaagacgaaagaagtacatttgcgcgtgaccgcgagagccgagagcgaagacgcggcaaaacagctgttaaaaccggttatcaaagagattaagaaacggttcggtaatgcggtttacacgacggatgagcatgagaatctggaggatgtcgttgttcgcctcttaaagaaatacgacctgactgtgacaaccgcagagtcctgcacaggcggtctgatcgccggacgcatcgtcaacgtgccgggggcctcagaggtctttaacgagggatacgtgacgtattccaacaaggcaaagaaaaagatcctgggcgtcagtaaggcgaccctgaaaaaatacggcgcggtcagcgaacagacggcgcgtgagatggctgcaggcggtgtatttacgacggatgcggatgcctgtatcgctgtgaccggcatcgccggaccggacggcggaaccgaggagaaaccggtgggactcgtctatatcgcatgttatatgaaggataaagtcaaagtagaggaataccatttccgcggaaaccgcgagaaggtgcgtgagcagacggtgattcaggcgctggatctgctgagacggtcgattattaagaattataaaaaagattgatcatgtaaaggagggagagctgacaggcggggagaaatagccggaaacgtgctgtttttagagcgccatggatcaggctctccttttttaggaggcggggacgatgatttggtataaatatctgtatctgggagaaactgctaaaaagcatcgtttttcgattctacagaaactccgcctcggaaagctacagccgggcgttcacgtgatcacgcctgcctcaggcggacacaacctgcttgatatccagcctgcctatgtgctccggcagaattattaccgggagcaggcggatctgctgatcgtaggggtcggcgcgagctaccaggatgccgtggagacggtggggcggattgtggatgaaacgtaccgcgagacgggtggatttgatgtgaagacgtatctgagagagaaggaagacaggctgaggaaaaagaggtaagtattttgtagcctttgatgaagattttttggactgaaaatgtcttttgaccccaacatcatatgatacggagctgatacatgaatttgtcaatgaaagaataagaagtgggaggggatggattgctgcatattttgttcataatcttgaaaatactcggaatcctgcttcttgtcattctgggactgttgtttctgtgcctgatggcggttttatttgtcccgattcgataccgggggaacggaagctaccacagtatcaaggatttttgtgtgcatctgcatatccattggctgcttcatgcggtgtcgttgcggattgcttatgaaaatgggcttcgatatacggttaagttgtttggattccggattttcgggagtgagagtgaagagaaagatacggaatctaggagtgtgcgggaaggcacgcaggcagcggattcggatgagctggaatttgtaaatgcgcaggagaaaacagaggatgatgatttagacaccggtgaactgattttgcgggcggaagcagcatcggagaagacagacgccgcgatcgagaaagcggaggaaactgccaggctgctggaggaggcggtgaagagacggagtgcgcagagggaggcggaaatgtctcaagctgtgaagaatgcagatgcatttccagatgtgaaggaggcgggagtgtcagaggcagaaggaaaaacgcatcgggcaaagaatgaattaaaatcaaatcccagccaggaaaagcgtgaatcgttccttcatagaatcattagctggttcaaacaaaaatggagcgccctgcggcaatccctctcaaagctgcttacccgaatcaacaacctggagcacaaacgccaatccgtccttgcatttatagaaaatgaagaaaatcagaagtcatttcgcctgatcaaacgccagctcatgcgagttctgcggcatatatttcccagaaagctgtccgggcaggttacgtttggcgtggaggatccttatttgatgggacaaattttgagtgtggcggcttttttgtatccagtttacggaaagaagattgatttgactccggtcatggatgcaaatgcgctggacggggagctttcgttccggggcagagtccagattggcgtgctggcattgatggcgcttcggatctggatggataagaatgtacggacacaggtttataaatatagaaaccgaggaggaagataatatggcagacaatcagtttgcatcgacaatcggtgcattatttcagggtatggatgagttcgtcacgacgaagacagtcgtgggagagccggtgacagttggcgatgcgattatacttccactcgtggatgtaacctgcggcatggcggcgggcgcgtttggtcagtcggcgaaagagaagaatgcgggcggcatgagcgccaagatgacgccgagcgcggtgctggtcattcagaatggcatgacgaaagtggtcaatatcaagcatcaggatgcattgaccaaggttctcgacatggcaccggatctcgtcaataaatttgtcggcggaagcaccggaccgatcgatgcggagacgatgcagacagctgagaaaatggcgggcgagatggaagagaagaaataaagaaattaaaatcaaaacgcttcatagaatgatcatagcacacgatcgaatgtcagatgtctctggcaatgatcgcctgctatttaacttcttttgaaaacagacatttcagagaggtatcattctatgaagcgtttatttggtttagtccttttttcaatgggatttggcatgaccctggtgctcattttcccaaagaattttctatgggtcagcatcgccatttctctgatgattgtcgggtacaatatgttttgccgatgagattctatgctttttcaagtggcagaatcactgtaaagcagctaccctcgtccacctggctggatacctcgatggtaccgtgcatcaggtcgatgatccgtttcgtgatggaaagtcccagcccgttgcccttttcattgggatccgagttcctgctgtaaaatttttcaaagatccgtttcatcgtggcgtcatccatgccgacgccggtatcgcggatggagacacgcaccttatctcctgtgataacgagtttggcagaaagcataccgccagccggggtgaatttgatggcattttgcaggagattgatccagacctgctgcagcatctcacagttgccgtaaaatttgcacgccgtcaaatcaatgtcgagattcagatgctttttctcccagagcggttccagcagaagaatcgcctgccggatttgttcgtcgaggctgaacgtcgtgcggccggtcacgatctcctgcttttccaggcgggaaagcagaagaatgttgccggtcatcgtggtgagctggcgcgtgctgtcgatgatgatgcgcgtgtattcattccggtccgcctctgagagagatggatcctgcagcaatgccgcatagccctcgatggcggcgagcggtgtcttgaactcatgggaaaccgtggtcacaaaatcatttcgcagcgattcgatgctgtttaactcctgcaccatacggttaaaattgtaggttagttcacagatcgcctgcaaagacttcgaatctggcacatgaacagaaaagtctccgtctgctacctgcttagcggcaaggcttatggaaccgatggggcagagaattttcgaccagaggaacagcgacagcgcgatactgaatgcaaggctgctcaaaaatgacatcagactcggaaaattcggaccgaaaatccgaaaaacttcgtgtttatctgttccgcttgtgagcagcgagacaaaatatccggtcagcatcggcatcaacgaggacaccaggaagaaaaagaccaggagggtcagccagtagagtggaatctggaaatatttggtaaagtttttgctgatcatacttctgttttcaccgccttatagccgagaccccgcacggtcatgatgataaaatcatcgcagtttttaaaccgttcgcgcagccggttgacatgcacatcgaccgtccgttcgtcggttgtcgagtcaagcccccagatttcgtccatgagctgctgcctcgtgaaaatcttatttggataagaaagtaatttatatagaaggtaaaattctttctgcggcagaagtgtctcctgcccgttggccgtgaccgtcagtgcatcgtagtcgagaatcgtattttggcagacaatccgatgctccgtcgcgatcttggcgcgtttgagcagggcgccaacccgcagaaccatctcattgacatcgatcggcttcaccatgtagtcatccgtgcctgcctgaaagccgcgctgcttgtcttcgaagcgctctttggcggtgataatcaggatcggcatcgtaaatccactcgtccgcaggtgatcaatcagttcatatccgtccattccggacatcataatatccgaaataatgagatctacatattcagaatctaaaagagataatgctttttcgccgctttctgccggaagcgccagataaccattgttggtgagtaccgtgcagaacagggaacgcagtttcgcatcatcttctaccacgagaatgtgaaacatatccgtaaatcctccctataattcaattaaaaagatgtaatatcataaatactcatagtataccataagtactaaattcagctctcaccttcggctcggcttcattaaggacttaggtatgactcgcactaagttcgaaaagacctcactaagtgctcatattataccacataagtttaaactgattgtgaacggtgcaacacatttttttcacggttcgtttacattcagtttatatttagttgaaactcgtttaaaaatgggatgttatactagggacaattaggaaaaaccagaaaggaatatgcgaaatgagtaaactatcttctctgatggaaacggtaaagcagaataaaaagaaaacagccatcattgcggtggtggtgctgatcgtacttgcggcgctttttatgcgtttcaagggtggcagcaaaggaggttccggcggcggtccgggcggtccaggcggtatgcaggacacgcagatggacaatgtggcgacggttgcggctgagaatccaaagagcggaacgattgagcggacaaccagcacatccggtactgtcgaggcatcggacgttgtctatgtctatgcgaaggcatccggcgatgtgacgggtgtcaacgtcagcgtcggtgatatggtgacagcgggtcagcttctctgtacgatcaataccgaacaggttgagacggcgaaaaatgcgatggactccgcctctgttaacctgaccgaggcacagagcaatttaagccgtatgcagcttctttatcagggaggagatatttctgatcaggaatgggagcagtatcagaaccaggcgaagacggcacagttaaattatgaatcggcaaaattaaactacgaccgtcaggtggaatacagttccgtgaccgcaccgatctccggcaagattgagacgatggatattgatgtatatgatcatgtcaaccagcagacgcagctctgcgttatctccggtgagggagataaacgggtatcgttctacgtatccgagcgtgttatgagcaacttaaatcagggcgacgcgatgacgattgtaaaagatggaacgacttatgatggtgtgattaccgatgtcagcagcatggcggacgagagcaacggtctgtttaagataaaggcagagctgccggaggcgaacagcctttcaacgggaagtaatgtcaaggtaacagtaacttctgagcatgcagagaatgtcatgaccgtgccggtagatgcaatctactatgataacggcgttggaaatgtctatgtttaccaggatggaacggtacataaagtggaagtcgaagtggggctttataatacggagctggcggaaatcaagtccgggctgacggccgatgatctcgtcattagtacatggagttcccagctttatgagggttcaaccgttaacttaaagggtgaagaaacagatgcggcagcagcggatgaagctggaaaccagaaagctgatgccctggcagggtctgaaaatggacagaaagcgggcgcttcggcagatggcggaaacgatcagcctgcgggtgatgcaggtgctccgaaagatgcaaaaaatggacagaaacagtaggacaggaggaatgtaagacatgggagtaacgaaatatatcctgaaacatccggttactactgtcatggctctgttgtgtctggttgtattcggtatttcatcggtcttttcggcaaagctggagcagatgccggatatggagacgccaatgctgattatcatggcaaattattcaggcgcaggaccggaggatatcagcgagctggtaaccgaaccgatcgaggatgcgatcggtacgctggaaggtgtggacacggttacctccgaatcgagcgatggacgttcgatgatcatgcttcagtacgattacggcaccgatatggatgaggcgtatgacaacttaaagcagaaactggacaatatccagcgggagctgccggatgatgtggaaccgagcgttatgtcgatgaactccaatcaaggagacagtatgatgctttcgattgcacataagacgcagacaaacctttacgattatgtggatcagaagatagtacctgaattagagcgaatttcttcaattgcaaacattgagacgcgaggcggttcttctaagtacgtcagcattgaattacagtctgaaaaaatggatcagtacaatctgaccatgcaggatgttgcgagtgcgattaacgatgcgaacgtggcatccccgtcgggtgaggcagatgccggaaacctggagctttccgttactacctccttaaaaacagaacaggtaaatgagctgcaggatattccaatcaagacgccggcaggacagattatttctctgtcggatgtggcaaatgtgtatgaggcaacgaaagaccggggcggcatttcccgttacaacggtcaggagacgatctccgtttcgattcagaagcagcaggacagcacagatatggaagtgtcctcggctgtaaaagagaaaattgaagaattgatggcagatgattcggatctgacgatcacggttgcaaatgatacatctgacacgattcttgattccttaaaagacgtagcagagacaatggttctggcggttatcatctccatgtttatcattttcctgttctttggcgattataaggcgtctctgatcgtcggaagttccattccgacttcgattttgatgtccttgattgcgatcacgatggcaggattttcgttgaacgttatcacgatgagtgcgctggtactcggcgtcggcatgatggtcgataactcgatcgttgtactggagagctgtttccgtgcaacggcggagcaggaagacaagggggcgcttggctatttttcagcagcgcttcacggaaccggcattgtcattaactcgatcatcggttcgacgattacgacctgtgtcgtattcctgccgctggcattcttaaacggtatgaccggacagatgttcaagccgctgggatttacgatcgtgttctgtatgtcagcgtccctgctgtctgcgatgacggtggttccgctgtgttatctgttctataaaccgagcgaggcgaagcgcgccctgatgggacgtccgattgaacgtttacagaaatggtaccgcggcatcatggaccgtctgttaaaccacaaggcgatggttatgggattttcggttctggtacttgtactgacggtaattctggcgagcggaatgcagacggagctgatgacatcggatgataccggtacagtcagtgtcagcatagagacgcgtccggggctgaaacaggaaaagatcgaggaggcgctggcagaagcggaggcgattgtttccgcgagcgaccagattgattcgtacatgctgcgttacgacggagacagcggcgagatcagtgcctatctgaaagatgaccgtaccatgaaaacagacgatgtagccgatcagtggcagaaagagatggataacattgcaaactgtacgatcgacgtatcggcatcgacttccatgagcttcatgggaagacagcgcggctatgaagtgattcttcacggcacgcagtatgatgaattaaaagaagttagtgataagattgtcaaggaaatgacagcaagaacggatgtcatcaacatccattccagtattgagaataatgcaccgatcgttaccctgaagattgatccggtcatggcaaaggcgtatggactcacggcttccagtatcggaacgacgatcaaccagatgttgagcggtatcgacgcgacgacacttaaaattgacggcgaggacattacggtaacggttgagtatccggagggcgagtacgagacagttgataacataaaagatattattttgacgggaacaaacggacagaaggtggcactgaccgatgtggcaaatgtcgtatttgaggacagtccggcttcgatttccagaaccgacagtgcatatgagatcacaatctctgctgattacaccggtgataatgtacagcagcaaatcaacagtgaggtaattactccgaacttaagcggtacaatcagcattgggcagaacagccgtgaccgtatgatgaagagtgagttcagctccctgtaccgcgcgattgcgattgcagtcttcctggtattcgttgtcatggcggcacagtttgagtctgtgaagttttccatcatggttatgacgaccatcccgttcagtttggttggttccttcggattactgaagctgaccggcgtcagcatcagtatgacgtccctgcttggcttcctgattctggtcggaactgttgtaaataacggtattctctacgtggatacggtcaaccagtatcgttccacaatggatctgcggacagcgctcatcgaggcaggtgcgacccgtatccgaccgattctgatgacaagtatgacaaccatcctcgcgatgatcccgatggcactggcaatcggaagcagcggttccacgacacagggcctggcgatcgtagatatcggcggtctgaccgcaggtgtgattgtcgcgctcttcatggttccagtatattacgcactgctgagccggaaagcaaaggaagagataccggacatagattaattggaaacagaataggataattgttaaaatcagatatatcggaatggagtgacatacatgaatcgaaataaaaaaatatgtctgaagcatcggattgcgaccggtgcagcagcctgctcactggggctttttctggcggcaggtgcgccggtccaggtattggcagccagcccgcaatttgcatattctacagaaaaatgggcttcgctgcaggatgataagctcgaatttgacgagattgctgatctaatccatgagtacaacagcacagtggagaagaaccggatcgagtacaaggattatcaaggcaaagacagcaatgagatcgcgcaggaatattatgacgcggcagatgagatcgagagcagcatcgagtacccggattcagatgatgcgaattatggttccgctctggcagcagcacagagaagcgaggcttccgcgacccagatgcgcgagcagggcgataataacgtcgatgatgcgaatgttaaggcgtgggggtatacgcagaccgagaaatcgttggtacagcaggcgcagaacctgatgatccagtactggaatgcccaggaaaacttaaagagtgtgcagaaccaggtgtccaaggcagaaaaagactatgagacggcaaacttaaagctttcatccggaagcgcgacccagacggatgtgctggatgccaaggagactcttttaaaggcgcaggcgtccatcacgacggcggagagcaatattgcatcgacgaaggaatccctgtgccagatgcttggatggaaatatggcgcatcagtagaaatctgtgcattaccggacccgcaggaacagatgagtgcatcggtcaacctcgaagaggacattgcgaaagcacaggaaaataattatcagttaaagattctggtacgtcaggtcaacaatgcgatgacaagcacccttaaagagcagtaccagacaactctgaccagcgggaaggaggcagtcaagtcgaatgtccagtcggcttatcagaatctgaagatgtctgaggcacagtatgaacaggcaaaacgcagccttgaattagaagaaaagacgaaacagaccaacgaccgcaagctggcagccggacttatcagccagaacgcataccagagcgcaacctattcctatgaatcggcatccgtggcaaaagagacggcagcgatgtcgcttctccaggcgcagctcgcctaccagtgggcggtgggcggtctggcgtccacgcagtagaaaggggtgggcggatgatgcgaaatctgaaaggaaaatggatgaacgcggaagctgggacagagcaaaagatgcgcaaggggcaagaaagagaccgaagcggtgcaagtgctttggatgtgcatctggacggttataatgtgaaacgaatcggaaaaagcagattgactcgttcgatcggaattgccctggcggcttgtattcttgtatcgagcccggcgcaggcggcgaaaacgcctttgatttccggcacagaaagtgattcagacagcgaggcagatggtccggcgctggaagatggcaccataaccgaaaacagcgcagacaacacgatcgccagccagtccggctcctatacggaggaacagctcgcggattctgtgatagagtacggggaactggaggcgctggtgcggcgcggcaatggaacggctgtcagcgccgattacagttatcaggacagccttgccgtccaccaggaagcctacgatgcgatgatttccggtgcccgggatatgaactataaagcagatgagctcgaagatgcgggcggagatgaggcactgatcggcacctatgagcgaaatgcacaaacgctgtcgatggcagcgaagcagtataaaaagtcgctcacttccttaaattcggcgtcaagccgtgcgtccagaaaccggacggtctggcaggtcgtaaagaccgcacagatccagtggggcacctgccggcagcttcaggacgaggtggaggcggctgccaagacggcagagaactatcaggcgcaggcagatcgcaaagagcgggaactggcagcggggctttgcacggagacggatctgctgcaggctcagaaaaacctgctaagcgcccagacagcattacaatccacgaccgatcaggcaaataaggcgctgcgccagcttgccattttacttggaaagagcggaacttctattacgctgggggaaattccagccgtatcggcaacggaactggcttctatgaatctggatgcggaccgtgcggcagctgtcgttgcaagttccagtgtcaaatcagccagacgatcctccgcaaccggagatgcggcgcgcaagctgcgccaccagcagatcgaggaagccgagagcgctgcaagcgcctcagcggatgagcagtacgctgagatagcggcattaagcctagaacgcgacgcggcgcaggcagcctaccagtctgccgaaaaaacatacagcgccacccagatcaagtatcagtccggtgcgatcaataaagcaacgtatttacagggcgaggcgtcctatctgcagaaaaaagcagaactagagactgccgagatttccctgcggacggcatatgatgcgtatgagtggatgttgaaaggggttgcgtgaggaccaagtgattgcgcttcctaagattatatgttttatatggatatgtggaatagaattttataagatgggtttgaaaaaaacggcactgcccggatgggggtgtcgttttgttactgttttcgtactttcggtgtgagaacaaatttgtatttgcgtattgttccggtcaatggtacaatcataggcggaattttgaaccggtaaacgatagactgaaagggtacgcccgttcacggacccatggaaaaggccggaaatgaaaacgggaggaacatatagatgcagcaggagaatatgaagacattggaatctctggaagattttcggcatttttcggaaaaagagctggaaatacggtttgaccagcttaagaaacagattgtaccagcggacaagacaatccgggagcaggcagaaaagcattgggagcatgtggcaaaaccgcttggcagtctgggagtcctggaggaagatattgtgcgggcggcggcagcgcagggggaggaagtgccagacttctccaagcgtgcgcttttaattttttgcgcagataatggggtagtcgaagaaggagtatcacagaccgggcaggaggttacggcggcagttgtttcgaatatgacacgcgggaggagctgttcctgcctgatggcagtaaaggcagagacagatgtgtttccgatcgatatgggaattgcctgtgaggtagaacatcggggagaactttatcccctaacggaacggaaaatccgccgtggaacttccaattttacaaaagcagcagcgatgacgcgtcaggaggtgttgacagccattttgacgggaatcgatgcagtgcgtgtgctgaaggagcaggggtaccgcttgtctgcagtgggtgaaatggggatcggcaatacgacgaccagcagtgcggtcgcatcggttctgctgcaaaaggatccagaacttgtcactggagctggggcgggtttagattcggctggattgaaacggaaaacggaggtaatccggcgtggaatcggactgcatcacccggatcccatggatggcatggaggtattgcaaaaggtaggcggattcgatctggcggcgatggcaggtgcttttttgggcggtgccatctatcatgttccggttgtgattgacggggttatcgcggcagctgcggcggcagctgccggaagaattgcaccggcagcgacggactatatgctggcagcccatgtatcggcggaaccggcgtctatctggctgcttgatttgataggagtaactccggctatccaggcgggacttcgactcggagaaggtacaggggcgctggcgctgtttccactgctggatatggcgctgtccatttaccgggatatggatacgtttgcggagatggaaatagaggaatataagccgctggtgtgatgagatatacggattaaaacattttttgcgtatgtttttaaagcatggaaactgctgcaattcggtgaaaaagaggataaatgaacgatgttatatatagttacaggcggcagtggcagcggtaagtccgaatatgccgaacagactgccgtgcagtgccggaacaggaccggcgggacactctggtatctggcgacgatgcggatttgggatgatgaaggcagaaaacgagtggagcgccatcggcggatgcgcgcggcaaaagggtttgagacgattgagcggtatacggggttagaaacagtagaattagaggagagattcgaagagtccaattcggctggtttggacgctgaacaggaaaacgatagtttgaagcgctgggagtcctgccgagtggcacaaaaaccagtgcttctccttgaatgtatgtccaaccttgtcctcaatgaattttatgctcaggaaaatggtgcgcaagagcggattctgcaaggaataaaacacttgcaaaaccagtgccatgaccttatcattgtaacgaatgagatcttttcggacggtgtgacgtatgatctggaatcggagcggtacatagagcttctgggacggatcaaccgggaactgggacagatggcggattcggtgacggaagtggtgtatggaattccgcttgcggtgtcaacacctgtttttgcagccggtgaaaggacaaaagatgtagggtagtcagtgagtggaacagagcggaatgcctgctaaagttatggttgccagaatagagtcagggggatcgaagattgaatctgataggaagttttgtcattgcattttccatgtattcacgcattccgatgccgcgcatggactggacggaagagcggatgcgctatgcgctttgtttttttccgctgatcggggcggtgatcggggcggtagagatagccacgtttgcgctctgtgaaattttgggtgctggagttctgttccagacctgcctgttgacggcagttccactattgattaccggtggaatccatatggacgggtatctcgatgtgacggatgcgcgccattcctacggcgagcgggaaaaaaagctggcgattttaaaagatccccatacgggggcgtttgcgatcatcggtctggggctgtacctgcttctctatgcgggggcagtttctgagcttgtgggagcagatgtgtggctgctgccgggggcgcttatgctggaacgcgcctgcagtggctattcggtggtggcatttccaaaggcgaaaaaggacgggcttgccgctgaattttccagaagtgccgagacaaagggtgttcgcgtgagtatggcagttttagcagtgttggcgatcagctggatgatttactggggacatctgcgcggcgctctggcagccttaacagcccttgtgactttcgtttgttattatcgtttttccatgcgggaatttggcggcatcaacggcgatctggcagggcattttctgcagagctgcgagcggaatgtggtgctggtgctggcggcgatgcggctggcaggtacgtgcctgcggtttttgaatttttaagcgaggaaaagcagaatgatttttataattggcggcagggaacaaggaaagacagcgtatgcgatgaaattgtgggaaaaacgtactttggaacggaggaaaacaaaagacttatccaccgttctgaatcgatcgaaaaatccagaagcgtgtagagttacggcacgcatcgcggatgggagattagaaacggacgaacagacgatcatgcaggcggatctgatcacgcattttgaactgtttgtgaggcgtgagatggaagccgggcgcgatccatacgtgtttgcagaacgcctgatgcaggaaaatccggatgcattcgtgacggcggatgaaatcggctgcggcattgtgccgatggaagcatttgagcgcgattaccgggagacagacgggcgcatttgccagcggatcgccgcatattcggaggaagtgcaccgggttatctgcggtctgggaatgcggatcaaataaaagaatagttgggagtagacaaaatgacagcaatcagtaaagtattgacaggaatgatagaaggtagaatggtcggatatcacttagctgcgattctggcaggttatcttctggatctgtgcctgggtgatccgcattcgatgccgcatccggtccgggcgatcggaaatctgattgtgtggctggaaaaatatttgcgtccagctggaaaaaagcatgcaacggaacggggggaacgccgcgcgggcgttctttttgtgtgtctggtgctgcttgtgacaggcagtgtggcaggcgcaatcctctggatttcccgtctgggcggcatctggattcagacagtagtcgaggcggtcatgacttactatctgctggcggcgcgctccctgcgggatgagagcatggcggtctgccggaagctggaggcgggagagatcgaggaagcccgctatgcagtgtcgatgattgtcgggcgcgatacgaaacctctttcagaggcggggatcgcacgggcggcagttgagacggtagcggaaaatgcgtcggatggagtgattgcgcctttgttttatctggccatcggaggtccgcttcttggctggctgtacaaggcagtcaacacgatggattcgatggtcggatataaaaatgacagatatctgcattttggacgcgcggcagcaaaactggacgatctggtaaacctgattccgtcgcgtctggcagcgcttttattgatagtctctgcataccttttacgatatgacggaaagaatgcttaccgtatctggcggcgtgatcgccggaaccacaaaagccccaattccgcgcagaccgagtcggcatgcgccggcgcgctgggcttgcgactggcgggcgatgcctggtatttcggcaagttagttccgaagccatatatcggtgatgagatacacccgattgaaccgcaggacatccgccgggtcaaccgcctgatgtatggagcggcgggaatcatggggattattgcgttggtggtgcgcggtgtgattctgtttttatagaattggaagaattccggaatgataaaaatattaaaaacagagtaactgttcagtaccttcacagtcacgcgcaaaaatccattaaaaattgcctgcggcaatgagatttttgcctgctggcccatgttttcgtacggtcagcgcagtaaatgcgcagacctactgaacaattacaaaacagaacgaaataagagaacagtaaacagataaagaatatataaaaagagggaacaacagggaggaagcatctatgccatacacgcacggcggcgatatttacggtgatgcagccgtagagttagatttttcagtcaatacaaatcgtcttggaatgccgcaggctgtccgtgatgctgtgatggcatcggcggctgcttgggaacaatatccggatgctttatgccggaagctgcggcgtgcagcggctgctttttatgaggcagacggcacgccgattccggaggactggctcgtgtttggaaacggtgcttcggatattttatatgcagttgtctcagcgattcggcccaaacaggcgattttgctggcaccgggattttcggagtatgagcaggcgcttcggatgtgcggctgcgagatccggtggcttcatttaaaggatgaaaatggattttccctggagagtgcgagggaagaattgtatgccatgctttgcgatggctccggggatgcatcgaagatagattcggtcccaactttatcctctaaacgtgaaaacgtctgggaaaaaattttgattctcggaaatcccaataacccgacagggcgcgccatttcagccaccgagctggaaaggttggcacaggtctgccgggaaacacatacctggcttatgctggacgagtgttttcagtggtttttggatacacggagagaatgttcgtttgttggaaatttgttaaatggtgttggagatcacgttatcctcttaaatgccttgaccaaaatctgctcaatggcaggccttcgcctgggctatggcatcatctccaatgccggactccgggaacgcctcgagaagttccgccagccgtggagtgtctcggctccggcacaggcgggcggggtggcggcatttgcggtactggcggatcattcagaaggaaatctgctggaatggacggttaaatctttgcagacggaacgtccgcggctggcggaaaaactggaagaactgggatttatcgtttatccgtcccagacaaattatctgttgttccgttcgccggatgaggattcgcgcgattacaaacagggttgtttagagcatggcattttgattcgcgcctgtgagaattttgaggggctgaaccgtcattattaccgggtggtggtgcggaaccggggagaaaatgaaaggttgataaatattttgaaagaggtacaatctgaagaaaaacacaatgtgaatttgtaatataaaacgaacccgtaactgttcagtaggtctgcgcatttactgcgctgaccgtacgaaaacatgggccagcaggcaaaaatcccattgccgtaggcaatttttaatggatttttgcgcgtgactgtgaaggtactgaacagttacacgaacccataaaatagcctctgtcatttgaaaggacaaatggcagaaaaatagtttcggttaagcacaaaatagcttcgaattaaatagctttgagcaaccattatttggtaagacactcaaaaataaggaggatttcaccgtggcaaaagcaatcatgatacagggaacgatgtccaatgcgggaaaaagcctgctggcggcgggactctgccggattttcaagcaggacggctaccgcgtggcgccgtttaaatcgcagaatatggcgctgaactcctatattaccagcgagggattggaaatgggacgcgcacaggtagtgcaggcgcaggcggcgggctgtgagccatcggtggacatgaatccgattctcttaaagccatccagcgatgtcggttctcaggtgatcgtgcgcggtgttccgatcggcacaatgcccgcgaaggaatatttcaagtataaaaagcagctaatcccggaaatcaagaaagcgtttcagcacttgtccgaacagtacgatatcatcgtgatcgagggcgccggcagcccggcggaaatcaacttaaaatcggatgatatcgtgaacatgggaatggcgcgcatggcgggtgcgccggtgctgcttgccggggacatcgaccggggcggcgtgtttgcacagctctatggaacggtagcgcttctggaaccggatgaacaggcgatggtaaaggggcttatcatcaacaaattccgcggcgataagacgatcctggatccaggtgttgagatgatcgagaaattatgcaagattccggtggtcggcgtcgttccgtacatggacgtggatatcgaggacgaggatagcttaagcagccgcctttcatccacagggcggaataatacccttaaacaggaaaacgagtcatctgaaaaacatgtagaggcatggatcgacattgcagccatccgctttccgcgtttatccaatttcactgatctgaacgtctttgacccgatccccggcgtttcggtgcgttatgtgagccgcctgtctgagctgggacgaccggatctgattgttcttccgggaacgaagaatacgatcgaggatctgctctggatgcggcagaatggtctggaagcggcagttttaaagaaagcagccggaggaacgccgatctggggcatctgcggcggctatcagatgatgggacagacgctgtcagatcaggaaggaaccgaggcgggtgtgcctgggcgtacgatctccggtatgggacttctgccgttacagacacagtttcaggaagaaaagaccaggacacaggtcaagggatgtttcgggacggtcagcggtatcttttccgggctttcggggatggaggcggaaggatatgaaatacatatgggagagacatcatcggtcggcggtgatattgttaagaacgtgatcaaggagcaggaaaaagccgtaaatcatagtttattgaaactcagggaagaacaggcgggaaaccacactgaaaaacaggatggctgctgccgggacaacctctacggcacttacgtccacggcatttttgacaaggcagaggtggcggagacgattgtctgtgcgctgatgaaagaaaaaggaatggagccggaagtcggcggattatcgtttgattatgagaaataccgggaagagcagtacaaccggctggcagacacgatgcggaagtacttggatatggaagcaatttaccggattctggaagagggagtgtaaatagatggatgaaaaaatgaaagaactcagtcaggtattgccgtcggagatcgaggcgagaagttttgagattatcaccgaggagctgggggaacggacatttccggagaaagaagcaccaattgtgaaacgcgtgattcacacgacagccgactttgagtacgcagattcgcttgtattttcaccgggcgcagtcgataaggcgttggaagccctgaaaaatggggcgtgcatcgtgactgatacgaatatgggaaaatccggcatcaacaagcgcgcgcttgcgtcgctgggcggtgaggtctactgttttatggcggacgaggatgtcgcgaagaaagcggcagcgtccgggaccacccgtgcggttgccagcatggacaaggcggcagaaatgggaaaagactgtatttttgcagttgggaatgcaccgaccgcgctggtgcgtctgtacgagttgattcaggagggaaaaatccacccgaagctcatcatcggcgtgccggtcggctttgtcaatgtcgtgccgtccaaggaattgattatatccttgccggacactccttatattgtggcaagaggcagaaagggcggcagcaatgtagccgccgcgatctgcaatgcattgatttatcagttgacgcgcaaataagatgtgatggtgttaaatctgcggtattaaaatgtacatggatgcattctcaaaagatatgctggatatgggcggatgtttatcagcagccaaagccaccgccgccacagcagcagcacaggagcaggatccagatcaggcagtcgcagttgttgccgccgcatccgtgatcaaagcatccgccgccacatccgccgcagcacagcagaatcagaatcaggaagagacagttgttgttgccgaaaccgccgcatccacagccacaattacagccgcagcttcctccgttgttatcacatccgcaaccgcagttggtagccgctaaatcactcatggttatgtcctccgagattttctatacacttcatcatatgaggggcagcttgccacagtttccataaatcaggaaaattaggacggaaatattttactataaattttttgttgaaataatcgagataaccgggcggatcgacatggatgtttatccataacgatttgtcacagaacattgtacaacgaaatgaaaagaggaatgaaaatggaaccgttatattatcagacaccgtatgtaaaagaatttgatgccatcgtcaccgcctgccgtccggcaaagcacggatttgaggtggaactttcccagaccggattttacccggagggcggcggacagccgtcggacaccggacggatcggggaagtgcacgtgacacatgtggaggagaaacatggcgtggttgttcatgagacggacgctccgctggaggtgggaagcaccgttcacgcggccatcgactgggaacagcgtttttccaacatgcagcaacatacgggagaacatatcatatcggggctgattcatgccgcatacggatatgataatgtcggatttcatatgggacacgatgaagtgacggtcgatctgaatggtccgcttaactgggaacagttaaaggaaatcgagaagaaggcaaatgcggttgtctgggcgaatcttccggtacaggtgacatatccgggtgaggaggaattgaaaaccatcgattaccgtagcaagaaagagctgaccggtcaggtccgcatcgtagagattccgggggcggatatctgtgcctgctgcggcacacacgtggattacacgggagagatcggcgtgatcaaggtgctttccctgatgaattacaagggcggcgtgcgtttctccatgctctgtggtgaccgtgcgctggagaattttgaggcgaagacggagcagatgcagacgatctctaacctgctttctgcaaaaccggagaaggcggcggaggcggtcagccatctgaaagaggagagcgggcgcaaggacggtgagatcaaccacctctggcagcgcattctcaccatgcaggcagacgtctatccgcagggtcagaaagcgctggctgtatttgagcagggcatgacgccagttctggtgcgtcagtttgcaaatctgctattggaacaggaaaaaggagagaccgtgctggtgtgctctggcgatgacgcgtcaggttataactacacagccggaagcctcggccgtgatatgcgtgcattcggaaaagaattaaacgcccgtctgcagggacgcggcggtgggagcacccagatggtgcagggaacattccgggcgtcgcgggaagaaattgaaaaagtctttcaagagctggcgcggatagaagcgtagctgtttagaaggtttgcgtgtttactgcgtgaagtatgagaaacggtttgacttagattcataaaacggaaaaaagcttcctgtgcagcagagccaatctgccatgcagccaggaagcttttttatacagtttctatcgtatcattcaaacatttttttatacaacggcaagatacataccgtgtacaccttagaagagagcttactccccctgatacataaatttaatcagtcggtctaagtcctctttctcataagcaaccagttccagctctttgatatagccattggaaaaaatatttgccatcgacagatactgggacagcttggatttcaggttgatgcggtcgccctccggggaaaccagctcgacggttcctttgcaggaatcaattactttaaaaaatgtgtttacatcggaaatattctggattttcatatttagccctccttcatggattggcacacaaccctgtgtgcagtttataatttcgtcaatcttttaacaatgataattataacagacctctataaagggcgcaatgctcacattttccaaaaaaatccttaaaaaaatatccctgtatgtcaaaaatacagggatgtccaagaaaagattgtctattaattgtcaaaatcaatatgaaacgtgtcgttatttgcggtaatatgaacataggagagattgaaagactcatccagaatgtctaccttgtattcaaatacgacgccattgtcttttttggagagaaacagataggttccattttctttttcctccatctgatcgcagatgtcgttgtagatatcctcgccgtttacctcgcccggatagccggaagctttgatcttgtcttcgattgctttgtaaaattcttccatcgttgtaactcctttattggtattagtcaatctttttatactcattgtattgaatttaaatgtgttataagtatacaaaatctgcactgttctggcaagacaaaacaaggattactttttacgtatacgggtattaataaaagagggttactgtacacgcatacgtaaaaagtaacggaatttgccgtggcttcgcatttcaatagggcaaattcctgctgccaccacgttttcttacggcactttcggttccaaaagtgcctacccgtgaacagaaacaaaagaggttctaaaatgaaaaatagatctgcctcatgcttgatttataaaacgtgaaaccttataataatacggaaatacggttttgaagagatgaactcaattccggtggcatagaaacaaacgaagtaactgttcagtaggtctgcggatttattgcgcgtgactgtgaaggcactgaacagttaccaaacgaaaatagtgggagaagagaaatgtcctattttccgatttttatagatatgacagatcggcaggtactggttgtgggagctggaagtgtggcatcgaggcgggtcggcgtgctggaaaaatttggcgcagcgatcacggtgattgcaccgaacacttcggaagagatacggaagctggcggattcacggaaaatccgtctgattgaacaaacctatgaggaagttcgagatacgatctggcaggaaaaaaacttttttatggcgctggcagcgaccgggcagacggggacggacgcagggatcaaggaggatgcgtcgagccattccgtctggtttaatatggcttccgataaaagtcagtcagagttttatttcccggcgatcgcccagggcagagaactgacagccggattgatttctggcggagcggatccgggattaacgcatcgtgtggcaaaagaagtacgccgcgtgctggcggaagcagaggtagaagatacttaatatattttatagaggagattaaaaattgacagataaaaataggatccgcgtaggcagccgcgacagtgcgctggcagttgttcagtcaaagatggcgatcgcagcgatgcagaatgtctgtccggagacaggatttgaattgatcacgatgaaaacgacgggagacaaggtgcttgaccgtccacttgatgcggttggcggcaggggattgtttgtaaaagagctggatcaggcgctttatgaagggcggtgcgagctgacagttcattccttaaaagatatgccgctctgtccgccggaggagctgccggtgctggcgcttttagagcgcgaagattgccgcgatgtgctggttctgcgtgaaggcttatccgagcttccggcacacccggtaatcggaacttccagccaccgccgcgtcctacaggggcagagattattcccggatgcagaatttaaggggatccgaggtaacctgaacacgcgtttgcgaaagctcgattctggcgaatatgatgcgctgattctggcagcggcggggctgattcgtctgggatttgcagatcgcatcagccgttatttttctgtggaggaaatgatcccgtcagcaggacagggcattctggcaatccagggacggcgtgaccgggagatcccttttgtgaaaatggttcactctgaggagtctgcggttttaactagggcagaacagggctttgtcgccacgcttggaggcggatgttcgtcgccgacggcagcttcggcggtgcttgaaaatggaaaaatcaagctgcgaggtctttattataaggaagaaacgggagaagtctgtattggttccattgagggcgatgcagagaaagcagcggagcttggaagaaaattggcggaacagttatcgggaaagcctgcactgtctccgctggggaaagtctaccttatcggctcgggccctggcgatgcagggctttttaccctgcgcggcagagaacttctggagcaggcggatgccgtcgtctacgacgctttggcaggcgacgcggtactgggctggattccggagcatacgcggaaaattgacgttggtaaacggagtggacgccattcgaagaagcaggaagaaatcttagaaattttattagaggaagcgaaaaagggcggaacgatcgtgcgcctcaagggcggggatccgttcgtctttggacgcggcggcgaagaagctgaatttttaaagaaacatcagatcccgtttgaggtggttccgggtatcagctccagcctggcagttccggcatattttggcatcccagtgacgcaccgaggattggcgggatcatttcatgtgattaccggacatcgtatggagggtatgccggctctggattttgaggcacttgctcgggtcggcggcaccttaatttttctgatgagtgttgcgaatgcgccgaggatctgtgaggggcttctgaatgcgggaatgaaaccggagacgccggcggcatttctgatgaacggaacccttgcgtcccagagaatgatccgcgcaaccctgcagacacttccggaagagggtgtgcgtcagggcgtcaaggcgcctgccatccttgtgatcggggaggtctgtgcgcttgctgatacgtgtgcatggagagaagaaaagccgttggcaggaaaacggatcgtgattacccgcccgaaggagcgcagccagaagctggcggaacatctgcgcgatgccggagcggaggtgctggaatttccaacgattgagttaaaaccggtctggaaaaaatcagaaaaagcggatgctggcacagcggataaagaaaaactgtatgaactggttcggaatctggaatcgtatcactggctggtgctcacgagtccggcaggggcgcaatatttctttgagcttttgaaccggatgcagaaagatttcaggagcctctcccatctgcgttttgctgtgatcggtgagggtaccgcgtccgtctgccgggaacacggcatttacccagattatattccggagcgcttttatgcggcagatctcggaaaagggctggcaaaacaggtgaagcagaacgaacgcgtatgcatcctgcgcgccagacatggttcgccggaactgacgcaggcatttgaagctgccggaatatcctatatggatgtgacactttacgatacgatcacgccggaggaatcgccgcttgcagagcgcatccgtgaactcctaaaagagggcgcgatcgatgcggccacgtttacgagcggatcgacggtacagggattcctggatattttacagccggataaggagacattgaacggatttacagccgtctgtatcggagaaaagacagaaaaaaccgccagcgcggcgggaatgaaagccgtactggcggagtccgtctcggaagaagggattgagcaggcgctctatcatatgtaaacatataaacagacgtctgttcagcaggttcatgaagaagttttcatatagattgtaaatgcctgaacatacggaaccgatagaagcgtgagcgggtaaatcagcattttagctgtttttctgctgtaaccgggcttttatgttgtccaacagcagtgcagaaacccgcagaccgccgtagccgcttccgagatggatatctggtttgttggcaccgtgaaaatcggaaccgccggtggagaccagaccgagacgggaagctatttcacgtaaatgaagactgtcggattgagagtgtgaggaataataaacctcgatgcccatcattccggcttcttttaaataggagagaagctgctcggtctttttccagccaagtttatactggagaggatgtgcgagcgctggtaaaccgccagctacacggatcaggcggatcgcttcctccggctcaatcatctgcttcgggcggtaatattttttgccgtccccgaggtatttatcaaatgcctggctgaccgaagtgacacagcctttttcaagcagtgcgcgtgcaaaatgggcacgggtgatgacagtgtgttcatttccatgaattaaatcttcatatttaatgggaaatccatctgcctgaaataaagcgagaagctcttcattgcgccggttgcggatctcgcggacctgccgcagtgcagataaaagttccgggcagtgcgggttcaggtagagccccagaatatggatttcttttcctttataaggactggaaaattcggcaccgggaatgacagtcagggaggtgttctcggctgcctgcatggcttccgcaacgccgtcaactgtatcatgatccgtcagcgcataggcggtcagaccgcattggagcgccagctttgtcacttcggtgggcgtgagtgttccgtccgaagcagtagaatgaacgtgtaaatcaattaactgcatagatgcagacctccttctgctgtaagactacccgcattagatggaaaagtcaagtatgcggcagatacccgctgcagtttgccagtgtgtaaacgggaacaaaaatgattgtttacatcagatatatttgaaagaagaagcgttatacaaaaaacagagcggctgtggaaatttgtaccaggaaacggttgtggggatcaaaaaaatttataagttaatttaagaataatgttattttcttttcctggaattgtgctatactgtagcagggatattttcaaataaacacatataataaaatttcatggaaaagacggacaggtgatggaaaatgagtgagtacaacagaaattcttcaggaggaaggaattttgaacatagaggattggagggcggaacgctgagttcgtacagcagtaccgggcatcgttcgtcgtccggaacatccagccatacaaaaagtacagctgcgcacacaagcacgggacgccgggatactgcgatgaaccgggcggcagccggtcggagtgggcatacttctgggcgttataaaaagaagagaagaaaccgtctggatattacacagatccttttgatcgtgatcggtgtcctggcggttatcctgatagcggcgattgcctcccgcgggtgcggtgggggcagcgcggcaggcggggcgaccgaatcggatgccgtacaggagagtaccgtggcagatggagcggtgaccgtcaacggcgtcaatatttacggaatgacgcaggaggaggcgcgcaaggcgatccttgattcatttgactggaagatgaaggtcaaatacgaggacaaagaggccgacgtcaccaatctgatggcggataaagttgatcagcttctcgaggagatctatgcaagtgatctgaaaccgggtgagacatatgaagtcaacacggaaaatatgatcgaggatgccaaggcagaggcagcactgattgccggaaactggaacatggcagccaagagcggcggtatctccggttacaataaggaaacgggcaagtttgagttcagcgagggcaccaagggacttgtcatcgatcaggacaagctggcacaggcgatggtcgatgcgattgacaagaaagagtttgatgccgttctgaccgcagagacgaaggaagtcgcagcggattcgtcggtacaggataagtacaagacaatgtccacctacacaaccacgacgacctccaacagcaaccgaaacgagaatatccgtctggcggtcgcagcgttaaacggaacgattgtcaaaccaggacaggaattttcctttaacaatacgaccggtgcgagaaccgaagaaaaaggctacaagccggcaaccgcatacttaaatggcgaggttgtccaggagccaggcggcggcgtctgccaggtatcttcgaccttatataacgcggttgtatttgcggggcttaaaagtacggagcgccacgcacatagctacgagccgtcctacgttacaccgggcgaggatgcggcagtcagctacggcggaccggacttcaagttcgtcaacaactcggaatatccgctggctatcaaggcaagcttcagcgcatctgatcgaaaactgacgatcgcactgtatggagttccgattctgaaagagggtgtcaagattcgtatgtcttctgagaagacaggcgagattgatccgccgtctgcggtttataccgaggatggttccttgcagccgggtcaggaagtgcagacaaaggcagcgactccgggcagccgctggtccacggatctggttacctatgagaatgataaagaagtgagtcgtgaattttttcacaatagcagctatcgtggaaaggcagcgcaaatcaaacgtaacagttccgctactgtagcgaccaacgcaacggagacaacggcggcagcagagagcaccgcagctgagacaaatgcagctaatgagagcacagcggcacatgagacaaccacagcggcaccgtccagccctgacggcgagacaaaagctccgaccacgacagcggcggcatccaacgaaggaccacaggagacaactccagagccagaggaaacgaacccggttgtggaagcaaatggacctggaagcaattaaaatcaaggcaaaactaaggtgaaatatagaaagtgctgtaagatagattgcaaaaatgaatgataaaagggcattcaagcggcatttgaatgaaaagcaccgctggatggagagtctttcttcatctggcggcgctttttttcatattttatggttttatcgactatctgaaaaaacagtagacagcttttttgtaattgttcgaaaaataataccggatataaatcaaatttatttgcattttgacgagaatttgttataatattatcaggtaaatttccaggacaatctatttggggagatttattactgaatacattcactatcaataggaggaatattcattatggcaagaaagatgaaaaccatggatggaaaccacgcagcagcgcatgcttcttacgcatacaccgacgtggcagctatctatccgattaccccttcttctccgatggctgaggctaccgatgaatgggcaacagacggaagaaccaatattttcggccacacagttcagattacagagatgcagtctgaggcaggtgcagcaggtgcagtacacggatctctggcagcaggtgcgctgacaaccacgtacaccgcttcccagggtctgcttctgatgatcccgaacttatacaaaattgcaggtgagcagctcccgggcgtatttaatgtttctgctcgtgcactggccagccatgcgttatccatctttggtgaccattctgatatttatgcgtgccgtcagacaggctgcgcgatgctgtgtgaatccagcgtacaggaagttatggatttaaccccggttgcacatctggcatccatcaagggcaagattccattcattaacttctttgatggtttccgtacatcccatgagattcagaagatcgagacctgggattatgaagatctgaaagatatggcagatatggatgcaatcgatgcattccgtaagaatgcactgaacccgaaccacccgtgtcagcgcggttctgctcagaacccggatatcttcttccaggtaagagaggcttgcaacccgtactacgatgcacttccggcgattgttcaggaatacatggacaaggtcaatgagaagattggcacagactacaagctgttcaactactatggcgctccggatgcagagcacgttatcatcgcaatgggttctgtcaacgataccatcgaggagacgatcgattacctcgtagcagctggaaagaaagtcggcgttgtaaaggttcgcctgtaccgtccgttcgtagccagcgcactggtagacgctattccggatacagttaagcagatttccgtattagaccgcaccaaagagccaggttcccttggcgagccgctttaccttgatgtagtagcagcattaaagggtacaaaattcgatcagactccgatcttcacaggtcgttacggacttggttccaaggataccacaccggctcagatcgtagctgtatatgagaacacaaccaagaaacagttcaccatcggtatcgtagatgatgttaccaacctttccctggagcttggcgcaccgcttgttaccactccggaaggaactgtaaactgtaagttctggggtcttggtgccgacggtactgtaggtgcaaacaagaactccatcaagatcatcggcgataataccgatatgtacgcacaggcttacttcgattatgactccaagaaatctggtggtgttacaatgtcccaccttcgtttcggtcataaaccgatcaaatccacctacctgatccacaaggcaaactttgttgcctgtcacaacccggcttacatccgtaagtacaacatggttcaggaactggttgacggcggtacattcctgttaaactgcccgtggaacatggaagagctggagcagcacttaccgggacaggttaagaagttcatcgctgaccacaagattaaattctacaccatcgacggtgttaaactgggtatcgagaccggtatgggtccgacccgtatcaataccatccttcagtccgcattcttcaagctggcaaatattattccggaggagagagcgatcgaactgatgaaggctgctgcaaaggcaacctacggtcgtaagggcgaagatgttgttaagaaaaactgggctgctatcgatgcaggcgctcagaacgttgtagagattcaggttccggaaagctggaagaacggcgaggacgagggacttgagatgactcacgcaaccgagggaagagcagacgttgttaagtttgtcaacaccgttcaggctgctgtcaatgctcaggagggtaacaacctgccggtatctgcatttaccgattatgtagatggtacaactccgtctggttccgctgcatacgagaaacgtggtatcgcagtcaatgtaccggtttggaatccggacaactgtatccagtgtaacttctgttcttatgtgtgcccgcacgcagttatccgcccgatcgcgatgaccgaggaagaggctgctgccgctccggaaggaacaaagacactgccgcttacaggtatgccgcagtacaagttcgtgatgactatttcttccttggattgtaccggatgtggttcctgtgcaaatgtctgcccgggcaagaagggtgagaaagcacttacgatggtaagtcttgacaagaatctggaggctcagaagggttatgactacggtcagacacttccgatcaaacaggatgtcattgataaatataaagagacaaccgttaagggaagccagttcaaacagccgttacttgagttctccggcgcttgtgcaggatgcggcgagactccgtacgcaaaactgattactcagctgttcggcgatcgtatgtacattgccaacgcaaccggatgctcttctatctggggcaactcttcaccgtccacaccttacaccatgaacaaggctggcaagggtccggcttgggacaactccctgttcgaggacaacgcagagttcggttatggtatgcttctggctcagaacgcaatccgtgacggcttaaagggtaaggttgaggctgtgatggcggcagaacaggcgaccgatgaagtgaaagcagcttgcaaagagtggctggatacttacggaatcggtgcattgaacggcgcagctaccgacaagctggtagaggctctggacggcatcgactgcccgaactgcaaggatattgtgaagaacaaagacttcctcgctaaaaaatcccagtgggtattcggtggcgacggttgggcttacgatatcggtttcggcggtgttgaccacgtacttgcttccggcaaggatatcaacatcatggtatacgataccgaggtttactccaacacaggcggacagtcctccaaggcgactccgaccggtgcagttgcacagttcgcagcaggcggtaaagatgtgaagaagaaagatcttgcttccatcgctatgagctacggctatgtatatgttgcccagatttccatgggtgctgactatgctcagacagttaaggcgatcgctgaggcagaggcatatccgggtccgtccttagtcattgcttatgctccgtgtatcaaccacggtatcaagaaaggtatggacaaggctcagaccgaggagaaactggcggtagagtgcggttactggcacaacttccgttacaatccggctgcagaggacaagaagttcactctggacagcaaggcaccgacaggtgactaccaggcattcttaaagggtgaggttcgttacgcatctctggctctgaagaatccggatagagccggcgcgctggatgcaaagaacgaggaagaggcaaaggctagatatcagtacctgaacaagctcgttactctgtatacaaacaactaatgaatcactgattcatgaatatatgacatacgatatataaaacgtatgactgcagaagctccgtcgaaagatggagcttttgttgtgtaataggaaattccttggaattccctattacacaacaagccacattctttttttaagggggaaaatcgtataatagagtgtttttgtggtatcctgtatatgaaaaggatctgaaaattatatgcttcaataaaacaggaaaataaaaaatatttcaggcaatgttgagagagataattcgatatagcatttagaaagcggggaaatcaggatggcacagggcaaagatttttatattccatttcaggatgggagcggcagaatccatggcatctgctgggagccggaggaaacaccgtgggcggtcattcaggtggcgcacggtatgatcgagcacattggcagatacgaagaatttgcacaggcgatgaaccgggcggggattgcggtcatcgggcacgatcatccgggacatggacggacagcaaaaccaggggaattgggcgagttcgcggagaaaaatggtgtccgccgcgtgaacggtgcgatggcgcaggtggcacgttttgcgaaacacaagtttcagggcattccgcatattcttctggggcacagcatgggttcgttttttggacgccgttttatcacgcattatggagaatggctggacggcgcaattttcatgggaaccggaagccagccggaaccacttttgtggctgggcggaaccgtcgtggcagcggcagcgtggctggaaggaagaaatggacgaaatgagcggctgcaccagctggttcttggaagctataaccgctattttgaaaaaggaaaaacggaacatcaatggctgtcgcgcgtgacggaggaggatgaaaaatacgaggcggatccatactgccagtttttatttaccgatggggcattcgtcgattttttccaggtcatgctggatttgaagcggaagagaggctttgatggaattccgaaaaatctgccgattctgctgatatcgggagaggaggacccggtcggagaaggcggacgcggtgtgcggcgcgcgatggaagatctgcaagaaaccggatgtaccaatgtggcgatgcaactttatccgggggcaaggcatgaactgtttcatgagatcaaccgagaagaggtatttggtgatattgtggactgggtaagcaaattataagtaatacttataacttacttaatgaaaaataatatacaaatgaaaaaacaatctttacagttcatatgcttttttttataattgagaatgttttggaaactgtgtaaaaaggtagttttaaattgggtacagggagagaaaatctatggaaaatgaaaagaaatttacgggacctgcctatgagtttgaggcgaagatgccgttaaaacaggcgattccgctgggactgcagcacgtgcttgcgatgtttgtcggtaacctgacaccgcttctgatcatcacaggcgcctgtggtatcacgggcggaaacgatctggcacagctgcagatcgagcttctgcagaatgcgatgttggtggcgggactgatcacgctgctgcagttattttcggttggtccggtcggcggcaaggttccgattatcatgggaaccagctctggtttcatcggtgtattcaacagcgtggcggctacgatgggcggcggtattttagcgtacggcgccattatgggtgcttcgatcatcggaggtctgttcgagagtgtgcttggatgcttcttaaagccgcttcgccgatttttcccatcggtcgtaacaggtacggtcgttctttcgattggtctgtcattgatcggggtcggcgtcaattccttcggaggcggcagctcggcgcaggactttggttccatggaaaatatgctgcttgctatttttgtcctgattgtgattctggcagtgaagcacggaacgaagggatatttaagttcttcctcgattctggtcggaattattgccggttatgctgtagcattcatcatgggtttggtgcttcctcacacgggcattgcagcggacggaaccgaatataccaaagcatgggtattaaactgggataaggtagcacaggcgagctggatcagcattccgccgatcgtcccggttaaaattgtctttgatatgcgcgcaattttgccggttcttatcatgtttattgtaaccgctgttgagacggtcggagatatttccggtgtcgttgagggcggtatggaccgtgaggcgaccgataaagagctttccggcggcgttatctgcgatggacttggttccagtattgcagcgctgttcggtgttcttccgaacacttcgttcagccagaacgtaggtctggttacgatgacaaaggtagtcaaccgcatggcacttgcaaccggcgcggtattcctgattctgtgcggtctgattccgaagctgggtgcgatcgtttcgatcatgccgcagtcggtactgggaggcgcagcggttatgatgttctcttcgatcgtagttagcggtattcagcttatcacgaaagagaagatgacttcacgcaacctgaccatcgtctctgttgcactgggtgttggttacggcatgggtgcacatgcaaccatcctttccaagatgccggaagcaattcagcttgtattcggcggatctggtatcgttccggcagctttcatggcgattatcctgaatgtgctgctgccgaaggatgaggcgtaagaaataggaagattagaaaaaggtcataggtacataaaaatataagatccatctataaaatatggaatgtatggctgaaagtgatacgtagattgataaaaagggactggcatcatgctgcatgtatgatgtcagtccttatagttttattcaattgttaccagattctccaggcgtttgagctcctccggcgtgtctacatccatcaattcctccggcgcttcggcagtcacatactggacaacgtccggatgctggcggagaacatggcttccgccagctttttccggcagatggagcagttcgtcaaaatatgcccggtcgaagagaatcgggcttccgacggtggttgagacggaaggttcgggagaagccgtcatttggacgctgcagagctgtacgatcggtgatttttctgcaattcctgaattctgaggcaattttgattccaaaatagaaaaatcagaatctgggaaaacagattttgagtgacctggtgatattctgcattcgagatagcgccggcatatccgttccagtgtccgtggacgcagaagcggctgatcgccgagtgcaaagagacagcctgataaatccgggtgcctttttaacatgtgtgtaagtcccaggcagagcgcctcgtttcgattgggaagtgtatgaatcagcaccggaatccccagggactgacagtaatcgtgaacctcccgggagcgcgtcacaacgagatgatcggcaaagagcggaacagaaccggtcacatccagaaccgagtggatgagcggagtaccgtggaacgaagccatgagcttgtttgagccgaaacgttttccaagaccggaggccatgatgatgcaggcgatccggacatcgtttgaattttgcaaacaagtgaaagagggcgtttgtgttccagaagagaaaaaaacagatttccgtctgcaaaaaaattcttcatataattgttgcccactctccgtacatgcatcccgatatgcctcatacttagctagaaactccctcgcctccgccgtcatctggctgcctccgccgccttttccgccggtggtgcggacggtcagtggaaatccaagcgtggcttcggcggagcggataatccgaagtgcttttgtatacgccatattcatggacagagcggcggagcggagcgagccggtttcatcgatggcatgaagaagctgacgaggaccttcgccaaagaaacgatggttttcgtcgttgcagaggtaggtacggatggatggtttcatagttttgtcaaattctcctaatcttttctggaaaaaggggcctcgttgtattttaaaaataacaacggaattataccatgttttatgctataataaaagatggataattttgttatttaagaaatagatgaaaaagaggaaaaacctatgatgacgattcgagaatataaacgggtagaaagcctggaggaagcctgggagctgaatcagaaaaaagcgaaccgggtgataggcggtatgatctggctgaagatgagccggggcaatgtaggaaccgcgattgatatttcagggctggggctggatcagatagaggagacagaggatgcgtttgagattggcgcgatggttaccctgcgccagctggaagaacatccgggattggcggcatacacagacggtgccatgcgcgagtcggtgcgccatatcgtcggcgtgcagcttcggaacctggcgacagtcggaggcagtatctatggcagatttggattttcagatgtcctgacgatgttcctggcgatggacaccgaagtggaactttacaaagctggacggatgccgttggtggaatttgcaaaacagatcggcggccgggacattttagtcaaattaattgtccataaagacaaagccgtatatcactaccagtccgtgcggaatacgcagactgattttccagtgctgacctgtgcagcggcgaaacgggcggatggagcatatcgttttagcatcggtgcgcgtccggggcgtgctgtgttgttcgaggcatcagcggagacaatacaggcgcttatagaggaaaagcaaaaggctgaaacaaaagcagatgcggatgccgataccagagaaagtcaggacaagacgcagaccgggaagaaagcagcctgtcttgcaaagtggatccgtgatcaggttcagacgtcttcaaatatgcgcggcagcgctgaataccggaaacatttaaccggtgttctgataaagcgggcggtgcgtgtgctggaagagtgctaaacgaaataggacaataaaatgatcgtataacagtatgaatattaggagattcacatatgatgcagataacgattactctaaatggaacgaagatttccccggagattgaaccggatacgcttctgattgatctggtacgcagtcagggctgttacagtgtcaagcgcggctgcgagacggcaaactgcggactctgtaccgtatttctggatgaaaaaccagtgctttcctgttccgtgctggcggcgcgggcggatggtcacagcgtgacgacgctggaaggactccaggaggaggcaaaagaatttggcgcattcattgccgatcagggagccgaacagtgcggcttctgtaatccgggctttatcatgaatgcgctggcgctgttccgggaaaaagagttcccggaggaagatgaaatccgcgaatatctggcaggaaacctgtgccgctgttccggttatgaaggacagcttcgcggcattctggcatttttagactggaagagagaaaaacagaaggaggcggcagaatgagagtagtcaatacttctgtacgaaaaaaagatgcgatgcagctggtaaccggacagccggtttacgtggatgatctggcgccgcaggactgcctgatcgtcaaacttctgcgttccccgtatgcgaatgcgatggtaaaaacgatcaacaccgcgatcgcaatgaaagttccgggcatcgaggcaatttatacctgggaggatgtgccgcaggatgcaaagcgctacacacaggcggggcagacatacccggaggcgagcccgtatgaccgtctcctgatcgaccgccatgtccgttttcagggcgatatcgtggcgattgtagcaggaaaagatgaaaaatgtgtcgataaagcactccgcctgatcaaggtacagtacgaagtcttagagccggttctggatttccatacgtcaaaggacaatccgatcctggttcacccagaggacaactgggagagtcttgctccggtcggcgcagacaacaagcgcaacctctgcgcgcacgatgagtgcggcaacggggatgtcgaggcggttttaaaggactgcgacatcgtgattgaccatgtataccacacaaagccgtgccagcagacgatgatggagacattccgtacctattgttcgatcgatacctacggaagattaaatattttaagttctacgcagatcgtgttccactgtcgcagaatcgtggcaaatgcgcttcatatcccgaagtcgatggtgcgcgtgagcaagccgagaatcggcggggggtttggtgcgaagcagacggcggtctgtgaagtgtatccggcattcgttacctggatgacgaaaaaaccgtcgaagctgatttatagccggatggagacacagacggcgtcttcgccgcgccatgagatggagatgcatgtgcgtctgggcgcgatgaaggacggcacgatccgcggcatcgatctttacacattgtccaataccggtgcttacggcgagcatggaccgacaaccgttggactgtcaggacacaaatcgatcccgttgtatggaagtgttgaagcattccgctttatcagcgatgttgtctatacgaatatcatgtcggcaggcgcgtaccgtggctatggtgcgacacagggacttttcgcgatcgagtcggcggtcaatgagctggcagaccagattcagatggatcgctttgagatccgcctgaaaaacatggttaaagagggcgatctgatgccagcatattataatcaggttaatacaagctgcgcactcgaccgttgtgtaaaaaaagtgcgtgagatgatcggctgggaagacaaatatccggtgcgtgacatgggcaatggcaaggtccgcagcgtcggcatgggtatggcgatgcagggatcggcaatcacggcgatggatgtcggaagtgcccgtctcaaagtcaacgacgaagggttctatacattgtcgcttggagcggcagatatgggaaccggctgtgacacgattctggcgcagattgcggcggaagtgctggaatgcccaatcgacgcgatcacggtgctgggcgcggacacggattcatccccgtatgactcaggttcttatgcatcgagtacgacctatctgaccggaaaagcgaccgaacggtgtgcgctgcgcctgcgtgagcagatctgtaaactgggtgcagagcttctgggcgtcccggcggatgcagtggaatttgacggaaaagaggtattcacaaccgaaaaagccggggatgagacgaagaagatcgctctggctgatatcgcaacggcgtccatgtacgggcatgaaattccgctggaggtaaccgagtcgagaaccgcccacatttccccgcctccgtttatggcaggtgcggttgagcttgagattgatatggagacaggcgaaaccagcgttattaattatgcggcagcggtagactgcggtacaccgatcaatccgaatctgtcccgcctgcaggttgagggcggtctgatgcagggaatcggcatggcgctgacggaaaatattacccgcaatgcacagggtggtgtgcgtgaaaattccctgatgcagtataagattccgacccggattgactatggacatttaaacgttgagtttgagagcagttatgagccatctggtccgttcggagcaaagtcgatcggcgagattgttatcaacacgccgcttccggcgattgcggatgcggtgtacaatgcagtcggaaaacgattctatgagcttccgatcacgccggagcagattgcacgcgcggcggcagagaagctgggagaagattttgtttaaagagatagattaaaaacaaaaagctgcagcagaatgttatatgttagcattttgcggcagcgttttgttttttgtgcgcacaatgtcaattaattagtgtcatagttctaagctgttttggcttgcattctgccgcaggtctatatataatgaaagagtgaatatctattttaggtctggtaaatctgatttcatgattcaattctatttattttaatttcaaatcaaattcaagtagaatctcttttatctcagttgagaagactccacctcttttgggtgatatcaatttcagagaagataagattgttataat

SEQ ID NO: 11008 - DNA, 37948 bp, Unknown
  gut microbiota DNA sequence
tacggcaaattcctgctgccaccacgttttcttacggcactttcggttccaaaagtgcctacccgtgaacagtaaccatttatcctctcccagaatcatttatcccgtcctccatcgataagtaaaaattccaggagccaattttaatactttttattatacaccataaccaaagaatatgtcttggcacattcgggcgtctcgcgcggtcgcttgcgacaacctgcatcttcacacgagtacgcatcattgttccaaggaatttcctattacaaaaaagccgctgcaaaacctacctctctaaacatagattctgcaggttcgcagcagcttttatttaattcttatttacaatcacgcgatacgccttgccgcagctgcccgcttcatgtgcagccacgcattcctcttccgaatcggattagaacggacgctcagctgtcggatcatccagggatacgtagaaactctgggttcctacctgtaccggattctctttgatgttctccagttcctcatacatatcggaaccaaggaagtatttcttcggctcgtacggtttctcgccctttgcgattgcatccagaccagcttttaccttctccggaagtgccgggatctcatggatacgtacgccgcaggcattgtagataccattcagaactgcacagtggccagatgcctggaatgcctcagaagcgcctgaagaaccgaacggaccatcagagatagcgccatcgatatgaatcaggttgatatcatccggaacatccttgatgtaggaagtaccagcgccaaacatgttcgcatgtttcttaacgtctgcgtagtcctctttcagggcaaagccgataccatgcatgataccgctgtatgcctgaccgttaacagcatcgatattaccgatacgtccaacgaagtcaacacaggtaaatttcagaacggtagtcttaccggtcttagtatcaacctcaacctctgccaggttcaggcagtatgtgaatgccggagtcgggtcgccgataccggtattcggatccagacggcacagacccggagttgtgttggtctcataacggccaagatacttggtctcgatgccttctgccttcatctcatcataggtacgaagggtaccatcttcttttctcatagctgccagaagcttgttcgctgcgatgatggttgcattaccatccatgtacagggaacggctggcaccagccataccggtatccggacaggtcttggtatcattctgaatcagctggatatcttccggtgtcagatgcatctctttcagagcttccagtgttactaccagagaaccggttgtagcaccctgacccattgcatgccatgtgtcgtatttgcggatcttgttgcccggcataagctcaagagcaacctcagcactatcgccgccgccctcagtaacgttgaagccgccccatgcgataccaacgcctcttctcttctccggtgtgtcagctgctttcgcatcagccactgctttctcatagattggacgcatagtatccatgatcttctccatcggatactgcggatatacatagctgttgatattcttatcgccttcacggcagatattcttataacggaactcgaacggatccatgcccagctcttctgccatcatatccatcagcggctcactgagtgtatatgcctgcggagaaccgtagcttctgtaagcagtaccaaatgcatggtttacgttggctacacgaaccagacctgctacgttcggtacattgtacgggaagaaggtgaaacgtgccggtttggtcataacgtcgtcaccgccccaggagtaagcgccgtgatccataccgatatcaaactcagcagccaggatcttgccttcgttatcacatgccagacggccattggagtatgccgggcagcgtttgccgctgaagtgctgatgctcttcataggacatggacagggataccggctcgccggtaactacggtacaagctgcacacagtgcgatatcgcctgcgttggtagaccatccaaagcttgcgccggtcgggttcatgatgatacggtatttatccttcggtacaccaaggcagttacccagacgtccgatagaggagtatacacactgggatttacactgaatggtcagcagaccatcatcgccccagtaagactgaagtacacaaccttcgatggaaagatgcggctcacgggaggaggagaagcttccttctactacgtgcggtgctttgtcgattaagtctcttacttcttctgcatcttccagacctgctccctttaataccggctgctcgcagaagatgttcggggtatcctcatggatacggatagcatccggcataactgcatccagatatgtcagatactctggcagctgttcgtattccatcgtaaccttagcggctgctgcacgagcctgacgatgtgtatgagctactaccatagcgataacatcaccgtaacgatagatcttctcatcctgaagaactttacgggatggtgtcataacagtacttctctcatggaactgaccctcagccatgatgttagttccgcctgctgcgatgaggtcttttgctgtgataaccttaacaacgcccggcatcttctcagcttcctcagtatggatagccagaatctttgcatgatgggtaaccttcggctgaacgatagctgcatataaaacgccctgcggcatcttaagagcctgatcatcgccgtagtcggtcagaccacaaaccttaccaagtgcatcctgacgaacaaccggttttccgtagtagttgccatcttccggattgtggaacttgatatcctcgatgctgcactcgccacgcataaccttagctgcagccataactgcatctacaatctgtttgtatccggtacaacggcatacgtttcttgtcttctggaaccagtcacgaacctcttcacgggtcggatccgggttctgctctaacagagcatatgcggaaacgatgaagcctggtacacagaaaccacactgtacagcaccgcagttcatccatgcaacctgtaacggatgcagatgctgcggagtaccgataccctcgatggtggtaatcttggaatactcttctacctggctgattttcttggtacaggaacggattacctgtccgttcagaatgatggaacatgaaccgcagacaccggttccacatccaaccttaacaccggtcagaccgatccggcgcagaacatctgacagtttatcgttttccggatcgcacataaacatacgatccacaccgttgatgttcaacatcatttttcttaatttcatgctgtttcgtcctccttctttaaaataaatagagccctgatgcttccgactatccttccgcatcatacccaatacttacgattccttagtcatccgcgttttccagcatctctgccagatccgccagatccacgccatagtcctccagaagttctctggccttgcggtaggtattctctaccacctggggacaccgaagtgccttgttggccatgttatctcctaaaatcgaatgacaatcacttcctccatagatttcaccatagttttcctgaaaccagtctgccagttccggtatcatctcgctgtatgccgcttccggctcaaagagcgccatcatcatcgccgcaccggtcaaagctccgcaggtcagcccgcttctgactcccagacagagtgctgcagatgccttcagaaggctcgggttctcctcgcccttaagggtaagtcccagcgaaacaagtgcctgactgcagcagcttcccgataaaagcagctggttcagttttttaatatccggctccatccgcacctcctgttcttagaaacacaaaaagaaaagcggcaccgcctctgaaaagacagtaccgcttaacgtatccgagtttgtatatacatctgcacctatagatatggatacacctatatctatacctatctgtcagcacatatataccctatctatacaagaagcctgacagcttcccgtatccatcgatgtaaagcgaatctctctttcttttcaaatgcggaaggcacttccatttccagatgtacccattggcctgactgcatacggtttcccgcttagcaatttcggctcgaaaaacagattgtttctattttggttttgatacctctatggtactctgcttttcatcgaaagtcaatctcatttttcataattttgaaattttttacatcgacaggacacttgttcgccccttattttacctcaatacgggattttcaacatgctattttacccttgtaatatctgtttacttacagaatttcagcataacttccgttcaaatgttgtattatttgaagatttgtattcttcctttctactatttgatcgagtattttttaaaaaaataacggttcacacgctttcataatttttcattttcatttgtttaaacttgaattttgttcacttggttttcacttatatgaaatttatatctttttgattcataatcaaacatgaatatctgttatttatccgctataaatcctcacatttttaagtatccttttttcattttctttttctgttttaaattttattctgcaaaccattattttttatttcagataacgcaagcatatttaagaacagaattcttgcacatacaaattccgcatcgaagatgtgatttgcataaattttttcttatttataatccgtacaaatcctactttctccccgcaaaatacgcctgcaggttctcccctacatgctccagatgccgctccatctcccggcgcgccagtgccccgtctccggcttcaatcgctgccagaaggctttcgtgttcattttcccggacttcgtcagagcggactgctgcctggttgaagcgcgcataagcgtcctggtcggtcaggatgagctttaacatccgcaagatagacgggctgcctgagagatgcgcgattttcagatggaacgccagatcttcctcgcttcccgcccttccatggcggattgcatagagatagtctgcctgcagatcttttaatttctgaagttccttcggctcaatccgctctgcacatgcctccgccgcatatccctccaggagtttccgcaccaaaagaatatcctccagcccgctttctgtctccatcgacgccgcctcgataagctcattcgccgccttcatcttctcccggcgtgaccgttcttcttccaaaaagcgttcgccctgcggcgtcaggatccgccccttgttctgcaccttgacaagcagccctgctttctccagatccagaagctcccgcccaatgctggcggacggaagatgcaggatctgcgccagctggagtgctcccgccggggtgtttaagtcctgcatggctgtcagtatttcaaagctgctgtttcgttttttccctgccatctttccacctcaatactctgtactatttctatgattgtatcatcatttccgattcgtgtaaatcatcccttactgtatcgtacggaattttcagttcagaaaattcccacctgtgaaccgttacaagcaggctgcagtttgacagcgaaaatgccataaaataacaaaaaaacgaaccgcagggtacattttctcactctgcggtccgctttgaatctaaaatcatttcagattttgatccatctgtttttatttattactttttatctacattgatgaacagataaggaagccctacggagtagtactggataccgcttacatccggattggtcataacggctacagactgtccgtaaatcgggaacagaacacactgatctgccagcgtcttctcacagccaactaaagcttcccaacgagcatcctggtcgagtgccagatcgcccttctttgcggactggatggttgcatcgtagtctgcatcggagaactgggagtagttggtggagctgccggttatccacatatccagatcagtcatcggatctgcgtagtccggaccccagcgggtaagaccgatatcatattcacctttctgcatgtattccagacgggctttcttcggaagtacctgaagttcgatggtcagacccggcagattgttctgccactcgctctgcaggaactgtgcaacagcctgtgcagaatcggtatcttcacacattaaggtaaaagataaggaatcttttccaagctcgccaagacctgtcttccacagctcttttgctgcctctacatcgtaggtccagctgtcgtatgcgctgcctgctgcctcgcggaaatcttcgcctttttcattggtagcaagaccctgcggtacgaagtaatccatcggtgtggaaccatctttcagaacacgggttgtgatcgcttctttgtcatacgattttgccagtgccttacggatatttacattgtcaagcccctctttcttcatgttcggggtcagataccagttgtaaccgtcacttctggtggagaatctcggatcatcctcatactgctctaccaggttaccgcttaaggttacaacgtccagatcgccattttcaaaagaaagggctgctgtctggctgtcggtaatgatcgagaactcaacaccgtccagtttgacatcggatgcaccgaagaactgatcattctttactaattctaccttcatggcagacggctcataggaagataccttgaacggaccatctgctaacagggtatctgcggaagttgcaaagttgccgccgcagctctctacaaatttctgatttaaaggcaggaagcatgcgccggatgccatcaggtaatcaaagatagcacacggggagcttaaagttacgactaatgtcttatcgtccgctgcctctacacccagttcctcaaccggtttttcacctgttgttacctcttctgcatttgcgatgcaggcggttgtgataaagaactggtaatcacttgcagttgccggatcggctactcgtctccatgcgtaaacgaaatcgtttgccgttaccggatcgccgttggaccattttgcgtcgtcacggatcttgaaggtcagggtcagaccatcctcggacttctcctcactctccgccacgccgtaaaccggagcacctgactcatccttggtcatcagacccatcataaactgggagataacaccactggatgtgtagtcgttggaaagtgccggatccagggagtctaccagagtgcttgcctgatagcgaagcaccttgccgccctcagccgagctgccgccctctgcgcttccagattcagccgctgctgtctctgttgtctgggtcgatccgccgcagcctgctaaaagtccagcaaacatagcagaagccagcgtccacgccattactttttttagcttcataatacttcctccttttttgtttttttaataaaaccaaaccattcccgtttcatgctgcatttcctggtcccggctgtctatcctcagttgtctgctggttcggctcatctataaaatcacccgctaaacaggtcattttatcacatttattatggttgattttgtgccggaatgcatcggctttcttttaaatctacacccatttttccaaatctgcatcggttccgcgcacaaaatgtgtgccctcaatctgatgcatcgtacctgcgccgtaatccaggccgctcgtcttataatcatagtgcagtgcaatccggctgcgctctaccaccgggttcgggttcgggatcgccgaaatcaggcttcgggtgtacggatgtaccggatgggagaaaatctcctccgtcgtgcccgtctccaaaaggtagcccagatgaagaacgccgatgcggtcggaaatatatttaaccatcgagaggtcgtgggcgatgaagaggtatgcaagccccgtctcgtcctggatgtccttcatcaggttgacaacctgcgcctgaatggacatatcgagcgccgagatacactcatcggcaatgatcagcttcgggttcatgacaagcgcccgggcgatgccgacacgctgccgctgaccaccggaaaactgatgcgggtaccggtttgcatgttccggcgccagacctaccttgtggaggatgtctgccaccatctcggtccgctctttctgggaatggtaccggtgatggatatccagcccctgtgcaatgatatccgctactttctggcgcggatttaaacatgccatcggatcctggaaaatcatctgcatatcacttctgagtctcgcctctgtctggcggctcatttttccggaaatatccatcccgtcaaaggtaatttgtcctgcggtcggatcgtagaggcggatcagcgcccgcccgatcgtcgtctttcccgatccggattcccccacaagaccataggtctcgcccggattgatataaaaactgacatcctcaaccgcttttacggtaaatttccggctgaccggaaagtactgcttgagtccttttacttccagaaggggctttttgtttgtctctgtcactgcactcatgcgattcccccctctttcttcattctctcaattcgatcccgaagctccggcggcatatcgaccttcggcgccttcggatgcagcagccatgtcgcggcgctgtgtgtctccgatatcttgaacatcggcggctccagacgactgtcaatgtttaacgcatatttattccgcggtgcaaacgcatcacccgttaccttgtgaagcaggtttggcgggctgcccgggattgtgtaaagacgttcgtcgtccgttcccagatctggcatcgcggagagaagtccccatgtgtacgggtggcacggatcgtagaatacatcctcgaccgtgccgctctcgacgatcttgcctgcatacatgacgttgacataatcggcaaccttcgcaacgacacccagatcgtgcgtgatatagataaccgacagctgccgttttttctgaatctcctgaatcagttccagaatcttcgactgaatcgtaacgtccagcgccgtcgtcggctcgtcgcagattaaaagctccggatcgcacgccagtgcgatcgcaatgacgattctctggcgcataccaccggagagctggtgcggatagtttttgattcgcttctccgcgtcggtgatgccgaccagcttcatcagctccagcgccttcttatatgcctcttccttcggtgtatgataatgccagatcatgccttccatgatctgtttcccaaccggcatcagcgggtttaaggaggtcatcggatcctggaagaccatcgcgatccgttttccgttgatatggcggcggatttcctcttttttcatctgcagaatttctctggtgacccgttcctccgggttacgataatatgaaaatgtgatctgtccgcggtcgatcgttccgttctttgccaggattcccatgatcgccttcgcagaaaccgatttaccggaaccggattccccaacgattgcaaccgtctcgccccggtttaccgtcaggttgacgccccggacggcattgaccactccggctgtcgtctcgaaggaaatgtccagattccgcactcgtaaaatttcttcttttttctccatgccatttcctcctacatatccttcatcttcggatccaatgcatcacgcagaccatccgccagcatgttaaagcacagcatcagaagtcccatgacaattaacgggaacacgatcatgtacggatggcttgtaaagttctgatatccactcgaaatcagggaacccagcgaagccatcggctccggcacccccaggccaataaaggctaagaatgcctcggtaaagatcgcatgcgggatcgagaacatcgtctgtgtgatcaaaggaccaaaaatatttggtaaaatctctttgaaaataatgcggaaactctttgctcccagcgtccgggaagcaagcacatattcctgctctttcagctttaagacctccgcgcgggcgattcggctcatgcccagccacccggaaaacatcagggcgaacgtgatagacataagccccggtttcataactaacaaaagcagggtaaccgtgatcaggtacggaatactgtttagtatctcgacgatacgctgcatgatcatatcgacttttccgccgaaatatccggatacaagtccatacgtcagaccaaacgcaaggtcgatgaataccgccagaaccgctacatagaggctgatccgcgttccgctccaggtcctggtccagaggtcgcgtcccagcgaatcggaaccaaaccagtagtaggtatcggtcagactgttgctctcataatagttgatttctttgcttccggtggatgtacggatcgtctcagaaccatctaagatacccatattttccagccccggcactctcggcgccatgttctggttggtaataatctgctgatcgtaggtaaactggttcatgtgaggtccgacaagcgccatcacaatcagaaacagaatacagacaaagctgaacattgcgcccttatttttcttaaaccgtgcaattgcctctttccagtagctctggcttgcaaagtttgtatcgacatgttcaaagccgtctttgtgctggaattcaaaatcatcgtccagaaattcgatctggcttaaatattcttcgggtgataacacatgctcccgaacggaagccgcatccccgcctgtcattttctcatctgtcttttcgtcactccgttttttcatgccatcacctctcaatccgatttcttcgccagacggattctcgggtcgataattccgtacaggacgtcaaccaccagcatcaggacaatgtacatgacactgtagataaatgccagcgaaatcgtcacgttgtaatcgttggactgaatcgctgcaatcattaaacttccgatgcccggaatcgagaagatcttctcgataaccagggaaccaatcatcagatcgacaaccagcggcgccagtaccgtaatgatcgggatcagcgcgtttcgaagtgcatggcgcaccagaagcgggcgtcccgtgattcccttgctctccgcaagcagcatgtagtcgctgtccagcacctccagaagggaggttctcgtaaatcgagccaccgtcgctaccgtaaacatcgacagcgccagcatcggcatgatcgacgatgcgaagaacttcttgccgtcaaacagaagcggcagccactgtgccttgtagccgatgaaatatgccataaccaatgcaaaaacataggacggaaggctgacgcccagaactgaaatcacagtacagatggtatcaagccagctatttttcttgagcgctgccagaatacctaaaatcagtccgactaccgcaccgaaggaaactgcctccagtccgattccaaagctgaccggcacacggttctttaacagaaccgagatggaggtatccttggagataacatacgatacaccaaaatcgccctgcagcaggttcttcacatacgtgaaaaactgtacgatcaacggtttgtccagtccatatttcttcgacatcatcgcaatctgatccgcggtcagcttttcatcgttgaacggagatcccggcatcagctgcagcagcataaaaagtaccaggatgatgatcagaagcgtgacaagagaaatcatgatacgttttccgatatatttcttcatgtccgtactcccttctttcttaatataatacgtctctctccttctcttatagcccggatattctttcaactccgaagtataaaataagacaaacggttttatctctctattcctgcatccacacgcgcatatgcgtcatgccgcggttgcaccatgcatagtacggaattgcctgcagggttaccacctcttccggtgccgcatcttctgcataaagcgccggattaaccgccgttttcttccggcagcccgtcacgcgcagcgccacgataccttccagcagatccgcctgatacggaagcacttcaatcttcgcctcccgcggaatccgcagtgtctgaagatcctctccgttgtccacgccctcaaaggtgtagatgattggtccgcgtctgagtgccacgcatccggcatccgcccgcaccatcgggtgtgcatagacccgctccggctccatctccatctcgcaggaaacagtatcaccaggctgccagcttctctggatcatccagtagcccttgtctgtcttgactgccccggaaaccggtatgccattgaccttcacctgcatctgatggcaccagcccggataacggactgccaaagtaaattctgctcccgcctgctccggttctaccgtgtaggtaacggagccgttccacggatatttcgatgtaagcgctatcttcacgccgcccgctgtttcaaaggtagccgttcccccgacaaacaggtgggaatagatcgtattttcacttgaagaccatacataggaaccaagtgaggtcatcagacgcgccaggttcggaggacagcatgcacagtcataccagccgatccgctccggtgtgtattcttcttcgccatatgcgttggtcggcatgcccggattggcttcaagctgattgatataaaagaatttcgttccgtctaactgcatgccgctgatggttccgttgtaaatctcccgctccagaatatctgcataccgcgcgtccggatccgcctccagcatctgtttcgcaaagaagcagacccccaccgccgcacacgtttccgcgtaagcggtatcattcggcaaatcataatccacggtaaatgcctcgccgtaataggtggaaccgattccacccgttatgtacatccgccggtctaccatgttgtcccacatcttccggcaggctgccatcagcgcctcatcatgattctgcgctgccaggtttgccgccgccgtcagaagatacatacaacggaccgcgtgtccttccaccgtatcctgctcacgcaccggcttgtggttctgcatgtaggacggcggctgcttgtccatgtaatcggtgcggctccagcttctagccgccgcttctttatggaagaactccggatcccgtccgcgctcatcgataaaatatgccgccagcttccggtatctctcttccccggttgcctgataaagccgcatcagcgccagctcgatctcctcatgtcccggaatgccggttactttgcctgcttcccgtccgaaccgccgatcgatatgatcgcacagcttgcagcagatatctaaaagcttcgtctttcccgtcgcctgatagtacgcgacgcctgcctccgtcatatgtccggcacagtacatctcatggcagtccgtcaggttctgccacttatgttccggctccgccgcaatgaaataggtatccaggtagccgtccggctgctgcgcccgcccgatcaggtcgatgatcgcatcggcacgcgcctccagctctggatttgcctcgacggtcagtgagtacgccaccgcctccagccatttcgccaggtcgctgtcctgaaatacacgcccgtaatacgttcctttctcatctcccgctgcaatgcggaagtttttaatcacatggctctttcggattccggacacctcatcgtgaagcacccgttcctgatacggaagcatcgtgtgaattaccacattctgtacccgcgaaaagaacgggtcgtctatctttacctgtttcaaatcaatgaaacttgtctccttttttatcattcacagaaaacctcctgatttattattcacttatccgtaagcgcctatcaataatctgaaaaagacttctttttttgtatgttttcttataagtataccattcaaatagtggaaaagcgatctaacacattttgcatattatagaaaagaatacgcgtatttttatagaacaaaatcagcctgatttcattctttctttttctctgatttttctttatttttcattcatcctctcttattttcccaagtatagtgttttatttctgcaaatataaggaattttccaaacagattcttgctgtttttctctctatttgatataataaaattgatattttaaatttgtttaacaacctgacaaagttgtcctgtttttcgtttgcttctctgcggttcagacaggattcctgttacgtggctgtttttatttaaacgggagtacatacatcatgaattttattaatttaaactgtccgccccttccttattttatcgtcggaggcggatgtgtttaccgccccggcgatatccatgagcgccggacgatccgaaatgtctttgatcttatctatgttcacagcggaactttatatctcgaacaggatccgttccgcgttgaactgaatgccgggcagttttttatcattacccccgataccccgcaccgcggcagccgcgtctgccaggaaaagaccacgacgagttgggtgcatttctataccaatggcaaatacagcctgtccgatgaattttacccggacaacgtaacccggcgcgccgcgccgaaattttactattcgccgcagaatttcattctctccctgccgcgcaccggcaccgtgccggaagccaaccgggagaagctggaaaagtatctgcagcggatgaacctggtttctttcagcaaatacacacagaaaaagagctttccgtcctccgtgcggacgccgtttgagctccagaatgatttcattgaatttctccaggttctctatgcgccgtactgctacagccgcgagaaggaaagcatcgcccggacgctgcgcgactatctggatgcccactacacggaggagatctccttaaacgatctggcgcgccagtattcctacagcccgtcccacttaatccgcagtttccaccaggcatacggcgccagcccgatgcaatacctgaaaaaactacgcattgagcacgcctcccagctcctcctacactccgatgccaccattcagtcggtcggtgagatggtaggactgcggatcccatcctattttatccgcgtattcaagcaggagagcggtgtcaccccggcgcagtaccggatgttttacgcagaagagaatggggggagtgagacgccttagaggcgattcaccgctgatgtttttttactatactatttgttttcgtaagaactgtcatgagcgtggcagttctttttttatacccaaaccagtgaatcgtttctaatgtatctataagttcctctacatcagctattgtttaagccagttatccgcacattgaaaatcctttatatttaaggtaacactgtgtgtatacaaaggaggaaattccgaattgaaaactgtcacgattaaacttcgcattcataaacttttggctgaaaagcgtctgacgaaataccgttttatcgccatgaccgggcttggctataaaaatgccagccgaattctggacaatgaaactgaatccatccgcttcagcaccatcgcccgcatctgctccgcactggactgtacgcccggcgatctatttgaagttcatgaggaagaagatccttacgatggaatgtattaaacattcggaaacaagtgatttcatgtgcggatcacacgccaaaaaaagagctgtcaaccgacggtttgcaccggcttttgtgacagctctttttagcgatcctattttcaagtaaaaagcattcttacgcggttactgcagcaatttctgtaactccctctctgtaaacctgaactttcctattttccctgcttccgcagctttttaagctccagaattctctggttccggcttccgcgaaactgcagggtcagatccttctccgcttccacgaactctccgtccaccaacacatctacataggacagcatctcgtctgtcacctctgtatggacaacgccgccggctgccagatcccgatcccagagatagccgctgtagcaccagatatccttctccggatacgtctcgcgcaccttccggagtaaatgtaccagttccatctggttttccggctcaaacggttctccgccgagcagcgtaaagccctgtatatatcccggctccaatgccgctaaaatctctttctccgtctcttctgtatataactgtccatatcgaaaatcccacgtctccgcattgaaacagcccttgcagtgatggcggcagcccgacacaaacaagctgacgcgcacgcccggaccgttggcaatatcatgctttttaatggttccgtaatacatctcttcctcccctagaccaatgtactctcggagtctttctacactcgcttttgcggctgattttccgccagccgtgcccgaatttcatcaacgtacgcaccgcgtacgtctcagaaatttggacacaactgacaaaaaatcatctcacaaaatcaagcacagaaagattccgagagtacattaccagaaaaccggaaccgctgccgggcagtgattccgattttccgtctcattttccatttattataatcgtccgacgcctggcaagccaaagccttcaccacatcctacagatgcagcacccgatcccggatctcctgggtacgtccctggttccagaactgggttccgatgtagccgcaggtacgacgtgcgacaaagagcttgttctggtcgcggttgccgcagttcgggcactcccacaccagcttgccagcctcatcctcaacaatcttgatctcgccgtcatagccacacttctcacagaaatcactcttggtgttcagctccgcatacataatgttattgtagataaactgcatcacagagagaactgccggaatattagtctgcatattcggcacctcgatgtagctgatcgcaccgcccggggagagcttctggaactctgcctcaaatttcagcttactgaacgcgtcaatcttctcggatacgtgtacatggtagctattcgtgatatagttcttatccgtaacgcccggaatgataccgaagcgcttctgcaggcattttgcaaatttataagtcgtagactccatcggcgtgccgtatacagaatagctgatgttctccgcctctctccactctttgcatttatcattcagacgctgcataactttcagtgcaaatggcttcgcctccggatcggtgtgggattttcctaacatccgcatacacatctcatacagacctgcatatcccagagaaatcgtagaatagccgttgtacaggagtttgtcgatcgtctcaccctttttcaggcgggcaagcgcaccattctgccacagaatcggcgccacatcggagatcgtgccgagcagcctctcatgacggcagcggagcgcacggtggcacagctccagtctctcatcgagaatctgccagaagcggtccatatctccctccgaagaacaagccacatcgaccaggttaatcgtgacaacaccctggttgaaacgtccatagaatttatgcttgccgttcgacagcatctgggaatcttctaccgtcaggaaagaacggcagcccatgcacgggtaaacctcgcccttctttaattccttcataatcttagcggaaatgtagtccggaaccatccgtttcgcggtacatttcgctgccagctcagtcaggtgccaatatttcgaaccttctgtaatattgtcctcatccagcacatagataagtttcgggaacgccggtgtgatccagacgcccttttcattcttgacgccctgcattctctgcagcatcacttcctcgatgatcatcgcaaggtcatctctggtccgtccctccggaacctcgtccagatacataaataccgtgacaaacggagcctgtccgttacaggtcatcagggtgataagctggtactggatcgtctggatgccgctcttaacctcctcgcgcagacggcgttcggtcacgcggttgatgatatcctcatccagtgcctcgccgcactcggtgcgctctgcaatcacgttcttgcgcagcttctgacggctgatgtccacaaacggtgccagatgcgccagagtaaaggactgtccgccatactggttgctggctacctgcgccacgatctgggtggtcacgttgcaggccgtaaagaaactgtgcggcttctcgatcatcgtctcactgatcacagtgccattctgcagcatatcctccagattgatcaggtcgcagttgtgctccttctgtgcaaaatagtcggtatcatggaaatggatgatgccttcctcatgcgcgcggacgatctcctccggcagcagcacacgcttggataagtccttgctgacctcgcccgccatgtagtcacgctgggtcgagttgatgaccgggttcttgttggagttttcctgattcacttcttcattaatatgatccaaaagtgccaggatgccgttatcggtcgtgttggacttgcgttttaactccctgcggtagcggtagcgcacatatttctgtgcaacctcataaccacgcatctccataatgctggtctctaccatatcctggatgtcttccacattcaccgcgtgcggcatctcctgcacctgctcggcgatcgtatctgcaatcgcttcaatctggtacgggttcatctggtgaatacgctccacattgccgttcgctttcgtgatcgcatttacgatcttcgcccggtcaaaatgtacttcttctccatttcgtttgattacattggttgttactgtgtcttccatccctgttccctctccttacccttaagcccgttttatgacttgtcttctataatctataaattgactcgccggttcctgtttctgtgatttctctttctacttttatggcatacatcgaacatccatctgtatccatttcccgtcccccagcttactctcatttcctcattcatgagagcagcgccttcttctgacaggctatttttcatgtccggatgccttcactgacaggattcttttccgttccgacttgtcttacgattggctttatttttgatttgtatttaggtaatttttagaattacacacaaaatattgaactcattttctttcataacacaatatatagtgtgttcgtcgtgacgtatttaagcatacaccaattagattaaaaatggaagaggattcccctatattttttcgaatcagaattttgcacaaaaatcattttctccctttacaaacacccaaatctgtgatcccctttccacgacgttctttccagacttatccaccgtcccatgtgcaaaacccacctcgtcatttctcccatggctgcatcccatataccctctgagtctccttcgcccatacccttatctgttttaaaaataccgaaaataatgctttttaaaatatttttaaaaatatttaaaaaactgttgacattttattctggatggagtagaataacacatgtcttacggatgaggcatccgcaagaaaacaaaataagcgcctttagctcagttggtagagcagtagactcttaatctatttgtccagggttcgagtccctgaaggcgcactatcaagtgcttgtttcgcagaccgagagctgtggggcaggcactttgtgcgttagcaatgaggcgtgcaaagaaaaaaagagatggcggatgacgcgttgtgcttgcacataagcagcatccgttatctctttttttctttatagggcgaatgcccgacagcgaggaaaagcgccagctttttcgagctgcgcacgccgggactcaaagacgcaaccttttttaccccgccccacgccggactccaaagacgcagcttttacagcgcccgcccaatcgccttctccacttccttctttgaactagcgccgacttccttgctgaacacttccccattccggaaaataatcatcgtcgggatcgacataaccttatactggactgcaatatccgggttctcatcgacattcagctttccgatcttcacttttccctcatactcgcccgccagctgcccgatcaccggcgccatcatctggcacggaccgcaccagtctgcataaaaatcaaccagtaccggaatctccgatttcagtacctcctcctcaaaattcgcggtcgtaaacttcatttccatcactcatttcctcctttcgttctatccatacaggcagtcaacagaagtgccctgtttctctttacgacggcttctttttaccgcctcccagtgcctttgctgcctcttccatcgattttttccattttaacgcctgtttattcagttctaccttatcgctggtcgcctgaatgagtttccgtgtaagctgctttttaatatccattcctgatttctggcaaacgctctgcgcacctcgttaccattcatgtgagtccaggtttctcacaaaaagcaccgccgcgcatccagccatccttctttatattatagtaaatatatgcagcttttattttctttattccggctctgccagctcagataaccgttaaatacggcaaattcctgctaccaccacgttttcttacggcactttcggttccaaaagtgcctacccgtgcccagtaacgattttcctaccgcactgccaccagcttgcagatcggcttgccctgcgccgagaactttgcctcgtactcggtcatgacgttgccctctgccatctcgctgtggtgcaggtcacgggtatattctgtgatgcgccagcccgcctccgggatggcttccagggaataggaaaataaatcctggttgtccgtcttgaactcgactcttccatccttctggagaacctgatcgtacactgccataaatggcggcgaggtcagtctccgtctcgcatggcggtccttcggccacggatccgaaaaattcaaataaatccgctctacttcccccggtccaaaaatctctgccagttctctggcatcctcacataagaaatagatattggacagttccatctgttctctcttgcggatcgcctttaaaagaaccgtcgaatatttctcaatacccacaaaattcacatccgggttgcgggacgcctgctccaaaataaactgacctttacccatacccacctcgatgcggatcggatggtcatttccaaaaatctgctgccaggttcccttcttctccttcgccccatgaaccacatgcgggttttcttctatcatctgctctgcgcccggtatatggcgtaatctcatcttcgttcctcctgctgtctacaatctgcgccgtcccggatggactttcttccgtaccgtatcattccgttgagacgccccggcttacccgccggatctatccttatcttaccattgaagcccccatttcgcaagctaaggtgctctattttcacaccattttacgatccccgtgtactgttcacgcatacgtgcccagtaacggaattcgccgtggcttcgcatttaaatacggcaaattcctgctgcccccacgttttcttgcggcactttcggttccaaaaatgcctgcccataaacagcctcccctctccttcatgccgtcctttctaatccgtccgactttgtgtccttttcttacgaatttcataacttttccaatttttatcattttatagatgaataattcaagcgattatattataataattttagaacaaaaccaaacatacggtcacgaaatgactgccgtcttttcacccgttcgccggacatccaaaagtcagtatccgtccgggaacagccgccggcacgccggtttcggacctgcatcatatacacaggaggatatgcctatgggaacaacagctaacacaggtcagagcacctgggaacagatccacggcggggtccgcgagaccgagcgcctgatcggacagaagaattataacctggcgatggtgaaagcccgccagacccttgaatacatggtcaaatgcctctgcgagcggtatggcattctggaaaccggtcttctggagatgatcgacgccctctacagcgccggaaaaatcagcaagaccacctgcgaacattaccacaagatccgcacgatcggcaacaaggcgatccatgagggagacaacagcgcctacaacgccaatcaggcgcatcaccttctgtcgcaggaggtctacaccttcgcaaatgactacaatgacacaaaaaaatccacccgggcttcccgaagtgcagctccaacccccgcttcttcccgccttcgcgggaacagccgacattcctctgccagctctggaaacggaaaacctgccggcacacgttccggcagctccgagggacgccgtccgcgcgcctatgcaggcggtccgtcttttgaatttcgaagcattattaaaccagtgcttctgattattattatcatcctgctgcttttgatcatcaagatgatacgccctgcgacggatgccaaaccggattctactgcagccgtcagcaccgaatcgctggctccagaaaccgaggcagagaccgttgccgcagaatcgaccgtttaccggaccaccgacacagtcaatgtccgtccggaaccatccaccgacaccgacaggattggcgttctagcaccagataccgatgtggaatatctccgtgattacgacgaaaaatgggcagtaatcagctacaacggacaggaagcctacgtttccagagactttatccggcaggtttcgcagtaatcagccaaaaaaggaaccatacatgcagtgattcttctccctgacatacatggttccttttcattttctttgtacaatggttcatcactttcgcaattatactttccgcaatgaatccctgaatttactcaactcaaattttacttcaaatcccgaattttctccgccagcggcacaatctcctccagcgaatttaactcatagtccgccagactccggtcaaaggaaaaacggttatcgatgagcgccgccactgtcattcccgcgcagtgccccgccgtgatgccgaccgtcgaatcctcaatcacaaggcactcctccggctgcaggcccatctgctccgccgtatagaggtaaaccgccggatccggcttgctgcgcttgaacgtactcgcactgatcatccgctccagacgggacgccacgccattttcctttaaaatgcgctccacctgctcaatattcgtcgcggatgcgaccgccagccggaagccctctgttttcaggcgatccatcacatccagaatctccgggcggaagatcgagagataatcaatcgaattaaaaatgtccgtccagcgccccagatactcgtcatgcagctcctgccaggtctgaccattgtggatcgccttctccacaaccatccagcagtcctgcttcgtcgtccccaccgtcccgtgcagactctccagagtcacctccggatttttcgtttttgcatattcatacagataattcagataaattccttcactgtcaatgatgaccccatccatatcaaaaatgactgcctttatcatattcgtatcctctctctttctgctccagattataacatcttcccccagtatacaggaatcccccgccagctgacaagcccctattccaccctcccgccattctttcgaaaaatttattactgttcacgcatcgtgcccagtaacggaatttgccgtggcttcgcattcaaatacggcaaactcctgctgccaccatgttttcttacggcactttcgcttccaaaagtgcctacccgtaaacagtaacaaaaatttcacatatttttccatttcgcgccttttcatgcttccccgaaactgttatactggataacgaaacggaaactttaacatacagagccgtttcaaggaaaatagaacaaacgacctctttacaaatttatcacataaaatgaaaggctgcagctgtaccacaacctgacagccgcgaaaggttttatatgacacagaaaaaaacatctttaagctggcttctggggcttatctgtgctttcagtctgatgatcgtgtttctgattacctcggtggaagccgtcgcctactggacgccgcattattatgaaaatgaatatacccgctaccaggttgccgatgatgtccatatggagatggacgacctgctttacgtgacggacgagatgatggcatatctgcgcggcagccgcgacgatctgaacattgacaccgtcgtagacgggacgccgcgcgaatttttcaacgccagggagaaggcgcacatggcggatgtccgcaacctctttctcggaggactggcgctgcgccgcctctgcctgtttctggcagcggcatcggttgcactgctggcacttttcaaggttccgttaaaacacctgctgccacggatgctctgcgccgggacggttttatttttgggcgtgaccgccctgcttgccgggatcatttccactgattttacgaaatattttattattttccacaaaatcttctttaccaatgatctctggcagctcgatccgcggaccgatcttctgatcaacatcgtgccggaaccatttttcatggacaccgccgcccggatcggcatcaccttctgcctgatgaccggcgccctgttttttctctgccttgcatgtatcctgcgggaacaccgcaggggcaaatcaggggcagaaaattccggaaattccggaggcggcagctctccaggtagttccagccacccggctgctccggatttgaagacgaaaatagctggcagcacaggcagcaagttgtccttgtttttaattggtacacttttgctgtccctgctcgccgccccgatgcaggcgcttgcctccaccgactggccagcggacatttccattgactccgatgccgggatcgtcatggacgccaacaccggagtcgttttatatggaaaaaacatccatgaaacctactctcccgccagtatcacgaaggttctgacctccctcatcgttctggagcactgttccctcgatgagacagtcaccttttccgagagcgcggtctacaacgtggagtccaacagcagcagcgccggatacgatacaggcgatactgccagcgtcaaggactgcctctacgccctgcttttaaaatcagccaatgaggctgccaacgccctcgccgagcacgttgctggctccgctgatgcatttgctgttttgatgaatgaaaaagccgccgagcttgggtgccaggattcgcattttgcaaatccgagcggtctgaataacgaggaacactatgtcagcgcctacgacatggcgctcatcacgcgggcggcatttgaaaatcctacgtttgccaagatcgtcgagacaacctactataaactgccgccgaaccagaaaaatcccgagggacagggcatctccccgggcaataagctggtcaaaaagaactggccgcagtactaccgtccggacgtcctcggcggcaaaaccggttatacctccatcgccctcaacacactggtcaatggtgccagacagggcgatacgacactgattaccgtcatcctgcacagcaacaacacgcagtatgaggataccagccggctgctcgactttggatttaacaatttccagtcggtcaaaattgcagattatgatcaaactttttcaaatatcggaaaagatttaaaaattgcagatgtgtctaccgccgggggcgaatccctgtccatcgacccagatagccgcgtggtacttccaaaaacagcggatttctcggagacaacgacctccttcgactatgagatcccggctggcgcaccggacggcacgatcgcctgtgtcacttattcgctcggcgatcacaaggttggccaggcatatctgaccctcaccgacagcagccagacagcggcagatattcctgaaaagcttgtatcccaggcggcaacagctgccgcgcaggacaactccgacactgccctctcaaacggctcctcggaggccttgccgctctccaatccgcccgaatcggctgctaatcaggaaaatagttccaccggtaaatcctttggacagctgtttcatatttccgtccgcgttccaccggcattcatcgccgcactgaccgccattcttgtcgtgatcggcgcggtcaccgccggcatccgttttctccagatgcagcgccgccaggaggaggacgccctcgcagaacgccgcagacggcgcgcggaacgtctgcgcgacagcggaatgtccgaagcagatttcgacctgatgatgcaggaccgccgaacggcgctggcgaaaaaaaggaagaaacgatcgcataaaatcccataactgacacaaaaagagttaccagatgtggaaattctcttcttttaccttactctaaacaggcaggagaaacatttccatatccagtaactcttttctatgaatttttccttttctctaattcctatttcatacgctccatccgcccggctgccttcaccctactcggctgcttctgccgcctttccagacttcttcgccttgttgcgttccgcgcgcttcttcttcgtttcctccttcttctgctccacgtaggccgctccctcttcaccgaccagcttcgtcgtcttaacagcaaagaacgagccgtcctccgacttcttcatccggatctttcccttcatataaccgtgctccgggcagaccgccagacagaagtaaaatttctggtttgaggaaaaccagcggatctttttccgcaaggtccggcggcatttgtaacaaaccatctccgccacacgccgttcctccaaaatctcttccttcgtctcatgctcacgcgacacaaatttcgcatattctggaaattccagatagatctcttcctcctccgtcagcggcggctggtaataatccactgaaacatactccatcatgctgtaaaagtccatctcactcatgacacgccccgtgtagtacgcatcatccagcgcccggtggaacgggcggtcttccgtgaggtgcaattcctctaccacggtatctaacgactccttttgcttggtgccgtggatcagggcatagattttctgcaaatcataatagagaagcggcgatggaaactgcagctccatcccgtgatataccatattccgctgcaattcggtcagatccatcgagccccacgtacagaaccggtaatcatccccgcaccattctaaaaattcggtcatcgcacgcacaaaatcctcgccttctgtgtcaagctgctcgatcgacatatgcgtcacttctgatatcttataatgcatctgccggtacacccgcgggcggatcagacggcgaaattccgaaatgatttgaagatttttatttaattttaccgcgcctatctcaataatctcaaatggaagccggttcatcgagccttccttgcccgccggactctggttccattccagatccaatactataaactgtcccataattctcgtctctttgtaacggttccgttttctccgcgttacctcttacttttctttcttcacgttgtcactgtccataactttaccacaaatctgtgtataagtccatatcaggttaccgggcacacatgtggggacagtaatctttttgttactatacacgggtaggcacttttggaaccgaaagtgccgtaagaaaacgtggtggcagcaggaatttgccgtatttaaatgcgaagccacggcaaattccgttactggacacgtatgcgtgtacagtaacatattttttacatagaaccactggcagagtgcttccatctttgctatacttcatgatagaaagaagaagcatttcttttatcagaatgctttcttctaaactttattatgcaccttgggaggggctgcttatggatttaatacaacaatttatcgatacatacaagatgaaatggacgttctacgacgcagccgggcggctcgcggcagagaaactccagctcgccctgcaaaatgccggtatccgggcgatcgtgacctctcgcgccaagaatcccgccagactccgcacaaaagtgcagcggcgcaattccagacgtgaagaaccataccagacaatcgaggaaatctacgacgacattgccgatctgtccggtgtacgcgtctccctgtatttccccggtgaccgcggcaaggtagatgcgatcatctcggagcttttcaacatcctggaatttaaacagttcccggaacagtcgaaacccccgacttaccacaaacggttttccggctattgggcgaaccattaccgcgcgcggatgcgcgatgaaattttgaatgaatcacagaaaaaatacgaatcggcgcgcatcgagatccaggtggcgtccctgatcatgcacgcctggtccgaggttgaacatgatctgatttacaagccaatgcagggaactttatccgaggaagagctgtcgatcttagatgagttaaatggtctggtccttgccggcgagatcgcgctggaacgcctacaggcagccggaaatgagcggctccgtagccgcaatgccgcgtttggaagccagtacgagctggcgtcctatctctataatttcctgagcagccatctcaaaaccgaggacatcgagcttcgaatgggaaatattgccctgctctaccggcttttgcagcgtttacagctcaccggtctcaaagatattaccccgattctgcggtctgtcaaatttgaaaaggatcggcgcaccatttcccagcagatcatcgatcagattatctccggcaatgaaaagcgctaccagtgctaccaggagctgcggacggaaccggagaccgcctcaccggaaaccctgcaggcaatcaaccagtttctcgaggagtgggtacccttagagcgcttgctcaacaagactgcacggcgcacctcgacgcgttcccgcggtgccttcaatatcaatacactcaagcggatggatctctttgacaaagaaatgatcaaccagattgtccagctccgcaagctgcggaatgtcctgatccacgacatcgagctgccggaccaggcacagattctccgctgtacggaggaagcgaaagcacttctggcacaactgaccggacagcatgacgcaatggcagacggagaaaacggtgagaaaaacagccatgcagaaaacacataggacacaaacgcgccaatcaccaaaaatgcaaaacaccagatagcaaaaaaacacaacgataaaagccatccagtttttagccggatggcttctttattttacatatttgattcttttcagaaccgcttccaacatcgaaacacgatgttttacattctaattttgcattctaaattcagaagcttcttaaatcagaaatcaacctctgtatcatagaagcagcaggtcagaagtttcgccatctgctccggattgatcgaacgcgggttggaaccggtacatgcatcgccaactgccagctctgccacggttgccagtttgtcattgaattctttctcgtcaatgattccgccctcatagagcttaatgctcggagcgatatttaactgcttgttcatctctttgatctcggcgatcagagcgtcaaccagagcctcgtcgctgtctccctgtaaaccgatgaacttcgcgatatctgcataacgggaagctgcttctggttccttggagttaaatttaataaccttcggaagatacatcgcattcgctgcaccgtgaacgatatgtccgccggagtaagctgcacctgtcttgtgtgccatggaatggacgataccaagcagtgcattggagaatgccatacctgccaggcattgtgcgttgtgcatacgtgctctcgcttctttgtcgccattgtaagatttaaccagataggtatgaatcatcttgattgcgtgaagtgccagcgggtcggtgtaatcacaatgaagtgtggatacatacgcctcgatcgcatgggtcatcgcatccataccggtgtttgcggtcagcttctgcggcatggtctcagccagctccggatccacgatcgctacatctggtgtgatattgaaatctgctaacggatatttgatacccttatgataatcggtaataacgctgaatgccgtaacctcagttgctgtaccagaagtagacggaatcgcgcagaattttgcttttgtacgcagtgtcgggaaattgaacggagtgatcagatcctcaaacttggtatctggatactcgtagaatgcccacatcgctttcgctgcatcaattggagaaccaccgccgatcgctacgatccagtccggaccaaattcctgcataagctttgcgcccttcataacggtctcaacgctcggatctggctctactccctcaaacagagccacttccatgccagcttctttcagataatcttctactttctgaaggaaaccgaagcgtttcatggaaccaccgccaacgacaacgactgcctttttgcctttcagatttttcagttccgctaaagatccttctccatgatagagatccctcggtaatgtaaatctagccatattgatactacctcctgttaattttttaaccaccctatgtccagattatagcacgcattctggtggatttcaactgttttaactattcacttttgatatatttgtgtatttttcaaaaattttacattttattactttgatttccatagaaactgcgttcttcgcttgtcaatcatccaacaaactgcttcttttctccattttgaaccgttccttttctgtctgcataatccccctgtgcctttgcctctatcataaagaattcctgcttccaccatgttttcttacggcactttcggttccaaaagtgcctacccgtaaacagtaacggaatttctccactcctatttccatgcaaaatcttatcttgacatccctgtttttccgtactataacaagggcaagcataagccgcttgtgcgcttatgcttgtttcatagcaccgtacagattatatctgtacaagactgacacggaggacattataatatgaaacaaaactcacgaatccaactggaaaacaccttgatcggcgcacttggcgttctttcccttgtactttttattctcagcttcctgccagggctgggactggcaaaccgcgtcggtatccttctggaaatggggcacatggtacagcgtgccttttctgtcgtgctcttcatcctgaccttccagctttggaaacggaagcgcgccgcctggaacattgctgttctcctgctgtttttaagctttttacgcgggctgacagcactttcttcgcctttgtatcttccgttccacctggcagaagccgtattatttctgcttctcctgtgttttcggaaggacttctgctgcccgtctgaccggcgcagcctcggacgctctctcctgtttctgctgctggcactggcaggcatcatcgtcaatgccggtatcagctatcatttttcggtaaaacccctgggagaaacctcacttgactcactgatggatagtctcattcagggtactgccatgattttcggcatgggaaatccgagcaatgtttcacgtgaaacacatgtagtcgaactggttacattctggttcagctggggctgcatcctcgcctccattctgtatgcggtccgcccatggctgctgcatccagtcagccatgcttcggatttgatgcatgcccgcaccctcgtcaacctgtacagccagaatcccagcgcttacctgacgctggaggatgacaagctcctatatttcggtcagaaggtagacggcgtcatcccctacggagtcgtcggcagcaccatcgtcatcaacggcgatcccatctgcgcggacagcgattttccagttctcctggcagaatttaaagaattttgccagcgcagcgctcacaacttgttttttatcagcgtcactgaccattttctggaagaatataaaaagcagggctttggatgggtcaaaaacggggaggaagcccgtttccaccttgcggactatgaaatctctggcaagaaaggcgccaagatgcgtatgaacatcaaccacgcccggaaagccggggtcgtcgtccatgaatactgcccgctgaaacagcgggatgcacagattgaggcagatctgaaccgcatcacgaacgaatggctgcaacagaaaaagagttcgatgctgactttcgttatgggaactgtcgggctggaaaatccgatggacaagcgttatttctacgccaccgacgccgacggaaaaatcgtggcattcatcgtgtttgtcccatttctcggcaaaagaggctacatggcggacgtcacccgccacggaaccggcgcaccgagcggcgtgatggagacgattctttacgacgcatttcaggttttcaaagacgagggcattgagtatggcagcctcggtgttgccccgctcgctggcttggaaaatgacagctctaatccggtcgaaaagctgctctgcttcgcttacaaccacctgaatgactgttatggattccgcgatctctaccgtgccaaggaaaaatacagcccgaccgaatgggttccttcttattatatttacctgccgaagattccaacaccagacatgttttatgcccttgtgacgattcagaatccgcatcagatccgcgaggcagcggaggatctggtaaaaggatgcgcgcagcgactgagaaacaagaggacttccccgacacatcaaagtaaaccatctcgccaggtaagttggactgcttcttccagcacgaagcagcccgacacaagaaagcagacagatgcagataaaaaggcagactaaacttagcttttatcatgctggatgcagcctgataaatttcatttttttaccagaaaagaggcgctcttatgatgaaacattccggttatcttaccacctccggcgcagaaatctactatgaacagtacggcagcggcacaccgctccttatcctgcatggaaacagccagtcccttgccgtcttttacccatttctgcgcacgtttctgcccgattttcaggtgattctgatggacagccggggacatgggcgttcccggctgtctgtccacacagcgctccacgggttctctacagaggatatggcagacgacgttattgccctgcttaaccacttacatctttcctccgtccacctgctggggttcagcgatggtgccaatatcggactggagatcgcatgcaaatacccggagcggctgaaaacgctcatctgtatcagcgccaatgcctcaccggacgggctgctcacgccgctgcaccttgccgcccaaatgctgcacagcattttaaatcttctggggaatctcctgctgcctgttttaaaatgcagcttctcttctgcctctgcatcctccgggtcctccgcggtctctgcactgtccaccccgaaagtttccctgccatttcagaagaatttctctgtttccgccacatccgcagtttgtgccgacaaagaaaggcaatgccatttcgggtcaattttcccccggattccggcagaacaaaaaaagaagcctgactttcttacccggctgacgcaccgcgtcctccgccgtcgaaatctgacttctcttttacttcactcgccccgtttaagtgcccggaaattgcaaaccatctccgttcctgtgctgctgatcgccggaacccgggatctcattaagccctcacactcccgctggttagcaaggcagattccaaccagtcggcttcttttaatgaccggggggcggcatacttccatattccggacaccggcgccttatctgcgcgcaattctggcatttctgcgccgcagctaaagtctcctcactcttcctgctgctccgctttccttgctccattcacttttaggttctatacttttcctcttcaagcatatctaccggacagcatctgcagctgccgtgttcgagcactcaaagcacctctcagcacaacttccgcccattatccacttcttccttctggcagatctcatccagcacccagtttccatcttccagaacaaacttccaatattcgaagaaatcttccattttccgggaacccttcaaaagttctccggtttcttcgtgatacacatagtcgatcatctttccatggatcaaataccagatatagtcgcggtcgtcgccgtcctcattctccgcttccaccaaaatcgcatccagaagctggatcccttccatgacaaacacctcatggcgcatcctgctccactcaaatttcgtctgaaactcctgctgcatcttctggctcaggtaaggatgccctttttccagatcacgatcccgccagcattcctgaatccggtaatatgattcccgcacccgctcctgtatctcactccgatcccaatgatcttctccgatggaaaattctttcaatttttcacgggctgccgcctgtttcttttttgcccggtgcaggtatgtaatggttccggcacttcccagaatcacaaaggttcccgtaagcaaaagcgcctgaaacgcacccgcccgtccgccttgtccccggctgctgcttgtatgatgatgggaagaactacctccgccacctccgccgcctccgccgccggaagcacctcccgctctggcaaaggcggtaaaagatccaagaaccatcatggctgctgtcaggcaaagcaggcggacgaacgttttccggcacaggcgacctttctttcccaatctggaacccaccctgattccgccgttttcattttctcccctgcttctccccgttgctttcacatctctcatatgaattctcctaaaatctcccacacctactcgtgctgctgatcctccggctccctgcagacatccacccagcctttcgctccggacactttttccaactctgggatcgtgagacgtaccgcactgtggtcgtctcctgctgccggataaaccgtctcaaaacgcttcagactctcatccagatacacttcaattccatccttgataccaaacgggcagaccccacccggcgcatgaccggtaacctcctccacctgctcaaacgggatcatctttgctttcacgtgaaacgtatctttatatttccggttatccactttcgcagtaccttctgtcaaaatcaataccggctgttctccctgcaaaaaagacatcgttttcgcaatcatccccggctccacgcctaatgcctccgctgccagcgcaaccgtcgctgtggactcttttaactcaataacatgatccaaaaatccggcttcctttaagtaattttctgctttttccagtgacatggttgttttcctcccgtatcttctatcaattgatctgccgtatcaatttcttttatattttagaactcattcatctttcccatcatatcacactttcattttccatatcaatatttctatagacgaaaaaagacggttccctgcatttgccagagaaccgccccctatttcattaattcctattttcaagatcgttccgaccgctttttgtaaaaccaacacagattttttgcaaatctatctccagatttcagatccaaatcccggctttgttcgattccctcttatccagttccgtcctgtatttatcacttctccccgaaaaataattccacatcgctctccacgctgtcaatccccgcgattccaaacttttccaccaatacatttaccacgttcggacttaaaaatgctggaagcgtcggtccaagatggatattcttgataccgagtgagagaagcgccagaagaacaatgaccgccttctgctcataccatgcaatgttgtaaataatcggcaggtcgttgatgtcatccagcccaaaaatctcctgcagcttcatcgcaatgaccgccagggaatatgaatcattgcactgccccgcatccaggacacgcggaattccttcaatatcgcccagattcagcttattgtagcggtatttcgcacagccagccgtcagaattaccgtgtcctccggcagcgcctttgcaaaatcggtgtagtaaatgcggctcttagcacgcccatcacaccccgccatgacgacaaactttcggatttttcccgatttgaccgcatccactaccttatctgccagcgccagcacctgtgcatgggcgaagcctccgacaatctgcccctgctcaatcccggtcggcggctcacagcgcttcgcatgctggatgatcactgaaaaatccttctttcctccgattccaccgttgatatacgtgcagcccggatatcccgccgcaccggttgtgtagagacgatccttgtagctatccttcggcggcacgatgcagttcgtcgtcatcaggatcggtccgttgaacgtctcaaattcctccttctgacgccaccatgcattgccgtaattacccttaaaattcggatatttcttaaatgccggataatactgcgccggaagcatctctgagtgtgtatatacatcgacgccggttccctgcgtttgctccagaagcatttccatatcgcgcagatcatgtcctgaaacaagaatgcccggattacttccgacaccgatatcaaccgtagtaatctccggatttccataagtctcggtgtttgctcgatccaaaagcgccattccccggacaccatattcgccggtttccagcgtcaggtgaatcaaatcatccacactcagaccgtcatccagcgtcgccgcaagcgcccgctgtaaaaatgcatccgcctcccggtcctcctgcagcaggacgttcgcatgccgggtataggcagacaaacctttcaagccatacgtaatcaagctgcgaagggaaataatatcctcgttctgcccgatcagaacgcccgcttccgacgctttttttataaattcagacggctcacctgtccagccagccgcctccggcagattgtcccgacgttccaactgctcccacagtgccgtcttcatttccagcgtcttttcaattcttttttcaatcgccgccttatcaaaattggcattcgtgatcgtcgtaaacagattttcggtaaccagatgattgacctcatctgccaccgcacgtccctcctcgcgaagccgtgtcgtcaccgcgctgatacccttcgtcacccacacaagcaaatcctgcattgccgccacatccggctgcttaccgcagacaccgaccaccgtacagcccttgcatccggccgtttcctgacattgataacaaaacattttctgatccattgttcgctcctcctatcgcatctatcgtgtcttagatataatctgcatttcgcatgatttatattcttgatagggatagataacgaagctgccttccatattatcagcgccatgattagcgccatcagcgtcaagaatagcgtcatccgtggtgctatttgtcatctgatttaaaagttccggaaggatttttgcagcctgatacaattttctgtaatctccgccataataaaaatatctccatcatttcaaaagagaatgacggagatatttcgccctgcttattcttgtagcaaccaatcggctatatcatggatttcgattccttcataactatattttggatgtttggttctggcaataatcattttcggataagcatctcggatctgaagcagagaagagcattctctctcaaatgtttcctgcccggaaatgtcactgacctgaatataaatcttctcgctgcctctctgagcaacaaagtcgatctccttttgatagagcttgccgacatagacatcgtatccacggcgaagaagttcgatgcaaacgatgttttcatatactctgccataatccatatttctgcttcccagtattgcatatcgaataccgctgtcacacaaatagaacttttcagagctttcaaggtatt

SEQ ID NO: 11009 - DNA, 2100 bp, Unknown
  gut microbiota DNA sequence
cggagtctcatttgctgtcagtagctgactgaccttattaggagaagtcaggttgctgatattatccataaggaactcgctcagacgctgtaaaaccaaagtgtccgggagcgcatatttctgcaccaaatcccttgtaacaatcgtttcgtagacctctttgatatagtttgttctgtctttttcggttctgtaagcgtaagaacctgctaaaccgcccttgatagcgtaatcatcaaagagcttatctttatcactaacatcatcataatactgacaatattcttggaagctgaaaggaaacacatgaatttcaatatagcgtccggtaaacagagttgccagatccgcactcaacaggaaagcattggagccggttacatagatgtcgtattttcccttagagtacaggctgttgattgccaactcaaacttgggacacatctgaacctcgtctacaaacaggtagttcgttttaccttcctgataatgttcttccacataggcgtgtaaggcatggtattccttgatttcttcatacgccaaatccatgaagtcaatgaagataatattgatgttttcaaaatggcttttcagatactcaatatacgcctgcatcagcttggacttaccggatcgacgaatgcccgtgatgatcttgatgtcaggagtgtcattcagttcaatgattctattgagatattttgctctcgtaattgttttcatatcgtcacccgctttcaaaaattgaaattttttcatttctcgaaaccgcttcactgtacttattatactgtctgctaatagtatatgcaagatgtcgctttcaaaaacataaaattttttattttttgaaagtggaaattatgtaaaggcaacccgaaggctgccctaggcatcaagcctatcctgtttacacaggttcattatcatcttcatcgacagagctatctgcatcatcgttctcaaactccggatcgtacccatagtcctcgtcatcgtccacataatcagcatccggatcaggctttgccgcttcctgttccttcttcttttcctggacttttttaaatacgaagaatacctttgtgttaaaatgaaggaagataggcaggtataaaaaaagatctgtcacccttaggattcttcccaaagccaacagatcttaaattttcccttacatcttcatactcttcgccagactcgtcagcaaagctgccatttccggattaaccctttttctttccatcccacgttattctgcatctacggttaccacgtttcctttttttgacataagccaataaaacacagcacaaaatattaatgcaaatacaacgccaaaaacattctgaatcactctaagaccaactgctccttttagtccataactctctgtagcaatggccaaagcaccaaatgtgttaaatactgcctgccagccatattttgcagaaagtcctacaccaattccgccaaggattcctatgtatgtatagatggatgacggaagcagaaaatatagtactgtaaagcatattacacctgcaatatttccgacaatccttttgcggactctgtagtgcatatcttccataaacggcaaaatcgcggacatggccgcaattccagcccacattgcccgtggcatattacaaagttctgcaatgcaaaggacaatcggtacgcataaaatctgacatatctgccattttgttctggaagaagtgatatcaaattcttgtatcagatctttcagatttcttttataagttctgtttttatgatttcgataaaatacgaagcaggtaagtgctgcacctaaagccattccgactaatcgcatctgatagctttttcccgtaacatcataaccatatagcagcagatacccaagaaccaatgtagattgattaaacatgaatgggttatgacatccgaacagaatcagtactgccagtgcagcaatgtttaacagcattccaagtaccggtgaaagctggtttgctaaatgcggacatacagtcataattacaaagaacaaagccaaaagcatcgtagattgtccggtgtggatccccagatccgcattccgaaata

SEQ ID NO: 11010 - DNA, 97791 bp, Unknown
  gut microbiota DNA sequence
cacggactgccgtataataaactttatatcatgttggaatataaactaaaactgtatggaatatcactgacaaaacaggaagaaagctataccagccagtgcagcccgttttcaccagaactatcaaaaagatatgcagaagcatcaaacagaaaagagcgtggcatgtatataacggatggagtaagatataatgcggatgcagtaggagcatttaatatcctgcgtaaatatctttccgtatccggaaaacagaaagaactgtccgtaaccggactaaagaatccagaaataataaaagtagctgtatagccgaaaggtaagcagtagtggtgtcatggacgcaccctgaaaaaaggcggtatcccgccagatttcagatgctctggtaacttagttaccgagtagttcacagtcttagtatcgggtgtgtgttctgtttgtgagaaaaaaatgcctggagaaaagacagaaaaataaaaaaatatacatatgatgacagattttatcttgttaaacgccacattttctagtataataagggtatcaatccatggatggaagtgactgtgaacatggaacttttagaagcagtttcaaacatttatgaacacctatttagatggagaagggggcgtttttatggagaaaagttatacaaagatctacacaactggagcgacagtaccgttaaagattcggccaggacatttcgcaacaaaccatgcacatatcaattattacattgatgtgacgaccctgaaagcgagaacgaaagaggcggaggaagttgcacaggcgctggttggcatgtatctgtatgacaccgtgatcgacacgattgtctgcatggagggcacggaagttatcggtgcttttctggcggaggagctggcaaagggcggttttctctcgacgaacgcgcacaaatctatctatgtaatcagcccggagtttaacaacaacagccagatcattttccgtgacaacctgattccgatgatccgcgataaacatgtgatgatcctgatggcatccgtgacgacgggacgtaccttaaataaggcagttgagagcatccagtattacggtggtatcttacagggcgcatcggcgattttcagtgcgatggattcgctggatggtgtgccgatcaagtcagtctttggcaagaaggatttaccggattatacgtattcagattaccgtgactgcccgctctgcaaggcaggaaagaagattgatgcgctggtaaatacgtttggatattcgccgatggggtgatgcggcgatcggaagctgcttcgtttgatgaatacaggatttgtaaaagccggatcgttgaaatgaaacgcgatccgaatgcgggtgctgcatggcggcatagaaagcattattgagaaagagatagattttacaaggtttgagaacagatagtggataccgcaaaaccacagaatccgtgcactgacctgtcagaaataagaagatggggagcagagggatgggaaaaaggttttgcggtatctctttttgtgtcaaaggtgccaaggcacattaatgaaaaaaataacagaaacaagaataaagaagggaaagaaagagggataaaaatggatacacagcagatgtttcaggaactggatcgcctttatgcgcagggaaaactggacgaagcggaagagaaaatgatgggctggatgaaggaagggctggattcagggaacaaaagcctttgcctgatgatgtgcaatgagatggaaggactctaccggaataccggacgggttgcacaggcagtcgatatggcggatatggcgctgtccctgattgcggggatgggactggatggttcgatccaccatggaacgacacttttaaatgcggcaaccgcgcgccggatggcaggagatgtggagaaagcgctttcccagtaccgggaggcggaagcgatttttaagaatcttggaaaaacggatggctatgagatggcaagtctctacaataatatcagccagatttatcaggaacaggaggaacatgaaaaggcgctggaatcgctggataaggcgctggaactaattaaaaagatggagaacagcgaggcggaggtggcaacgacccatgtcaaccgggcgctatccttgatggcgctgggacggctggatgaggcagacgaggagttaaaggaaagcctgaccttttatgcgtccccggagggcgtgcagtcgggacactttggttcggcgctggcagcagccggggagctggcatggcggcgcggcaattatgatcaggcgatcgggctgctggaaaaagcgctgatggtaacgcagtcccggtttggcgagagcgatgcgtgcgcggtgatccgccagaatctggagatgatcaaaaaagaaaaggaagaaaaaggcattaccggagctgcagacaagaaggaagacaagggcggaaacccgagccactgtgcgagctgtcagttcaaggatgcgaaattctgagacaggacaagaaaaaagcgttttttgaaaagttttcagatggaagatttgataaaaagcgtgcaagaaacgcgcatgaaaaaaagatactgaaaatagagaaaacgtagaaatagaaaaaaccataaaatcaggtagggggattagatgcagggactagaactggcaaaacgatattatgaagaagtcgggcgtccgatgctggagcgggattttccagagcttctgccgcgattggcggcgggactggtgggcgaaggttcggaatgtctgggatttgacgatgcgatatcgcaggatcacgatttcggggcgggtttctgtctgtggttttcggcggaagattataaccagtacggaaatgcgcttcaggatgcctatgaccgtttgccaggggagtttgcaggtgttccggcacgcctcacaagtgcgcggggcggcggacgtgtcggtgtgtttgagatagaggcattttacagccgttttatcgggatggaacagccgccaaggagcctgatgcgctggctgcatctgccggaggataagctggcggcagttacaggcggggcagtttttgaggacggactgggagaattttccgcggtccgcgaggagcttcggaagtattatccagaggatgtccggatcaagaagatcgcggcgcgggcagcgaaaatggcgcagtcgggacagtataattatggccgctgtatgcggcggggggatacggttgcggcgatgctggcgctcgatgaatttgtgcggcaggcgatttcgatggtctatttactaaaccggacgtatatgccttactataagtggatgttccggggaatggaaaaatttcagatattgccggaggtggcggaaaaaatccgggagctttcggtgatgggagatacgagcgagatgtggaagccgccgtttcccccgggatggaatccttatgtaaaccagttggatccgcgtgtgggtcggattgagaaaatctgtcaggcggtagttggggaactgcgaaaacagggactgactgacagccgggatgcatttctggaagcgcacacgtgggagatcatgaaacggattcaggatccggagctgaaaaaatgtcatgtgatggaaggataagccgcggatagacacatcaaaatgggaacgcgcatggactgtaaatgaaagaaaagatgcaggaaattgatttggaagggatctggcaagcgaaagggaggacagcgtatgacgaaacaggagaaaatagagaaactgattcagatggagtgggaagattttcagaaagttaataacgagggcggacgtgcttcttgtcaggacgatccggagacattttttatcatgcgacgaagccattttgcaccgtggacagaggaactcatagactgcgtgcaggcggatatggaccgcgcccatgagcaggggcgcaatctggtaatggagaaatatgcgtggatgatggcgagcaccgcaccggagcagtttaagaaactgcatcattttctgattgatccgacgctggcgggcgaacagtggagtgatgcgatcgtgaaacagcagcttgcctggatggaagagtaccaggcgaaatatccggtgctggcgtctggaaaccggcttctctacagttctgaagatacgccgtatgatacttccttccagacgtacctgcttggagaactgcggacttactcggacagcactctgcatacgtactggcagtttatcaatgaactgaaaaaggaaggaaagagtctggcacttctgacgatggaggcggaagtgaaggcgtatggatatgaggggctggatgcggcggagaaggcgctctctaaataaaaattagaaggatgcatattcgaaaatatatggaaatgatttcgaaaaaagtgaatgtataatagctaatatacaaggaaagttgaaaaaaatcggagagaatgaatgatcaaagttcctctccggtttttcttatatcagcacattctttgtttccgatttttacgaaaaccgccgaaccacccgcatcacctgttccaccgtatcgctcagattcttccgggcggaggcctgcatccagcgatccatgtttacgatatcttccctggaagcgcctttttgcggaccataaatagatttcggcaggatcgaagcagcgggactgtacggaaaaatacatgatgggaactcctctttgctggtagctcacattgtcgtcggatgatcagaaagtgttgtagtttctatttttgttgtttaaacaactgaaaaaatgtcccaaagcatgtatactccttcttgtaagcggcacaatacatatgaatggcaggagagactagaggtatgcttgtccatatgcagagatcggatgctagaaacatggacatgtagtataagccggagaaaaaaggagaaatgagcgtatgagcagagaggtaaatccaagaaaagcggcagtcatcgggtgcggatttgtgggttcagcaacggcatttacactgatgcagagccggttattttccgagctggttctgttagatgtgaatatggaaaaggcggacggcgaggcgaaggatatcgcgcacgggattccgtttgcagggcagatgaagatctacgcgggcacgtatgacgacgcggcggacgcggcgatcatcattatcacagcgggggcgaaccagaagccgggggagacgcggcttgacctggtgcagaagaatacggcaatttatcagagtatcatcccggagattgtaaaacgcgattttggcgggattctgctgatcgtatcgaatccggtagatattttgacgtatgtggcattgaaactgagcgggctgccggagaaccgggtgctcggttcagggacggtgcttgacacggcacggcttaaatatgcgctgggcgaacacctgggcgtggacagccggagtgttcattcatttattatcggtgagcacggggatagcgagatcgcggcatggagcagtacgaatgtatcgggaattcctctgaatgatttctgcgagatgcgcggacattttaaccacgatgcggcgatggacgcgatcgcggagaaggtcaaaaacagtgcgtacgaaattatttcgaaaaaacaggcgacgtattacggaattgcaatgtcggtaaaacgcatctgcgagtgtatcgtccgcaatgagcgctcgattctgccagtgtccgcgatgatgcatggggaatatggcatcgaggatatcacgctgagtatgccggcgatcgtgggaatcgggggtgtggagacgcatgtgccgattgcattgagtgaggaagaggcggagaagttggtggaatcggctaagaaactgaaagaggtagcgaaagggctgatagaatgatgccagatgggctgccgtacattggcacggcagcccatctgaaccaatcggttttactataaaatttttttctataggaaacgtcacatgaaatatgataagatagtgaaagcaattttcatagaacgtcccaatcgttttattgcgcgggtaaagattgatggctcggaagcggtagaatcggttcatgtaaagaatacgggacgttgtcgtgaattactgctgcggggggcggaagtgattttggaagattgcatagaaaagaatccaaatcgaaagactcgctatgatttgattgcagttaagaagaataaaaaatgggttaacattgattctcaggcaccgaataaagtggtaaaagaatggctgatgacacaggggtatgattgtattaaaccagagtatacctttggaaatagccggatggatttctatatggaaaaaggaaagcaaaaatatctaatggaagtcaaaggctgcacccttgagatagacggagttggatattttccagatgccccgacggaaagaggagttaagcatttaagggaacttgcagctgcgtgcggacaaggatataaatgtttgatagcatttgtgattcaaatggaaggcatcagtgaagtcaggccgaatacggaaacgcatcccgaatttggcgctgcacttcacgaggcaaaggcagcaggtgttgaggtgcttttcctgaaatgtcatgttgggatggataggttggaaatcataggagaagatgagtcttgagggcaaggttctaaagaagagagaaatctatgatacgtgaaattgagaatagaagaagtataagaaaatataagccagatgagatcgaaaggaagttaattgacgagatcatatacagtgcttcccttgcaccatctgctaaaaacagacagccttggaaatttattgtatatcaggggaaagaaaaagataaactggttgatgtcatgcgtcatggtataaattcagaaaaaatgacccatgaacttatgccggaatgggcatttgccataccggatgctgagaataccgttagaatcatgcaggaggtcccatgccttatagcagtgcttaataccaaccagcatactccatttgcaagcattgaaaatgaaaagcgaattgttgaaatatgtgattcactgtccataggtgcggcgattgaaaatatgattctgacagcaacgggatatggattgggcaccttatggattgccaatacttgttttgcctataatgagctgatggattttatcggaacagacagccaattgacaggaattgttgcgattggatttgccaatgaagctccggctaaaagaccaaggaaacctttcgaagaaattgttgagtacagataggtaaatcgtaatgagttaatcgtgttataatcaggttggatggagaataatcgttatgattagaaagttgcagaaggtagatataaatagagtcgctgatatatggttgaaaactaatctgaaagcacatttttttattcctgaacaatactggataagtaattatgaattcgtgaaggaaatgctgccacaggcggaagtttatgtgtatgaagatgataaaatgattcaaggctttataggagtaagtgatgaatacatagaaggtatttttgtttctgacgaaatgcagtcatgtggcataggtaaaatgttgttggattacatcaaggataaaaaagacagattacagttaaaggtataccagaagaatgtcagggcaatgtctttttatcaacgagaaggatttactattcagagtgaagagatggacgaattcacaagagaaaaagaatatgtgatgaattgggaatcgtctggaatttgaatacccatggcaggaggggatgaaccgcctgtttgtttacaagatggaagatgattcccattggatgtagtattttgcagcaagaatgccgatgagattcttcaccagaaaaaaatatctgaagggagacttttggtatgaaaaatagaaaatacagtcttgtttttataatgcttttgtgtatgataatggcagtttcagcatttccgatgacagtcaatgccgatatgggaccaaaggcctctgttcggattcagtttgagcatatgggggatgagctctgttatggaactttgctgtcgaaggagaaatctactggtccggcaagtgcctgggatggaagaacggagagtgcccagaaagagtacatggatcctggtatctggaagatctttgtgaattacaaggatccggatggatactattttctgcagcggagctggaaggtaagtgaaagcaaagagcttgcatggacctattatccgccgggtgattttaagattcttctgtattatccggaaacggaaacctttgtatccagtggaatttatgctcgttatgcatttgatacgtattatacagtggatatggatggtgtggatatcggttcggtggaatacaatgatgatttgagtaccaatgagcggattgaggcctaccgttcgtataattaccggcaggagatgctggctcttggagcaaggatcgtccttactattttaatcgaaatgctggtggcgctgctgtttggtttcagacagaaaaaacagctgttgattctggctgttgtcaacattattacgcagattatcttaaatgtgctgctcaatgtgattaattataattccggccctcttgcatttacatttttctatgtactttttgagctgattgtatttgctctggaggcagtgttgtattgcacaattcttaagaggatatcagaaaagaaaaaggaggatgcatattatatcctgtattcctttgtggccaatctgatctcatttggtgctggattattcctggcggcgaaactgccgggcatgttttgatataaagatagggtaaggtaactccttaacgtggtgaaatagaaatacatacggcaggagacaagatatggaaaaaagatattcaattatattcagcagtttaactggaaatacaagaaagctggccgatcagattcacgaggtgctgccagcggaaacatgtgattattttggagaagcgaagggggaggaaccatcttcggaggttctttatgttggcttctggaccgataagggaaatgcagacggagattcccttaaactccttgcgtccttgagaaataaaaagattttcctgtttggaactgctggttttggtgtcgatgaggcctattaccggaggatccttacaaatgtgaaacagtcgatagattccagtaacacggtaattggtgaatatatgtgccagggtaaaatgccgatggcagtgagagatcactatgtaaagctgaaggaacagccggagtatccggcgaatctggatgttctgattgaaaattttgaacgggcgctttcacatccggataaggatgacttagataagcttagaaatatcgttttatcataaaaatagacccaaaggagtaaatttgtgttgacaaacagaatcaatgaatccaccttgaaacgttttgatatcagtgcggcggcactgcatatcatcgccatgacgcttatgctgatggatcacctttgggcgacgcttcttcctgctagggagtggcttacctgtgccggaagagtggcatttcctatcttcgcttttatggcggtggaggggtacttccacaccagaagctttaaaaagtacatccttcggatgctgctgtttgcagtgctttcagaaattccctttgatttgatgtacggcggtacctggttttatccggttcaccagaatgtcctctggacattcctgttgggccttttaggtgtctggcttatggaacaggtacggaaaaaaggaaaaacctggatgtatctgctggtgtgcgttttggttgtgctggcaggtctggtactgggaactctttgcatggtggattactacggagtcggtgttctgacggtatttgtgttctatttcctccatgggcggaaatggtggtgcttcttgggacagctggctgccctatactggctgaatgtggaactgctgggcggtctgatgtatccggttcagctctttggcatggaatttgaactgtgccagcaggggcttgcgcttctggcattgatccccatctggctgtaccgcggcagacagggctaccacagtaaaccattccagtatctctgttatgcattttatccagttcatatgctgctgcttgtggtggtactgaatttcatcaaccgatgataaaattttacaatccccgccattcatggtatcataacaggtagtaaaattgcctgtgaataccttgaatggcggtgatttacgtcagtcggtttaccgggctatccgtcatggcctgatgcaggcacattcgatgcttttggagccattttatgcatttcatctgacgataccggacaagatggtaggacgtgcaatgacggatctggaacgccggtttgcggtttttgaaggaccggttctggaggatggacaggcgatacttaccggccgtgcaccggcttcatccttggatggatatcagacagaagtaacggtttataccagcggcttaggacagcttgtctgtaccctggatggatatggaccctgccataatgaggaagaggtcatcgaagcagccggttatgatccggatgcggatttggcaaacccaagcggctcggtcttctgtttccacggagccggtgtctacggtgagactgccgcacaccggaagtccggaggatgtaatatccgcagctctgattatcgctgataagacggatgtacgaagaagccgtgttcgtgaaaaagagagagccacttttgatatccacgaccgtgtgaattatgcggtaacagagtccaaacttaagattgaaaaggatcgttcagttattgccctgaatcttcaggtagatgaaaagatatgttccatgtatgattattttgagattttcctgggaagaatgatgctttgccggaagtcggcggagatactgggaacgacctttaagctgacagtaaatggacggaaggtgctgtaaaaatcaacggtgaatgaatggaaaaatgcttaaggtgtttttgaatatacaattgtaaatgaggcgagaagtgcagtgacgagaagcacttctcgccttattttagtcatatgatgccggaaaagactgaaaatcttgttaaaaacgacaaatacattaaacatacagacaaaaatgcgattatagatttgtacactgagcacaatgaaaaataagacaaggttttataaaataattgcaacaagaaaatatttacagcaaggaggaatgggaatggattatcagaaatttgtaaacaatgctagttttacaatctttgttgccgttgttttggttttagttaccattgtctgtatcatttttttgaaaaatggttggaaagaagcagaaaggttgggagtaagcaaggaagagctaaaaaaaattgttattaattgcattggaatcagtttggttccatctatcccgattgtgcttagcgtaatcgtaatggttccagttcttggtgtagcattgccatggcttaggacttctgttataggctcagcaaataatgaattaatttcagcaacaatggcagcagaagcaatgggagttgagtttacatcgacgacaatgacgatcgaggcatggattaatgctgcatggtcgatgacattaggatgttcagttgcattgccaattgtcttagtggttttaaaaccagtttgtaaaacctatgatgttttccgaaaaaaggatagccgttggattggtattttcagtctttgtgcattagttacagtaattgctgcgtttgcaattaatagtggaaaaaaaggaattgttccgagtctggttattattggatgttttctgttttcatatgtatgtaatttggcagcgaaaaatccagcactaaaatggttgaaagattatgcttttccgttaacaattttatttggattagtattatcaatgattataacaccgctcttagcataattaggaaaggagtgaagtctaatgactgattttgaaaagaaaatgcatcatgatggaagattatatggatgggcaatgttgattgcaatctgcgcatttccgttttttgcttcagtacgttctggaatatggccggattttaaaataatatggccaggagttttaacaatgtggattttgatggcttcgtatgttttaagtgaaatgattgcttttccacctattttaggaccaggaagcctttatttgacttatattaccggaaatctgcagaatcagaaaattccttgtgcgttgtcagcaatgagtatagctggtatagaagctggaagtgaaaaagcaaatgctgtatcagttgtggcagtggcagtatccagtatcacgacaacggtaattattgcattgggaatcgttttgatgcagccattgaccccagtgttaaattctgcagttcttgctccggcatttagtaatgtcgttcctgcaatatttggtgctttagctggactgtggcttttaaaagaattcaaggtttcagttgtttcagttgttctttgtttattaggaatactagtattaaaaattgatcttcagtgggtattgttaggaggaatagcgcttacaattattattgccagattcatgtataaaacaggtattataaaacaggaataaaaatggaggtgaaggatttatgagcactttattatttaaacatgtgaatgtagttgatgttcgaaatcagcagatactttcagatgtggatgtttggatcaaaaatgaaagaatagagaaaataggaagagatattaagagttctgcggatcaggtggtagacggtgaaggaaaatatttatcaccaggaattattgatatgcatgtacatagtacatgggacggaagcgctatttcagaagatatggatgaaatgtacggtccatatcaagcttttttgagaagtgtacataatgttgaaaattctttaaaaaagggagttacaaccatacgagaagtaggaagtcctaaggatttatcaattgaaacggcgtttgcagttgaaaagggatggattaaaggttcgagagttattccatgcggttctgcaattcagagtatatatggacatgttccatcaattggaacgattgcaaatacgaaagatgaacttttgtatgcaatacgggaaaaaaagactttgtttgtaaaaaaaggaatccgttgccagtggattaaaattatggatactggtggtgcagctggactggaagatgttggaccaagcatgtacgatttagatcagcttaaatttattgttcatgaagcacatcgtcttcatatgaaggttgctgttcatgcagtttcgcaggaaggaattattgaatgtatcaaggcaggaattgatacgattgaacatggaccggacattccggatgagtatttagacatgatgaaagaaaaaggactaactttggttccaacattggctatttataaaatattatcggaaaacaagggtgtgttaagtgattttatggtggaacgttctgctcttgtaacaagacagcagaaaagcacttttgcgagagcaatggaaaaaggggtgaagattgcattaggaacggatgcgggttctccgtgttttggttcacagccatctgcatttaaggaaatgctagttatgcaggattatggaatgcctccagaaaagattatttcttctgcaacgttaacatcggcagaagtattagggatgtcagaagaaattgggacgattgaaccaggtaagattgctgatttagtgcttttgggagaaaatccatatactaatttgaaagcatatacggattgcttgattggggtatacaaatctggagaaatggtttaatataaagacaattaaaactggaactagagaggtgctgcgcttgtagtgcctctttgctaattgtagaagtaggtgagaaaatatgaagctttccgttttgacagaggcattatcagctgagaatatagaagaaattcacataaaagatatgtctcagaacatttgccaagtctgtaatctttcattgacgtctgtagcattcacaaaaaatattatttatgtggtaacagctccggtattgttagaggtaggagatggctgtctggaagccccatctatatttattcttttaggaaatttgaatgattttattgatatgcagaaaccagagaattatataatatatcagagtgatgctccgggagaagtgtttacagcacttttatcgaaattaaatttggaaagtcgtatcttggaggcagaattggcgatcagtcgtgctttgtttgattgtacgtctataaaggatttattggatgttgctgctagtatccttggaaatcctattttattacaagattttacaacaagattattggtacattcggcaaatgaagtaatggctgcagatgacgagatattaaatagtgtatttcgaatgggatatgtgacaagtgaactatttcagaaatacgattacgctaacgttctggagcaaataaaaaatacaccgcagacgtttcttttgaaatcacccaaaaaaagagaacgtttaatttgccgattgattgtaaatcgaagatattttggctggtttttaacggtggcttataatcatccgttcaaagatagtgatatcgaaattatgaattttttgtgtggagcacttcaactatttcttgaaaaagaaaatattttacctaatacaacacgaagtgaaaatctattgcaagaattaattcaggatgcaaaatactcagaagcagagttcaaaaaacgggcagaaggtttttcgtggatgcttcatgatcattactatataattgctatttctgataaaaccagaaaggcagagtcacgaatgatgatgtcatatagaaatcatttgtcgctgattttccctgaagccattattcttgaagtcaatagaaaactgattttattttttgatacaaaagaggttggaatatgcttgaatgtgttggaagcatttctggaaaaatatgatttgctagcagtatgcagcaatcaattccataaaattacagattttgcatatattcttaatcaactattaatggttataggacttgaaaaaagtctgcattttaataaaagcctgattcattatcaagattatattatgtattgtgctataaagaagattggaagggaaggacatatccaatacttttgtatgcctgaattactagaggtatttagatatgaccacaaatatggtacttcattcgcatattctaaaagaattgctttagaacttgctagtgtaacagcagctgcacagaaattgggaattcatcgaaatacaatggaatatagattaagaaaatttaatgacttatcaggaatttcaaactatacggcagatattgtagaaaggttgctatttacatataaaatattggatttatatccagaaatactagaagaaaaggatattttgtgagggaggaaaagacaggacgtgttgcaataaacaatatctcctgtcttttctataaaatattagaaatttagcaaataatgaaatccattatgaatacgtttccgtcttgataaaggaatccatatatttgatatactcctctttggtaaagatgggctgataattcgccacaatttcttttgctttcacagccccgtcccgaagcaggcggtaagcggagagggcgaagatttttgcagtgaccacataggcaagttcctcgtctacgatatcgaaatcaacggagtggaggccgcttaccttaccgccggtgttgaaggtaaggaccggctgcagatgctgtacatcccccacatcggtggaaccgccgctgtaggcgtgggtatcttcctggacgatctggtaatcgttttcactggtttgtgcggcaatctcagcggctgccagaactgattcatcggctttttcactcagagccggaagatatccgggcatagtggtgatttcgcaggaagcaccgacggcgatggcaccggctttgaaggcacggtcggttttggcggcagcatctgcgatggcatctttgttggcggcacgtaccagagtttcgattaccacctcatccggtactacattgacgagattaccgccttttgtgataatgggatgaatccggacatggtcatcatcccggaaggtttcgcgctggtaagccagggcggaaagtccgagggaggctgcatttaatgcattgactcccagatgcggggcaccggctgcgtgggcagccagtcccttataacgaatgaccttggagacgaaaccgttgttggagtgggaaccgacactgatatctttatcaccggtgtggtggacgatatccaggtcgatgtcatcaaaagcaccgatgcggatgagttcacattttccgccaccgtatttgattttgccctgtgcggtcagggagtttttaaattcaatctcaccatattcctctgccggtacggcgaagaatacaacctgtccgtccagctctttttttacatcttcattggtcagagccagggctgcaccgatgacaccggccagctgggcatgatgtccgcagcagtgagctccctgagtctccggattggaatatttatgttccgggatgcggagcgcatccagttccccgatgagagccagacttacattcgttttctcttcttcatttaagtaggctttgacaccggtgacagccagtccttcctttgtctcaagacccagatttttcatgaaagaagcaaatttttctgcagttctgtattctttataacccagctctgcatgggtgtagatatctttggcgaatgcgatgatctcgtcgcggtgtgcgtcgatgatatcgacaattttctgttcggttttatctaaaatgagagccatgtgaaatccccctgtttcctgctggtgtattccgatgctgtttcctattagttaaacagttcctccggaacaaaccataaaccattgttattcttgtctaaatattctttgaattcatcggagtggtaagcagcaacgatatcttttgcccactgagcatctttattttcctcttttacaacgacctgcagaatcagatgcggcaggatgtcttcctgaagaagggcagtggatggatcgattcctgcattgtatacaatacttccggtgataaccgcataatcaaagtcatctaaaacagctggaatattggtggagttcatttcggtaaattcgatgttgtaagggttttccgtgatgtctgcctgggtgacagtggagagatccacatccgggtttaaggtgatccatccggctttctgtaagagtacataagcgcgggctgtgttggcggcatcgtctggaacggctactttggcaccgtcttgaatggcgtccagagaggtttcggtggcagaaaagatggcagccggaacggtaggaatcggggaaatcgggaccaggttacccttctgggcttcgtcgaaattttcggcataagcggtatgctgctctacattgaaatcgatttcgccgtcatttaaagcaaggtcattctggagaaggtcagagaaatcaacctcggtgagtgtatagccctctttttccagaattggtttgatggcatcctcaaataagacagtgtacggaccggcagcttttccgtatttgagctccttcttattagaattggaagcatcggcggaagcagcagattcggtgccggaagaagcagcggcagtatcagcagcggagcttccagcatcactctttgagcagcctcccagaacagcagctgcgaggatcagaccggcggtcagggtggttcttacataggcttttacgtttttcataatggggttctccttttttcgttttattattttgtatataaaataatttaatagcttttatgatataatttggtttactgatgtgtccgtctcttctgtgacagtcggtttcccagactctggatgatccagacaaatgcaatcaggatgaaaacggtcgcaaacatcagcgggaagttaaaggtctgatagccgtaggtcagggcgatgtttccgatgccgccgcctccgatgtagccagccatcgcagttgctccgatgagggcgatggtgccggttgtcagagccaggataaccgaagcaaatgcttccggaagcacaaaatgaacgataatctggaacgtggtcgctcccatcgactgggctgcctcgatgatgccaccgccgacttccagaagcgatgtctcaagaagtcttgctaaaaatggggcggtatagataactaacggcacgatggccgccttggtaccgatccgggtgccgacgatgattttcgtaaagggcattacacataccagaaggatgataaacggtgtgcttcggatgatgttgatgaaaccgtttaaaatcgtgtaaagcagtggattttctttgagcccgcctttgcgggtcagccataagacaatggcgatgaaaaatccgacgatggaaccgataatcagggaaaaaccgaccatatacagggtttcccaaccggccttgatgagtttgtccggcgaaatgcctaaatactgctgaatcatggtaatacaacctccttatattcttcgtttgattcgagaatgtagcgctcggcttttttgatttcctcgtcgcttccgatgaagagaacgagcatgatgccgacgacgatgccctgaataacgttgatggtggagtagagaatgttggtttccacctcaaaccgccggttaatatcccacagaagcggttccgtgctgtctgtattttccagcttgatgcggagaaggcggctgttccgcgtttctcggcggatgctctcgacgagcggttccggaataacgtcgtggatgagattgccgacaaaccgtttggcgatatcggactgcgggtctgagaaaacctggatgacagagcccgtttctacgactttaccgaaatccatgacggcgactttattacagattttctggatgacattcatctcatgtgtgataatcacaattgtaatatgaagagtttcattaatcttctttagcaaatcgagaatggaatcggtcgttttcgggtcgagggcgctggtcgcctcatcgcagagaagaatcgacggattatttgcaagtgcccttgcgataccgacgcgctgtttctgtccgccggagagctgtcccggatagtaggacttcttatcggaaagttcgacgaactccagcagctcattcacacgcgcttcgatgtcttttttgggggtgccgtttagtttcagggcaatcgcgacgttgtcgtaaattgtcttggattccaggaggttgaactgctggaaaatcattccgattccctttcggaggctgcgaagctcttttgcactcaggcttccaatgtccttatcttcgacaaaaatctttccggaagtcggtctttccagggcgtttaccattcggatcagggtggattttccggcaccgctgtaaccgatgacgccgtagatatcgcccttttcgatttcgaaggacacatccttcagtgcttcaaatgcaccgtctttcgtctggaatgttttacttaaatgttcaaatcgaatcatttctggtctcctttaactttgtttatctggggaagcacatttttaagggataattcctgaaaaatgacttctgtatgtgtcgcgttttttatacgaatgatatatctgaatgcaatataaatatttaattttgcatactgaaatataaatgggtacaaaaaaggaggtctggttgtccagacctcctaaattggattgtatctatcactttccagtgaaagcaagatgagaaaaacctcatgaagatatcatccagttatctgcctgcacaacaaaagtaagagtgtcacagcaacagcagaacatacactccatacaacaacacatagcagacataactgaataagatgttctcatgatggtttcctcctttccttaaaattcataaacgattataaaaatatatttcctacttgttttgtgggttttaaatgatagctcttattatagcgcggaaatgagatttgtcaatcatttttttatttcataggaaattgtgtcctatgaaataaaaaacgctccgcgagaatgtgccaaggcacattctttttcatatcatccaataccgcccaatgcgatgcctaatattaataccagcgcacataccggaatataaatatagcggcacaccggtacaaaccattttgtaaaattcttttcgcgacctttgttgacctgcgtttctgcatagtcttttccgaatacccagaagaacatgattccggcgagtccggcaccgagagggcagatgtagatagagagaacgtccatccagtcggagacgatgccctggattaacagggagacggcagctccgatgataccgataactgcgcaggcagggacgcggccgaggtggagtttttcctggacggtggcgatcggtgcttcgtagagattgagcagggaggtcatcccggcgaagagaacggctacgaagaaaataatcgcgatcaacgtaccgcccggcattgagcggatgaggttcgggaggtagatgaagagaagtcccggaccaccctgatcaagttttgcgccggtggttgccattgccgggatgatgacgagggcggcgagaatcgcggcgatcgtatcaaacagggcaacccgcgcggcggatgccgggatgttttcctcatcggagaggtaggaaccgtagattaaggttccatttccggcgacggacagggagaaaaatgcctgccccagtgcgaaaatccatgtttttgggtctgcgaggatctcaggatcgatgcggaaaatgtagcggtaaccctgcatcgcacccggctggaatgctacgtagatgcctaaaaagacaaacaggatgaagaataccggcatcatcagcttgttggcgttctcgattccgcttccgacgccgaacatcagaatcagaatgcagaagaagagggcggcaagctgccagccattgtttccaaatgcggacgccatcgagccgaaagcagaggcaaaaccgtctgtgtcggccggggcaagcgtggcaccggtaaaggctccgatggcatattttaggatccagcccatgacgacggtatagccgatcgccatcgcgagggaaccggctgccgggatgaaaccgagcgcgtcacccagtttgcgcctgccgcgtgtctcgcaggcagcgccgaacgcgtcgattggaccggagcgggtgccgcgtcccaggcacatttccccgatgacacccgtggagccgatcagggcgacgaagataaagtacgggatcaggaacgagccaccgccgtacagggagacgcgggtgggaaacatccagagatttcccataccgaccgctgagccgatacaggcgaggatgaagccccacttactgttgaaagattctcttttttccatgaaattgtaactcctcaaacattatataagatttgccgcaaatatctagaagtccgccgattggaagcggtcaggcagatgtttgcataagtccatctattataccagaagagaggcattgctttcaagtggcagagcgcgcgaatcgtatgttttaggggaaaaggcgatctaaagtaactgccggtgaaccgttacagggaaataccttgatttatagggtggaaagatggtattctatagaggacggcagcggcgggctttgggagggtggcgccgcggcagagcagattcgaaaaggagaaggtagcacaatgaaaaacgcaaacaggattccggagacgtttcagacggatgcggaatacagacagtggatggagcgctggcagcaggaggcgcgggaggcgacgatcgagggatttaagcagaatcgtaagttaaacggcatgacacagacggagcttggcagaaaggcggggatttcccagccgaatatcacccgcttcgagagcggcagctacaatccgtcgctggattttatggtaaagatcgcagcggcgatggggaaacgggtacagattacattggtagatgaataagaggcgtgcgccggggcgcacagggaccatttggggaataaacaggggagacagcggtgtgtgtgaggctgtctcccctgtttttaatgagtgcatttcagcgacgattcaataaaccgtgaaatcatattccactcatagctctgtttcagccacgcaaatttgatcgggtaccgcgcttcttccccgagcgtaaagacatggagtgtatccagctgttccttgctgagaatagaaaatgcgaggttttttgggctgatgcaggcaccttttcccatcgcgcagagggcaagcagggtagcgatgttgtcagagcaggcatgaaccgaggggacgaagttgtctgtcgcgaggatattccgcccgatgcgtccgactagatcatgttcacggtttaggagaaacggacatggagccagaagggagtagcggtgatggcggctgacttcctggataatggcttcggtctgtttgccgtaaatgttctgcagcagggcagtggagacgatgagaaccatctcttcctcatagaaatcccgcagaatgatgccgggaatgcgaactgaaaaattggcgatcgccagatcaattgtgccgtccagcaggtatttttgcagcacatcgttggaagattcgacgagttccacatccacgccgggatattccttttgaaaggcggcgatcagctccggcatgatggcgtgtccgcgcgtgaatgcgatgccgatccgcagttttcctgtctggttatttaaaatatcgccaaattcgtgaagcatacagtcatattttgtattaaattccgttgcatagcgcagaaatacctcccccgcataggtaagctccagcgggatgtgacggattaggagcggacatccaagctcccgctcgattccggcgatatgggcgcttaatgtctgctgggtaatatgcagcgcatcggcggccctagtgaagctgcggtttttcgcaaccgcggcaaaatattccattgattgaaaattcatattcgaatgactcctcttttcccaaaactttcatcttaagtttctaaaaagcatctgactataaaagtggcccttctaactcaaacaccgtccgctgcagctgcgcgatcagcaggctggcagctggggacgctttttttgctgacggaatccggacaccgagcacgcgctccatcggcggattgagcggcagccggacaacatttttagaaatatcacggacaaccagctccggcaggatgcagacgcccaggttgtggctgaccatcgccagcatggagtaggtgttctgcgaggtaaacgacggctttggcggtgtgatgccgagctgctggaactggcgcagcaggtcattttcacctttttcttctatataagaaaccttggggagatcctttaagtcaaagcgctcatattcagcataaggggaatcgttcgcgcagacagccaggtagggttcttttttcaggggaagccagtccatctttccgtccgggtgggggccgacgatgccaaaatcgatggagctattttccagccatccttcaatctcctgtgaacacccctccagcacttcaacggtcatatccgggtaatcggtaagaaactttttgagggcgggcggcagccattggacggaagcgcttaagtaagcgccgatccggatgtgcccggtctggacaccccggatggaggcagctgtctgatcaaaatattccgccgccgccagcgtccgccggatcggggaaagcagtgcctcgccgttccgcgtcagggcaagtcctctctgggaacgcgaaaacagggaaaacccgagttctgtttcaatatttcgcagcatatggcttgccgccgactgcgtgtaaccgtttttctgggcggcacgcgtcaggttattttcttctgcaatggctaaaaaaagccgcatatctttgagatccaaaaaatactccctccattttcgtaataagcgttcggtctgattcataaaatgtacagagctgacagataccaaaggaggatgagaagatttgtaagaattatgtagaatacgaatctgattcatacggaatatccgggcggattacatgggtgcgtgtgcggcggacattcattccgatggctctgccaagtgtccctagtatatcatattcgtgaaagaaatgggagaaaaagatagaaatatgcctacgatctcaaatacaacataaaaaattcatctaaatgaaacacacaaaaagttaaaaaataaacaaatggtaaacaaaattcatgaaactccgaaagaaaatggacaaaattctgaacgggagtctaacggaaaatggcgcagttgtagacaaaatatcatgatatcttgtgcatttatactaattgacgctcgaaaaagtgcaatttatttcatgaaaaaaacagagggattcatgattctatgctatatcatgaaaactctgcataataaattcaaataattttgttgaacaaatttcactttagtgatataattttttcaaaagcaagaagttttttgagcgaattgaaaaacttgcttagccagcgcgcggcactacatcaaataaagggggaactttatatggaagcaattaacaacatcgtcagtatgttgaacggacccatttggggcgttggaatgttagttctgattgttggtagtggtttatactttacaatccgtctcggctttttccagtttgttcattttaaagatatgtggagccgaatcattgacaagtcggagtctgaatccggtatttcttcattcgcatccttctgtacaaccatggcgatgcgtgttggtaccggtaacgtagccggtgtagccgtagctctttacatgggcggacctggcgcactcttctggatgatcatcgctggtatgacaaactctgctgtttgctttactgagtgtacattatccgtactttataagaaccgtatcgatggtcagtatcgaagcggcggcgcttactgtgctgagagaggtcttggctggaaagcttatggtaccttctatgcagcattcttcggactgggcgttgtattattcatgccggcagcagctacctttacaatctgcgatggatttaagaacgctttaggtattccgatgtggatttcggctctggttatcgcactggctatggcagttgtagttatgggtggtgttaaacgaatcagttctgtagcatctatgctggttccgccgatggtaggcatttacctgattgcaaccgttgttatcttaatcgcaaacgcaggtcagattccgagcgttatcgctcaggttgtatcctgtgcatttggttccaaagaagctcttctgggcggcggcgttggtatcgctatccagcagggtgttaaacgaggcacattctcatctgcatctggtatgggtgagtccatgccgaccgcagcagcagcagagaccagccacccgattaaacagggtatggcaaatgcagctggtgtttggctggataccgttatcgtatgtaccgcttctggtctgatgatgctcttaagcggatgctacaatacacagtttggttacatcggtggtaccggtgcaatgcacgatcagatggctcagttagcagcagatggaacatatggcgttattttcgttcagaatgcttgcagcaccgttatgggaagtattgctcctctgttcattgctatcatgctggctctgttctcctttacatgcttaatcagctactattatgagggcgagacttcggttctttacctgttccagggcgatgataaagcagctacccgtaaagtggttatcagaattatgcagattgttatgcctatccttatcttcatctggggcaatatcgattccggtctggcttggaatctttccgaccttgcacttggtggatctacatggatcaacatgttagttgtactgcttctgtctccgaaggtatttgcactgtacaaagactacgaagagcagatgaaagcaaagaaagacccgtactacaacccggataagctttgctggaagggcgtagacgttgagatgtggaaagacatcaacaaaaaacgtatcgcagaagataaataatcgaatgtgaatcgttacatattattagatatagagcttaactcttagagtctaatataaaaggcagtccctgtcgtgtggcaggggctgtttttttgtttcataggatgttcctatgaaacaaaacgctccgcttcacgtgtacaagtgctaaaactgtccgccattgacggaaactgtcctcccagtaaaggcgggctgtttgttggaaacaaaaaaaatgagaagaatttgtggttgaacacaattgaaagaggaaggggtgaattgctataataatcacatatcaatgagcgaatctgaaaataaacacaaaaaagaagaaaatgccatgagatgtacgtctctttggcgggataaaccgaaaggtttcagcagtaaaggaggaccaaatgaaaaaaagacgtgttttgagtgttgtattggcagcgtcgatgtttgctatgcttttaactggatgtggcggtgggaatcaaggtagtgcagaaggaagccaggcggcagcaatcggacagggggtagcggaagcggaaagctgcatcaagattggtgtgtccggtacaccggatctggatccggccattgtaaatactggttctagcttaattgcagcgatcaatatttatgatacactgatattcccgtcaaatgaagcggatgaaggcgttatcccgagagtggcagaagattggacaatcagtgaggatggtcttacatatactttcaacctgaagaaaggaattaaattccataatggggatgaattaacagcttcggatgttgtgtattcgatggatcgtctgttaacgattggtgagggatatgcttatatttttacaagctatgttgagccgggaacgacagtagccgtcgatgattatacagttgagtttcatctgaaacaggcatatggaccatttattaacgctctggttcgtttgtatatcctgaatgaagatgaagtaaaggcaaatacacagtcagccggaaattacggtgagaatggtgactacggaagaacctatctcctgacacatgatgcaggttcgggtgcgtataaagcagttgaactggtacagcaggattatttctatgctgagcagaatccggattggtttatgggatgggagaatgagaaagctccgaaagctttcaaacagatggctatcaccgaagcaaccacagttcgaacgatgatcaacaataaagagatggatatcacagatacctggcagagtgttgagacattgtctgcattaagcaagatagatggtatttcgattgctaaatacagcaatggtctggaatataatgtatacatgaacacacaggcagctccgatggatgatattaatttccgtcgtgcgatgaactgcgtaattgattacgatacgatccttaattctattttcccagattccgttaaggcaaccggtccggttccagcaggtgttatgggtcatgtagatacaaaggcttttaaatttgatattgagcaggctaagaaatacatcgcagcatctaaatatgcaaatgattatgcaaactatccgatcgaaattgttgttaactcggatgtatctgaccttgaaaagattgcactgatgatgcagtcagcagcaaaagaaattggagtgacaattacaattgcaaaagctccgtgggtttctctgattgatcagatgggttcagtagaaacttctccgcagattacaattatcaactctgctccgccgttcgatgatgcaggtatctatttacagagccgttatggagatgagacaaaaggaacctgggagaatggtgagtggttagctgattcaaccgttaacgatatgattgaagatgcacttggaactacagatacggatgagcgtcttgcaaaatacgcagatatccagaactatattgttgatgaagtctgtccgagcgcttggctctgtgacctttcagagagatgtgcttaccagagctcttatgttacctggccgtttgtagagcagggtggcgttccacagtgtgtaaatggttatagtcaggtttactctgaatttgagtataatctggatcaaaagtaagatttgtgaaaggctctgctgcaaaataaaacatgtttataatctaaatatatgattttgcagcatcctttttgcagacagtaagaggtgaagcgtagtgattaaatacataataaaacggctattgatgggaatcctggtattgtttggaacatcattattgatatttaccattgccagagttgttcccggtgatgtagctaccatcgctctgggagccagagccactgaggcagcaaaagaagcgcttcgcatggagatgaatctctatgatccgttcccggttcaatatgtaaaatggctcactagtgcagtaacaggaaattttggaaactcttttgtaactaagagacctgtagccatggacgtggcacagtttcttccagcaacattggaattgattatcatggctggtgtatttatggtaatcggaacatttattcttggacttctggctggtaaatacaagaatacatgggtagatggtttgattcgagttctgtcttatatcggagtagcacttccggcattcgtaatcggaattctgcttttgcttctgtttggatataaattacaggcaattccggttttgggacggttaagcacaacactggtagctccgaaaacggtaactggattttttgtgctggatgcgttgctggcaggtgatttcacagtggcctgggatgcatttttacacttgcttcttccggcacttgcacttgccgtaccgccgatggttcaggatgccagaatccttcgctcttctctggttgataactcagccaaagaatatatggcagtttctacgggacatggacttcctccgaacctgttgatccggaagtatcttctgaaaccgtcagcaacctcggcaattacgaccatgggtatggattttgcgtctttgatgggaaatgcattcctggtagagcgtattttcaactggcctggtatttccagatatggaattaatgcaatgttgtttaaggatttaaatgctatatgtgcggttgttttgattatcggtattacattttttgtagtgaatctggtggtagacctgattgtggctgctctggatcctagaatgcggaagggaggaagtaagtaatgagtacgcaaggtgaaacaaaagcggctcgtaaaccgcttctatctccatccacaagagagaatcttcgaatttataaatacaaattcagtcgcaataaactgtcagtatttggacttgtgcttgtattactttcgttttttttcgcaatttttgcagaagtaattgttccgcatccggaaagcatcggtagttttgttgactacgcaaatgccagccttccgccttgtaaggactacttatttggaactgatcagatgggacgtgacgttttttcgcgagttatcttcagtttccgcggtgcactgattatgagtatcgttgttctggctatttctgttccggtaggaacggtacttggacttttggccggatattatcatggaactaagatagatgcagttatcatgagaatctcggacgtattcctttctgtaccgtctctgattctggcactgtgtgtagcttcgattctggaaccgaacatgatgaactccatgctcgcagtaacaattatgtggtggccgtggtatacacgacttgtatacagccaggcatcatctatttcggaagaatactttgttaaaaatgcagaattaataggagcttccaaggcgcacattctctttagagaaattcttcctaattgtttgtctcctatttttacaaaaatggcgctggatgtaggctgggttattctgatgggagcgtccttgagtttcgttggtctgggtgaacagcctcctacaccggcatttggacagatgatttctgacggtgctgcattaatgccggatatctggtggctgacaatattcccagctgctggtattgcatttatgattttaggctttaacttcctgggagacggtatccgcgacatgtttgataagggagggcactaaggatgagagaaaacattttaaatattgaagacctctctatttggtatcgtacctatcgcggttattctaaagtggttgatcatatcaatctgcaggtaggaaaaggagagaaaataggtctggttggtgagtctggctgtggcaagacaacaacaatgaaaacagtaatgggagttctgggaaaggatttaatccatgttccagatggcaagatagattttgcaggaaaaaatgttctggaaatgaagcaatcagaacttttacagttacgacgaaccggaatatccatgatttctcagtcccctatgtcagcgttgaatccagtatttacaattggtcagcagctgacagatattatcaagtattccggtctttataaaaagaatgataaaaaagccatcacggaggcagcacatcaggcacttaccagtgttatgttgtcggatccggatcgtattatggcaagttatccacatcagttatcaggaggcatgaggcagcgcgtctgtattgcatcagcgttggttacaccgaaggaactcttgattgcggatgaaccgtgtacagcactggatgttacaattcaggatcagattcatcatcttttacgagtgcttgtagaagaaaagaaacgttcattgattatgattactcattctcttggcgtggccagagaactggtagaccgaatctatatcatgtatggtggaaatattgtggagacatgtcggacagaagacttgtttaaatcgccgtctcatccatatacgcagggacttctttcctgtgtaccgaggctttcaggcggcggattatcagcaggaatttacggttatgtaccagattatgtaaatcctccggaaggatgtcgatttgcacctagatgtccatacgcaacggaaatatgtaagaaaaaacgtccgccagtagtggagattgaaccggaacataaagttgcctgtttccgctatgcagatggaaaaacggaaaaggagggggcggagtaatgggaaaagaattattgattgcaaaagatttaaagcagtatttccccattggaaaggatcgctttgtccgtgccgttgacggagttaatttttccatcaatgaaggagaggttatgggactggtaggcgagtccggttccggaaagagtacgattgcctatacagttatgggaatgtaccgtcagacggatggagagattatttttaacgggcagaccattacgaataagacaaagggacgaagcaaagattttcgccgggatgcacagattgtatttcaggatccgggttcatccctgaatccgtatcaagatgttcgtcagattttaagtcttcctcttcgtgtacacaatgtagtttcaaaagacgggatagatgacaaaattcgtgaaattcttcagatggtagaattgccgccggatttcatgtataagacgccgaactccatcggaggcggcgagcgtcagctggtatcgattgccagagctctttgcagcaatccgaaatttattattttggatgagccaacttcttctctggatgtttctattcaggcgaagattctgaatatgctgatgaagctgaaggaagagcagaagttgacatatatgtttattacacatgatatgggtgttatgagaaacgtatccacaaagattgctattatgtacttgggcaagatttgtgagattgctccaacaaaaacattctatgaagcaccaatgcacccatatacacagatgctgctttcggcgattccggttgttacaccggaagaagaagcattgaaaccaaagaaagtgaagagtgaaggggaaattccatctcctgttaatattccaagtggttgtagtttccacaccagatgtgcctttaagcagaaaatctgtatggaagtggatcctgaaatgcaggaagtagaacctggtcactttgtccgatgccatttgtgtggaaaatgtaaatagtgattcagagattcccgaatgccgggaattaagaataaaaaagacacattgtcccaagagacaatagaatggagggtgttatgttagaatatgaagttctcgatgcttgtttgaagctgcttcgcgacatgttcatgttgaaacctggagagacaattgcgattacaactgatacaatgtccagtgatgagattgtagaagcaactgcacaagcagcagtgattctcggagctaagccacttatctttaagatcgctgcaccggaaggcgcaaaagctggcgataaagatatgccgatgaaagcactgattgatggtattaaagcttgtgatgcctgggtagaattcaactataagctgatcttctattccaccgtttatgacaagattacagaagatccgaacaatcgtccgagatatatgaatcagaacggtgttcatccggaactgttggttcgcaacattggtaaagtagacaacattcttctgaacaagtttatccagggattctcggattactgtgaggcaggacatcatatgcgctttacaactccggcaggaacggatttggagtgtgataatgaaccgggtcgtgattatgtaacggcggatggattcgttcgtaagaatgatattaagatgttcccaggtcagatcagctggtctccgaactttgagagtgtaaatggcgtgcttgtggttgatggaactctttctccgccaatcggagcattacagggaccggttaagttctatatcgagaagggctatatcaaaaaaattgaaggtggaagagatgctgaaaacttccgtgcatggctggagagcttcgatgatccgaatatgttcctgatggctcatagtggtcttggatttggaccgatggcacagcttaacggcgacatcgtagaagatgagcgtgtatggggctgtacagaatggggtatcggaaatgttggtccgcagctggtatctgatatggaaggtggaattgctgcagcttctcattcggacggtattgcattgaactgcagcctctggattgatggtgtgcaggttcttgatgaaggtaaggtggtcggcccgaccgaagagtttgtagagctggcaagacagcttggtcattaatcaataagtaataaattacggagaggtacacgatggatgttcagaaattgcagaatctgatttcagaaaaacgggaacagatggttgcagatatgatagagatgagttcgatacctgctgtcaatccgaagatgggaggcaccggcgaatatgcaagaatgcagtggatcatgcgatggttcgataagcgccagatcccctatgaggtatacgaggttccggacgaaaatgtcaaagaaggcgtgcgcctcaacgtagttgtgacaatccccggaactaagcttacggatcgttctctgtggtttatcagccatgtggacaccgtaggtccgggagatttaagtgcctgggatacggatccttttactcctacagtaaaggatggaagaatctatggacttggatgtgaagataacagccagtcagtgattactaccatgtatgcatgcgaggcgttgtttgccgaacatatccagatagataggaatttgtgcttctattatgcgtcggatgaagaaactggaagtgattttggcatgaaggcacttcttgataaaggactcattcagccgaaagatgaggcaattgttccggatgggggcagcgcggatggctcttttgttgaaattgcagaaaaatcgcagatttggcttaaatttacaataaacggaaaaacatctcatgcagcgatgccacatctgggtatcaatgcatgttatataggaatgaaatttggtgttgaattggaggatgctcttaaaacgagatatgataaagaagacaccatgttcaatccaccaatgtcgacctttgaggtgacacaaaaatttgccaatgtggaaagtcctaatgtcatgccgggaaaagatgtattttgtatggatttaagaattttaccggattattcagtggatgaagtgatggagtttatccaaggacttatgaagcaatatgaggcaaaatacccgggaattaacatgaatgtggagtatctgacccgggtggttgcaccgccgcctacctcgccggaaagtaaggtagtacggagcttgatggaggcaatctcggagacgggaacaaaggcctactgcggtggtatcggaggcggcacctgtggcgccattctccgggaaaaaaatattcctgctgtaatctggtctacactggatgatatgtgtcatacaccgaatgaatatgtggtaattgataacttggttcgtgatacaaagatttatctggctgcgttggctagatacgaagagtaggataagaaaacaataaaatgataggaggtacacatacatgtacgaattagaattgacgaatgcgtgctataagctgcttcatgatatgtttgatttgcagcccggagaatcccttgctattacgtgtgatacagagtcgaatatggacgttgtaaacgcaacagcaaaagctgcttttgcgctgggggcaaaaccgctggtcctgaaaatgtcaacaccaagagactgtggaaaagccggagatattgatatgccgattgagccgttagtggcagctatcaagggatgtgatgcctgggtagagtataacaataaatggatcttctattcaactgcatatgataagattgtagcggatccggaagatagaccaagatacatgaatctgtgtggagttaatccggagctgatggttcgtaatatcggtaaagttgataataatcttctgactaaatttatcatggcaatctctgatttctgtgaggctggaaaacattttgtaatcacatctccaaatggtatgcacctggaatgcgataatgagccgggtagagcttatgtgacagcagatggacatgtacgtaagggcgaaattaagatgttcccaggacagattagctggtctccgaactttgacagcatcaatggaacgatcgtggtagatggtactatcacaccgcctctgggagctgtaaagaatccgattacatttaccattgaaaagggttatgttaccaagattgaaggcgaaggaacggatgcaaaggcttatgcagagtggatgaaatcattcaatgacaaacagatttatctggttgctcatggaagctttggttttggaccgaatgcaatgctcaatggagatatcgtagaagatgagcgagtatggggatgtacagagtggggatttggtaatgttggtcctcagcttgtttcggatattccgggtggtatcccggcagcaacccattctgatggtatttgcttaaactgcagcgtatgggtagatggtgttcagattcttgacgaaggtagagttgttggccctactcctgaaattgtagaaatggcacatcagttaggtcattgatcaggatagaaaaataggcaaggggatgctgcagatttgcagcatcccccttttttgagggtttgtgtaatgtgttgagttgaatctttattttaggtgcgggttcgggcaatttgtagtataattgatcgctatataacacgactcggaggtgctggcagaatgataagagcaattgatatattgaatctgccttccatgcgtgaaggctatattgcagcgggaggaaatggtgcgtatcgtgtgatacgacgattcgagattctagaagagacctatccagcggttgttcagtatttggatgaggggattttttatctgacgagtttctggagcctggcggataataaagaaaaccggatacatctgattgaggcgatgatcgagcatcgatgtgctgggatcgggataatgcctggaagttacctaaatgaggagatagatcctgagatattgaaattgggaaatgaatgtggttttccgattttatatattcctgtaactgttcggtggggagatatggtttcggaatatagcatcatcgcaaacaacagcatggaatcgatcgaacgcagttggatggatatggcattggggacctttgttgattttcatgtgaataaagatccggatatgctgtgccggaaaatgagtgagattttgcagcttccgattgtgatgagtgcattgacggtttacagttatggaacagaaggaattacggtagcttttttgatttcccggattcagaagatacgacagaatgaggggaatacgatgcaatctccgatgatgcttcgaattgatagttcacgcctggcagttgtatattttggagaaaacagcatggtggcctgctgtccgagccgggggtcagtgcaggagaatatgcttcagctatatcatcagatggcgccttatatagttcgggaactggataatatttctcagggcagtaaaatacgaaaaattgaaccagcaataccatactacgggaaagcaaaaatatacatagtgttcatgcgatttgatagttttgacaaatcgaaattaaactttgacagaaagtatattttgtatgaaagtaactataatcagaaatactgtattttgttaattccggaagaggaagggatgaaatcgccatatgatgtttattgcaggttgtcagaagataataaaccgaatttgtttgtgttttcacaaagaaaatataaaaataaggaactgcatcgagagatcatgcgaataaaaaatttattgaattctcttctgtttttgaagggactttacagtatggatgagctttctttactttacctgcttacgaatgcgccgagggaacagaaagttcttttgtattcggcggatcaattaaaaatcaaatattcagatgaagtgataatttttttgaacacacttcgcctttatctggttcttcgcagtattaaagaagtatcacagcttttgggaattcatgttaattccgtaaaatatagaattgaaaaagcagtacagtatatggaaatggggagcgatttatcattgaatgaaatatcatcgctaggaacacttctttatctggaacggatgacggcagaaagacgttaatgcactctgactatcaggaggagaaagatggatattagtattatggatgtgataggaccggtcatgataggaccgtccagttcccatacagcaggggctgcaagattgggaggggctgcccgcgcactttgcggaaaaacgtttaacagagcagaatttggcttacatggatcgtttgcgaaaacatatcgcggacatggaactgatctggcattacttgcgggtattattggtatgagtccggaagacgggcggattcccgacgcgttccagattgctgctgaacaaggactcacctggaaattttttgaaaagcagatggagggagttcatgaaaatgcagtagaaattcgcctttttgatggagaggagcaggttctttgtatggtaggatcgtctattggaggtggtcgtatcatgattaatgatttaaatggctgccggattgatctttcagctgagttgcctgcaattgtgattagtcacatggatcgaaaaggcatgattcatcagattaccagcgttcttttggacgaagacatgaatgtaggaactctgaagctgacgagaaatacgaaaggagagcatgcactgagcattatagaggtggatgagtcggtggatgataaaattcttgaacgtcttcgccggattccggatgtattgagtgtacaggcagtacagatataactttcggcaggaaggcctaaggttactgggcacgtatgcgtgaacagtaacgacctaagatatgtgccaggaatatgcagtagaatatagaagaaagtggggaaggcagaggtgtataatacaattgaggatttgtgccgtacagccgaggaacgaaatcagccgatgtggatggagattcttgaagatgagatgcgttgtacggataaatgtgaggatgatgtctggaaagagctggagaatcgatatgacatcatgaaaaatggaacgacagcggcacttggtgaatctggaaaacgccttcggaaaacaatgatcaccggtatggcggagcgccagttcagctatgcagaaaacggaaatagtctgtgtggggtgggtatcaataaaatgatggcacgtgccatttcgttaagtgagacgaatgcggcgatgggtaagatttgtgcggccccgactgcaggctcgtgcggaattcttccagccgttctggttacgatggaagaagagtggaatctatctaagagaaagatcctggaaggacttctcattgcttccggaattggagcggtggtagtgaaaaatgccactgttgcaggagcggagggaggatgtcaggcagaatgtggagtggcggctgctatggcagctgcagccgtagtgtatctggcaggcggaacctgcagacagcaggcagcagcggtgtcattggcattgattaatgtgatgggattggtctgtgatccgattgcaggattagttcagataccatgtgcacagagaaatgcgtctcaggcggtgaatgccattgtcagtgcagatttggcactggcagatacggtgtgtccggttccggcagatgaggcaattgaggctatgtacagagtaggaaagcaactgccaagagaacttcgggaaactgcattaggaggaattgcggagtctgagacagggaagagaattgccgatgaaataaggaatcaatgagtagtttagtaaaagacagggtattaaagcgaattttaatgcttggaacgggaggcacgattgcctgtaaaagcagtgaggatgggctcaagccccttcttacatcggaagaactgcttaggtatgttccggatacaaaagagttttgtaaggtggattcgctgcaggtgattaatattgacagtacgaatatgcagccgcgttactggctgatgattgcagagaccattgaaaaacactatgaagattatgatggatttgtggtctgccatggaaccgataccatggcttatacggcggcagcgctttcctatctggtgcagaattcgagaaaacctatcgttgtgaccggcgcacagaagccgattgatttggaaatcactgatgccagaacaaatctttcagacagtttgcggttcgccagcagcgataaggcatatggtgtaacgattgtctttgacggcaaggtgattgccggaaccaggggaaaaaaagaaaaaacgaagagctacaatgccttttccagtatcaatttcccttatattgcagccatcctagatgggcatattattttctatctggatgataaagagcagatgaaagaaccggtgaggttttatcattcattgaattcgaaagtgggccttttgaagctgataccggccatggattccggcgtgctggattacatggcagaacactgtgatgcggtgattttggagtccttcggtgtcggaggcattccaacttatgattcgggtgattttcataaatccattgaagatctggtgcggaccgggaaaacagttgtcatgaccacacaggtaaccaatgagggcagcaatatgtcagtctacgaggtgggaaaaagcattaaaaaggaatttgacctcttggaggcctatgatatgacgctggaagcggttgtgacaaaattaatgtggattctgggacaaaccagtgatccggaagaaatacgggagatgttttataaaaccattaaccgggatatgctttttacttgtgcggtgcatgattaaaggagatagaaaaaacacttcggacagtttttttgggagactatccggagtgatttttttgccattatatagataatgtctatgatagaaatggtaattttttgtaaattgtcattgacgatccagccgccgcgcgatacaatcaaccgcgaaaggcggtaatggtatggtacagaaagtgattcgggatcgcctggatgcgatccttcattggaatatatccctggtcgggggatttctcggagcctatgcgattttgcttcatgccggaaactttggctctgctcagacaggcaacctgatggagatgggagcggaactggtatcgatggaatggtttaacgtccttctgcgtctggctgcgctggtgctgtttggactgggcgtggcatccgcatatctgctcacgaactttacgaaaataaacatgcggaaatttgccctctgggtggatgcggctgcgctggcactggcgtcgatgctgccgcttgaaccggcgctggttggaatttatccgattttctttgcatccgcatttcagtggggcgtctattccggtgccgacggatttaacagtgcgacgatctttatgacgaacaacttcaaacagtcggtgcttggctggctgcagtatggtctgacaaaggataaggaatttaagagaaaagcaattctttatacctatacggtcatcagctttttcctgggcgtggtactcggagcgtgggcggtcggtcagttcggcatctacagcgcctatgtaggctttctgccattggcggctgcgagaacctttatcgcggtcggtacggctccgcttgaaagcgagactccggaggagacggcagtcgaggcggcagaggagatggaagaagcagagaagctggagaaggagcagaagctgtaaagtctgttccctgcaagttttctacaggatgagggaaagaaaagcggcaggaaacaggcttcggcgggaacaggatgcggaaaaatgcaggcgtttaagaacagcaaacgtgaagcagtggacagatttaatgctggtgatattgctgctgtagaaattttcccagtattcctactccctgatatagcgccgcagacataatacataaaagaataatactcatcacaaccatatccatctggaatacctgtgagccgtagatgatcagatatccgagtccctgtttggcagcgagaaattcaccgatgatgacgccgaccaggcagagaccgatgttgaccttcatgttggcgagaatcagtgggattgagcctggcagcaggactttggttaaaatatgaatccggtttcctccgagggaccggattaatttgatctggtcgggatccatcgaggaaaatccgttgtggagtgtcaggatcgagccgaagacagcgaccgagatggaggcaacgatgatcgtgcggatgttgcttccaagccagacgatgagaatcggggcgagggcagatttcggcagactgttgagcatgacgaggtacggctccagaatctctgaaagattccggctcgaccagaggagaaccgcgccgatcagcccgcagaggatgaccagtgtaaagctgatcagcgtttcatagagcgtcacgccggtgtggatgaggatgcttttgtcctgcatcatccgcaggaaacagcgcacggtgcgtgacggggaactgaaaataaacgcgtcgatgagccccagtcgggcgctcatttcccagcatattaaaaagaaaacgaataagaaaatccggcagaagagaaccagacggcgccgatggagctggcggcggaggtaggctttctgggcggtggattctttcttacatttcatactttttgccctccccttgcagtgtcttccatagttcattgaaataaagagaaaaagccggatcattccggcgttccagcggtcggttagcggacagcgggaaggtaaccggcaggatgcggcagatggttccggggcgtttagtcagaaccaggatgcggtcggcggcactcacggcttcggagaggtcgtgggtgatcagaatcgctgttttgcggctctcccggatgatggtgctgatatcgtcgcagacggttaagcgtgtctgataatcgagcgccgaaaatggttcgtcgagaagcaaaagctccggttccagcgccagtgtccggatcagggcggcgcgctggcgcattccaccggatagttcggaggggcgggaatgctcaaattgttccagtccgtagatttttaagagccggtgaaggcggtcttccgcggcatgatccatttttttctgaatttccagcccgagggcagcattctggatgatcgtcctccactcgaaaagctggtcgctttgcagcatataaccgatgcggcactggcttttcgagagcggaaccccatttataagaatggaaccttcttccggcggcaggagcccgctgattaaggagagcagcgtggattttccacagccggacggtccgacaatggcgataaattcgccggtttctacctgaaatgatatatcagaaagggctttcgtctccccggatatcgtgtggtaggagtaggaaagcccggaaacttccagaatgggcggcataagcaaatacctgggtaactgtgtatcagtgggacagttacgctccttgaaacattcttactttaataatatgcggaagtgaaaagccgggttactgtatacgggtaggcacttttggaaccgaaagtgccgtaagaaaacgtggtggcagcaggaatttgccgtattgaaatgcgaagccacggcaaattccgttactggacacgcatgcgtgtacagtaacaaagccgggttactggttcaggcatacgtgcccagtaacagccgggttacaggttgtgtgagaagcgccttgcattggttgacccgtgtggaaaagagatgctataataaaatataggtaattgtggagagaaaagcgtttatagacaggatacagggggtatttatgatacgcagatatacagtggcattgatgcagatggatacacagaatgataaaggaaagaatctggagacggcatgcgcctggattgacgaggcggcggcaaaaggggcgaagcttatctgtttcccggaggtgatgaatctgatcggcaaaaatatcggtgaaggcggcggacgcgaggaaattccggggtacacgaccgagcgcctctgcgcgaaagcgaaggaacacggcgtctatattcacgggggcagtatcacgcaggcacttccgggggaaaaacgatcggcaaatacgagtgtgctgatttctccggaggggaagattctggcgacatacagcaaactgcatatgtttgacatcacgctggcggacggcacgccgtaccgggagtcggaccgggtcaaaccgggcgattcgattgtgacggtggagacggagctgggcatttttggaatgtcgatctgctatgatgtgcgttttccggagatttaccggctcatggcgcttcgtggggcgcaggttatctttgttccagcgagctttacgatgccgacgggaaaggatcactgggaggttcttctgcgggcgcgggcgatcgagaacggctgttacatcgtggcaccgggacagattggacagaaaccggcatatgcggcatacggcaacagcctggtggcagatccgtggggaacggtgattgcacggtcaaaggatgcaccggggatcacctatgcggagattgatttagattatctggagaagatacggaagcagattccgtcgctggaaaaccggcggagtgatttgtatgaagtgagtgagaagaagtaaggcgtgaatattttcagccggcaaaatggcgtgtggacggaaatgaaaaacgggtgtattcgggcaaatggataaaaaggacagagaaaaatggagtccaggggggaaaaccatggtaaaggtgtttctggtagaggatgaggcgatcatccggcacggtatacgggataatattgactgggcgagccacggatttgaatttgcgggggaggcgggcgacggcgagtacgcgtatccgctgatattgaaggcacagccggatattctggtaacggatatcaagatgccgtttatggacgggctggagctgagccgtctggtgaaaaagacgcttccgcgcacgcggatcatcgtgctcagcggctacaatgaatttgaatatgcaaaagaggcgatcaagataggaatcagcgattatctgctgaaaccggtatcctcggcgggactcatcgatgcgttgaaaaaggcggcggacgagatccgggaagaacgggaaaaatcgaggcttctggagcggtattttgtcagctacgaaaaatatacggaatttctggataaaacggattacagcggtgttgaccggaagctcatcaacgattttttaaagctcggctcagtcgaagagtgcagtccgtttgtcgaggagtatttcgcagcgatcggtgaacataattacaaatcgctcttgctgcgtcagtatatgacgatggatattttttactgtgtgcaggagtttttgaagaaattgaaagcggatccgccggaggttccggaaagtgtggttgacataaaacgggttccgaaggtgatcgagagcgtggagatgacgaaagcctatctggtcgatgagtttacggctgccctgcaggcgcgtgaccgggcatcgaacgaccgttatggcagcgtgatccgggatgcaaaggaatatattcgggcaaatttcagccagagcgacctgtcgctgaaccggattgctgcgcacattggcgtcagtccgagctatttcagttcgattttcaagcaggagacggggcagtcctttgtggagtatctgacgcaggtgcggatggaacgggcatgtgaacttttgaaatgcacctcctaccggacgtccgagatcggggagcaggtgggatacaacgattcacactatttcagcgcggcgttcaaaaaagcgatgggacagtcgccgaaagagtataaggcgagccagacgcggcaggagtaagaaaagtgtcagtacataactgaaaaagggaggaaagatatgggagtggagcaggggcagattggaaaaacagaagggatggcagaggtaaacaaaaatcaggatccgggcgcggattcattatccgctgcccgtccatatcgccctctttctctccgcgcccgtctgatccttctcctcttcgtgattgccattccattaacaggcatggcgctcggattccagaagatgatcgcctcctattctgcttcctacgacgcgattctggcgaatctaaagacggcgaatgagtacaacataaagttcaaatcggatatggagtattcgatgtaccgtgttatgatcgggctgattgacgcggaacagttcgaaaatggagatattgtcgagggcgagacgaagtatgcgacggtggtcaagaatccccacagcctgattgcgtcggcgagacaggcgttcggaacgacgatcgagcgggaaccggggtcggactgtgatatcaagataagaggtatcctctcctgtctggattccctggagcgggcagtggataaaatgattggaaatgccgccgccggtggatattacgatgaaaatgtcaatatttgggagaatgacatccagggtctttgctcgatgattcaggattacattacgcagtatacctattatgaaatgatcaacatggagcagcttcagaaagaactgaaggtgcagatggcggatcaggtgcagagctatctggcgcttcttctggtggtgttggtggtgggtatgtttctggcagttacgatcacgaagtccatcacggaaccgctgcagcagttacagaggacggcagaacagctcggccgcgggaacctgaatgcgagggcgagaccgggcgggctggaagagattaacgtgctggcacgggcgtttaaccagatgagcgaccgcatccggcggctgcttgataagacgaggcaggagcagaagaacctgcgggagctggagctgcgcctccaccaggagcagatcagtccccatttcctctataatacacttgattcgatcgtatggatggcagagggcggcaacaaccgccaggtcgtggagatgacgacggatttaagcgactttttccgcacggttttatcgggcgggcgcgatttcatcacgatcgaggaggaagaatcacacatccggagctatttaaagattcagaagatccggtacgaggacattctcgactattcgatcgagatcgagccgtctatccggcgccggattgtgctgaaaatgctgctgcagccgctggtggaaaatgccctctaccacggcatcaaaaataagcgcggtggcggatgcattgtgatccgcggctatgaggatcggaacgggcttgtctttgaggtggaggacgatgggattggcatggatgaggtggaacttgccgccgtgcgcgccaagctgaccctggagccggaagaggaacttgccccgatcggcagcggcggatttgggctacataatgtggtgcagcggattcagatgtattatggcgatcaggctgagatcctggttgaatctgaaaagaatatcggcacctgctttaaggtttatttgggaaatcaaaaaaaatcataactttttcgaaaaaaattgtaattttttaaagacatacccggaaaaacacagaaaacgacaaacatcgcaaaaaaataatatacctttttccaaagatgccccgtatccatgatgcggggtactttgttataataaatacgcaaaaacaaatatattgggtcttataaggaggaaacagtatgagaaaaagattagtgtccgcagctttagcagcagcaatggcgttatccatgaccgcttgtacaagcaatcaggctgagaaagagacggaggcagcagctccggctgatacagaggcagcagaagagggcgaagagaaagaagcggcagcagacggcgatctgattaccgtaggttatgcacaggttggtgctgagtctgactggagaacagccaacaccgaatctttcaaatctacatttactgaggaaaatggttacaaactgattttcgacgatgcacagcagaaacaggaaaatcagattaaggcaatccgttctttcatccagcagggtgttgactacatcgtagttgctccggttgttgagactggctgggagaccgttctggaagaagcaaaagaggctggtatcccggttatcctttctgaccgtcagatgcagctttctgatgacagcctgtatgaggcatgggtaggcggaaacttcgtaaaagaaggcgagacctgcggcgaatggctggctggttacttagacaaacagggacgcggagacgaagagatcaacatggttaccattcagggtaccatcggtgcatccgcacaggttggccgtacagaaggtatggacaacaagctgaaagagcactccaactggaagatgcttgacagacagtctggtgagttcacacaggcaaaaggacaggaagttatggagtccttcttaaagagctatgatgacatcgacgttgttatctgtgagaatgataacgaggcatttggcgccatcgatgctatcaaggcagcaggcaagacctgcggtccggacggcgacatcatcgttgtaagttttgactctgtaaaggcagcttttgagtccatgatcgctggtgacttaaacgcaaccttcgagtgcaacccgcttcatggtccgcgtgtagctgaaatcatccagaagctggaaaaaggcgaagaggttgagaagattcagtacgtagacgaagcatacttcgatacaagcatggatctggaagaaatcttaaagacaagagcttactaattcgattttgaatggtatttttaaatgtaaataatcggacaggcaatcgcttttgaccgtaagtgaatgagtgtcagaccggaggtttcggcggacggcaggcacttggcaatcaggaggcgcggggctggaggcttaggtttccgtccctgcgcttcctttttcaaaaaataaggaggcaaagcttttatggaaaaggattccgttcttgagatgaggcatatttataagacattcccgggtgtaaaagctctgcagaatgtggattttaccttaaaaaaaggcgaaattcatgccctgatgggggaaaatggcgcaggaaaatccacgctgatcaaagtcctgacgggtgtagaggagtttgaaacaggggcaatcatgatagacggctgcgatcatgcgatcatcaaccgcagcccgcaggaagcacagaaccggggcatcagcaccgtgtatcaggaagtcaatctctgtccgaacctgacggttgcagagaatctgtttatcggacgcgaaccgcgaaaaggcggattgattgactggaaaacaatgaataaaaaggccagcaaactgctgcaggaccttgacatacatgcagatgtaacacagacgatcgacaattattcgattgcaattcagcagatggtagcgatcgcccgtgcagtcgatatgtcggcaaaggtattgattcttgatgagccgacctcctcccttgatgatggggaggtagaaaagctctttaatctgatgcgccgcctgaaatccgaaggcgtcggcatcatattcgttacccatttcctggagcaggtgtatgcagtctgcgataagatcactgttcttcggaatgggcagctggtaggacaatttacgacggcggagcttccgagagtccagctggttgccaagatgatgggaaaggatttcgatgatctggcagcgatcaaggattccaagagtgaggagaaacacggcgaaacggacatcgtcatcaaggcggtgggactcggaaagaaaggatacataaagccgtttgatctggtgattcacaagggtgaagtcgtcggatttaccgggcttctgggttcgggacgttctgagacggtccgtgttctctatggagcggaaaagccggatgagggcgagctgagcgtcaagggaagaccgatcgcggcgcgccacccgctgacttcgatgaatgccggcatggcatatctgccggaggatcggaaaaacgagggtatcatcgcggatctgtccgtgcgtgagaacctgatcatggcgcttcaggcaaaacgcggtatgttccacctgctcagccgcaagcagcaggaagaatttaccgataagtatattgatatgctgcagattaagaccgccagccgtgagacaccgatcaaatcactctccggcggcaaccagcagaaggtaatcatcggacgctggcttctgaccaacccggatttcctgattctggacgagccgacccgtggtatcgacgtcggaaccaagacagagattcagaaactggtcgtaaaactggcagaacagggcatggcagtcgtgtttatttcttccgagatcgaggagatgctccgtacctgcgaccgcatggtcgttatgcgcgatggtgcaaaggtaggagaactttccgaggatgagatgaaccagtccaacattatgtcaaccattgcaggaggacagtagctatgaaaaatatgacgttcaaaaaaattacctcgcagaggctgtttctcccgattttctgccttgcgctggtattgctggtaaatatcgtcacgacgccgaacttcttcgcgatcgaggtgcggaacggcgttctctacggatacttaatcgatatcatcaaccgtgcgtcagagctggtgattctggcagtcggcatgacgcttgtcgtatcatcctccgctggaacggatatttccgtcggcgcgatcatggcggtcagtgcggcagtctgctgcaacctcttaaccggcggcgagcgcgcagcaactgcatatgccaatccgctgattctcggcttcctggcagcgctcatcgtcggcgcggcgattggctgcttcaacggttttctggttgcaaagttaaacatccagccgatggtagcgactcttatcatgtttaccgccgggcgcggtatcgcccagctgatcacggatggacagatcacatacgtgcgcgtggacagctaccgtaccctgggcgcttcccttccgggattcccggttccgaccccgtttatcgtggcggttgtcgttgtggcgctgacttcattactcttgaagaaaacggcactgggtatgtacatccagtcggtcggtatcaataaacgtgcgtcccagctcgtcggcatcaagtcggtcatgattattttccttacctatgcgtactgtggactctgctccggtctttcaggtctgattgcttccagccgcatctactcggcggatgcgaataacatcggtcttaatatggagctggatgcgattctggcagttgccatcggcggaaactccctcggcggcggtaaattctcgctggcaggttccgtcatcggcgcgtatacgattcaggcgctgacgaccaccctgtatgcgatgcacgtatcctcggatcaggttccggtttacaaggcgatcgtggttgtcatcatcgtagcactccagtctccgggatttgctagatggagaaaatccctggcacagaaaaaagaactgagcgcggcaggaaaggaggcggcataaatcatgaaagaaaagaagaaattaaatcagaacacgttcctgcttcttgtcacgatcctgctgttcttcgtgatgtacgcgatcggctgcgtgctctttaacgcacagggctttgccaagacacagaacttcttaaacctctttatttccaatgcgggtctgattgtcatcggtatcggcatgacgatcgtcatgatcaccggcggtatcgatatcagcgtcggttccttcgtggcgatgggctgtatgatgttggcatggatgatggaaaaaggcggtatcggtgcggttccggcggttctcatcgtgctggtgaccgggattgtcttcggtctggtacagggattcctggttgcctacatggatatccagccattcattgttaccctggcgggtatgttctttgcccgcggcatgactgcgatcatttccaaggacatgatcagtattacgaatgaaactttcatggcatgggcgaagatgaaactttatattccgttcggcggctatctcaacaaaaaaggcatgatgatttatccatatatctatccgacggttgtgattgcgctggttcttctggttctggcatttatcatgctgaaatatacgaaatttggacgcagcatttatgcgatcggtggcaacgagcagtcagcgctgatgatgggcttaaatgtgcgccgggtaaaactgaaagcctatatcctggacggtttcctttgcggcgtcggcagtgtcctgttctgtctgaatacgctgggcggcttcgttgagcaggcaaagggcttcgagatggatgcgatagcttcctctgttatcggcggcacgctcttgaccggcggcgtcggtaatgtattcggaaccctgtttggcgtccttatcaaggcgacgatcgaggcatttatcactttccagggaaccctttcttcctggtggacccgtatcacgatcgcggcgcttttatgcttcttcatcgtgcttcagtcgatccttgcgatggtaaagaagaaaaagtagaaattctcttccggagacagacaaaccggcatgaatgtctggtatgacagcatcaagatagaacagtcaaaatgacgggaaatatccatgcaaagagagagaagacatctgaaaaaagtacagtacatattagaaacaatataaagctgtattctcttgattcgacataattcgagaggaaatcagcaaacctatacatgatgcataaatatttagcgaaaacagccgctttaatttatgcatcatttgtatttctgctaaaatgatgtcacaatcaggcgttaaatttataacaatatacaaaataaaatacaactttatgaaaaaatgctcttgtatttacttgcacaatttgtcctggattgttataataaagttactaaaagttgtgaaaagcaacaaagcagtgcggctggggtgccgcttgcaaagaaaattttatgggaggtagttagaatgaaaaaaatgttcaaacgtgccgctgcatccatgacagcagcagcgatggcagtgagcatgaccgcatgcggcggctctggagcagcaaatgcgacacaggcagcagatgcttctgcagcagaaggaagcgaggcagcagcttcgacgatcgacaacaaagacatcaagatcggtgtttccatctggtcctccaccgatgtacttggttcccagtgtaagctgatcatcgacgaggcagcaaaggctctgggcgttcaggttcagtacgttgaccagggtcatgtgtcggagaaggttaccgcatccgtagagcagttagcagcagcaggatgccagggtatcatcatctgcaactcttctgatacagagatgacatccgctattaagacatgtaatgacaataaagtatatctggcacagttcttccgtgttatcagccaggagaacagcaaggatatctatgatttagcaaccgcatcaccgtactacatcggcgctgttcatgagaacgagccggagaacggtgaaaaattagttcagattcttctggacaagggcgacagaaacatcggtctgatcggctgggagcagggcgacgctacctggcttggcagatgggaaggctacaaagctggcgttgagaaatggaacgcagagcatccggatgatcaggcaaaactgtctgagccgcagtacgcaggtacttcttctgagggtggttccaaggcagcagaggctctgatgtccgcagatccgactctggatgcactgattccggcaggcggcggcggtgacccgcttcagggcgctatcgcagcagttgagcgtgcaggcaagactcaggatatcgacatcgtttccacagacttccttccggatctgggcgagagacttgaaaatggttctatggccggtgagtccggtggacattactgcgatccgcttatcgctttcatgatggtttacaacgcaatcaagggcaactacacaggtatcgagggcaacttcgaggatgttccgttcccgtatctgtatgtatcttctccggacgactacaaagcatatgagcagtacttcgtagatcagcttccatacaccgatgaggaactggtagctatgtccgagcttagcctggatgacctgaaagcaactgcagctggtatctccatcgaggatgctgcacagagagcaggcaactaattagttcagaaactgattcaaattatagaattttaagaggctgaatgtaatagaaaaggccggtatcgcacggcgcgatgccggtcttttctttaaaagaaaaaagaaactgagcagttatgaatgaggtataaaatatgggttcttctgttgttgaaacaaccggaaagaaaaaactttcgggaactgccaagggttatatcatcctggtgggtttggtagtgctttcctgggcgatttttaaagctttgacgccgggcaattttggttctccggccaatatgctgagttattttcaggccagcctgatcgcgacggttggcgctgttggtttttactttgttatggttatgggtatgttcgatttctccatcggcgcgaacatcatgctttcagcgattgtaggctgtgtatttgcctctcgtttcggcatgggatatgccggtcttatcatcggcagcgtgctgactggtacgattgtcggacttttaaacggtgttttttatgtaaaactccgtatcccgtccatgattgtaacgacgggtctggctcttatctatgagtcggttgccaactacatcgcaggcggcgtggagcagacgcttccgtccaacctccgtgcattcggacagatgccgtggaacattattctggcacttctggcatgtgtggcagcttacattttcttaaattatacaaagattggtacgtatacatatgcgatcggcagcaacgagttcgtagcgaaaaacatgggtatcaatgttaataagtacaaagtacttgcatttatcttaagcggcgcatttttaggcgttatggcgattttaacgatcagctacggttcctccatggtagcggtaaccggtatggcgtcgatgagccgtaacttcgttccgacgatgggatgcttcttcggtctggcgtttaagaaatatggcatgccgctgcaggcgatcgtcatcggcgagtttgttatcaacattattttctttggtttcatcgcgatgggcgcaccgacagcaattcaggacgttatcacaggtctggcactgttaatcataatcacgctgaccacaaaagcggaaaaaggcgagattgtcaagtaaatcgagggaggaaatgcaatgagcgaggtaagattacaggtaaaaaatctttgcaagtccttcggtatcacgaaggcagttcagaatgtgtcttttaatgtcaataaaggcgaggttcacgcgctgatcggagagaatggttccggtaaatcgacgctgaccaacatgctgaccggcatctacagtatcggaagcggtaccttcattctggatgggaaagagattcatccgaagaatcaggtagaagccaacaatgagggtgtttctatcatcgtacaggagttaggaaccttgtcaggacttacagtagcggaaaatatattcctgggacacgaagatcagttcgtacatatgggaattaaaaatacaaatgccatgaataaaaaggcgacggagcttctgaaacagtacggcttcgagcgtatcaaggcggcagacattatcgacaactacaatttcgaggaccggaaactggtcgagatcgtaaaggcgacctacttcaatccgaagattgttgtcattgatgagacgaccacggcactttcccaggaaggtcgtgaagaactttacaaacacatgaaccgcatccgtgagagcggcaacacagtcatctttatctcccatgaccttccggagattctggataaatccgataccatcacaatcctgcgggatggtgtttatatcgacactgtaaagagcaaggatgtgaccgaggacgatctgaaacgtctgatggtaggccgtgaggtgaccggtgattattaccgtgcagactacggcgagaaggtatcggatgaagtggttctttcagtgaaaaatgtgacggttccgggactgattgaggatgtgtcttttgaccttcacaagggcgagatccttggcttcggcggtttgtccgagtccggtatgcatgagatcggcaaagcaatcttcggcgcttcctatgacagaaccggtacggtacagctggcagacggaacgcagatcaacgatatcccgagcgcgatcaagcacagcatcgcgtatacgtcgaaggatcgtgataatgagtcggtcgttttaaaccagagcatcggcgacaacatctgcctgccgtccctggattcgctggcaaacaagcttcacctgttgagcgataagaaattaagagaattttccaaccagtttgcaaaacagatgtccgtcaagatggtaaacgtaaaccagtttgtttcggagctttctggtggtaataagcagaaggtcgttctggcaagatggattggaaaagattccgatattgtcgttctcgacagtccgacccgtggtattgatattaaggttaaacaggacatttaccagttaatgaaccagatgagaaagaatggaaaatcgattatcatgatttccgaggagctgatggagctgattggtatgtgcgaccgcatcattatcatgaaggacggcaagatcagcggtgagctggaacgtgatgaggcgatggatgagaacagcctgatcacgatgatggtataaggaggatgcaatggagaatcaagttaagacaagtacggaaaataaagagcagcagctcaaaaagttatcaaaaatgacgatgatccgttcgcttctgccgattgcgggactgattattatctttcttatgttcaatgccctgacgaatttccggatgatgaataaccttcctctggtactttcccaggtgtatgtcactatgatttcggcaaccggcgtattctttatcatgacgatgggcggtctggatttctcccagggttccatccttggtattgcatcgattgttgtctgcatggtttccaagaccagcattccactggcgattgtggcaggtatcgcggttggtgcagcgatcggtgccatcaacggttacttctatgtataccgcaagattaaatccttcatcgttacgatttgtacgatgttcttattccgtggatttatcaaatatctgacgaccaacgcgccggtagccggctctgcgatgttaatcaacttcgacagcactgaattaaagctggcttgtacgttggtggtcctgattatcggatttattttattccgctttaccaagtttggtacttatttaaaggcgatcggagcaggtgagaaagcagcgatgttctccggcatccgtaccgaccgcatgaagttccttatctacacactggcaggtgcgatcacaggatttgccgcatttatcaatgttatcaaggttggttcggttacttcttccggtggtaaccagcttgagacccagatcctgattgcactggtactgggcggtatgccgatttccggtggtgcgaaggtacgttttgagaatatcatcgttggttctcttctgtacatcgtcctgaacagtggtctgacgatgatgggctttaccacacagatgatgcagctcatccagggtgttgtattcctgatattcgtagctgtattcgcagaccgtcagtctctgcaggttatcaaataggacagacaaaagcgacatctggaggttacagtatgagggagaacagcagccggaatcagggtggacttaaatatcagaagctctacaactggggtcggacgctgattatgagcggggtgctccggaatatggacaagtttccatccgagcatatgctccagaataaatttggatactcccgccagacggtccgcaacgcgctcgaccgcctggagcaggacgggctgattgcccgggtcaagggaagcggcacatacgtttcctatgcgccggagaaggataaggaagaacgtccccgcatcggactgattctcagttatttttcagattacctgtttccgcaggtgtacgagggaatcgagtccgtcctgcgggaggaaggttatgagatcagcgtttcggtcacgcgtaaccgcttaaatgatgaggccctgtatctcaaggggatgctggggcgcaatgtgtccggactcatcatcgaggggacgcgttccagtttcccgaatccgaatctgcggctttacaaggagatacggcggagaaatattccgacgctgtttattcacaatcattaccagaatgagacgtttgacagcgtggagatgtcggatgcgcgcgcgggctatgagctgacgcggattttgatacagaacggacatacccggatcggcggtattttcaaatacgatgactggcaggggatcgagcgttaccgcggctttatcgagtgcctgtcggatttcgggatcgatttccaggaggactggatccgctggtattcgacccgggatatggaagaaaaattaagcaaaaaaggactccagcggatgtaccgccggacgaaggactgtaccgcgatgatcctctacaacgacgaggtggcgggcagctatatggattttttaaaggaccgcggactgcgcgtgccggaagatatttccctggtatcgtttgatgatgccggaccggtgcaggagggggatctcacgatcttgtccgtgattcatcccaagtacaatcttgggcggctgacagcgcgcaatcttctgcggatgatagaggattcggattggcaggaaaagaagtattcgtaccggtttccggtgatgtttaacaacggaaattcggttcgggatatacattgaaaatgacaaggaggcagattaaaatgaaaaagttatactttattgtgggttcccaggacttatacggagaggaatgcctgaaacaggttgcagaagacagccgtcagatggttgcattcttaaacgaaaaagtgggcgatctggcagagatcgaacttcttccaaccgtagagacttctgaaatctgtattcaggatatgcggaaagcttccaatgatgatgactgtgtcggcgttatcacatggatgcacaccttctcccctgcaaaaatgtggatcaagggtctgcaggaattaagaaaaccgctgcttcatttacatacacaggcaaatgagaagcttccgtatgatgagatcgacatggatttcatgaacctgaatcagtccgcacatggcgaccgtgagtacggcttcatcgttgccagaatgggtattccgcatgaggttgtagctggatattacaaacatgatgatgtggtagcaaagatccgccagtttgcatccgttgcaaaggctatctcctactctaagtccttaaaggtagcttccttcggcaacaacatgcgcgaggtggcggttaccgacggcgaccgcgtagagagccagatcaaatacggctgggagtgcaactactatgcactgggcgatctggttgacatcatcaaccaggtaaccgaggaagagatcgacgcgaagatgaaagagtataccgataagtatacaatgaagaccgaccgcattgattctgtccgcgagcaggctaaatacgaagtgggtctggagaaattcctcttcacgaacggaatcggtgcatttgcagacaccttccaggatctgcacggcttaaagcagcttccgggtatcgcagcacagaacctgatgggcaaaggcatcggctttggtccggagggtgattacaagatttccgctctgtctgcagtcctgatgaagatgtccgagggcaaagagggcgcaaccggctttatcgaggattacacctacgatctgactccgggacaggagttagagttagcttcccatatgctggaggttccgccggcatttgcagcaaccaaaccggagatcgatgtaattccgctgggtatcggcggcaaggaagatccggcaagactgattttcgacggcgtgaccggcgatggtatccaggtaacgatggtagatatgggcgatcatttccgcatcatctgtgcagatatcgagcttgtaaaacagccgaaaccgatgccaaaacttccggtagcgagaattatgtaccgtcataaaccgaacttccagatcggtacggctgcatggtgctacgcaggcggcgctcatcactccgttgtatctaccgctctgacgagagatgacatcgctatgttcgcgcgtctgaccggtaccgagttaattacaatcggcgaagatacgacagaggccgatttacagaaattctttatgaaataatagggtgtttgaaagataaaaatttttgaaaaaacgtaactgcataagttttcgccacaattgtgaaaataaaatagttatgaatgacggggcgtgccgcagccaaggggatgataattccggcggcggtgcgcctttttgctacaatgaggaggatggatatggcccgcagtgcggaagagatcaagaaagacatagagagcggaaatacagcgctcggaattgaatttggttcgacccgaatcaaggcagtattgacggacggcacgaccgcgccgatcgcgcaggggagctatgagtgggaaaaccgtctggaaaatggtatctggacctattccctggaagatatctggaagggcttaaaggactgctatgcggatctggctgccgatgtgaagaaccaatacggtttaacgcttaaaagggttggtgcgatgggcgtcagcgccatgatgcacggctatatggcatttgatgcggacggaaagctgctcgttccgttccgtacctggagaaatacgatgaccgccgaggcagcaagacgcctgacggacctgtttaactacaatatcccgcagagatggagtattgcacacctgtatcaggcggtgatcaacggcgaggagcatgtatcccgcgtgcattttctgaccaccttagccggatatgtacattggaaactgaccggtaagcaggtacttggcgtcggcgatgcttcgggtatgttcccgatcgacccggcaaccggacagtatgatgctgaaatgctggataagttcgaagaaatgatggttccgaagggatatccgtggaagctgcgcgaccttctgccggaggttctgagcgctggcgatgaggcgggaacgctgacggaggaaggcgcgaagctgctggatgagagcggcaatctggaagctggcattccgctgtgcccgccggagggcgatgcaggaaccggtatgactgcaaccaatagtgtggcagtccgcaccggtaacgtatctgccggaacttccgtatttgcaatggttgttctggaaaagactctggagacggttcaccaggagattgacatggtaactacgccggacggtcatctggtcggcatggttcactgcaacaactgtacctccgatctgaatgcctgggtaggtctgtttgaagagttctatgagctgatgggtcagaaaacagaccgcaacaccctgtttggaaccctgtaccgcaaggcgcttgagggcgatgaagattgcggaggactgatgtcctactgctacctctccggcgagccgatcaccgacttcgaggagggacgcccgctgtttatgcgccatcccgacagcaagctgggactggcaaacttcatgcgtacccacttatacagttccctggcaaccctgaaatatggtctggacattctgttcaaggaagagcacgtgacactggataaactgatgggtcatggcggattcttcaagaccaagggtgttggacagcgtatcatggcggcagcggctgacgtgccggtatccgttatggagacagccggtgagggcggtgcctggggtatcgcggttctggcggcgtaccgcaaggataagaagccgggacagagcttgtccgattacttaaatgagcaggtatttgcagatgcaaaggcggagacgatggagccggatgcaaaggatgtcgagggcttcaatgcgtttatgacaagctatatcaatggtctggctgccgagagaggcgccgtagaaggaaggttttaatcgatgctggaagaattaaaaaaagaagtatacgaagccaatatgctgcttccgaaatacggtctggttacctttacctggggcaatgtttccgggattgaccgtgagaaggggttgtttgtcatcaaaccgtctggcgtggactatgacaaactgacgccagatgatatggttgtcatggatctggaaggaaaccgcgttgagggaacgctgaatccgtcctctgatacaaaaactcacctgattctttataaccgttttccgaagatcggcggcgtggttcacacgcacagcccgtgggcgacttcctgggcgcaggcgggacgcgatattccgtgctacggaacgacccatgcagattatatttatggttccgttccatgcgcgagaaacttaaatgaggaagaattaaagaattatgagtggaacacaggcgtgctgatcgcagatttgtttgaggagaggaagctcgacccgatggcggtgccatgtgtgctctgcaagaaccatggaccgtttacttggggcaaggatgcccatgaggcggttcacaacgcggttgtactcgaggaggttgccaagatggcggcgcgctgcgagatgatcaatccagatgtgaaggaagcgccgcagtgcctgcaggataaacattatctgcgcaagcatggcccgggggcgtattacggacaggggaatttgtagttactgggcacgtatgcgtgaacagtaacaatttgtaaaatatagattcaagtatggaaatagatgggacaagtatggtatacttatgtatagtagatataggagatactggctatctatcttataaaaattaggaggatatgagaaatgaaattttttattgataccgcgaatgttgatgagatccgtgaagcgaatgatatgggtattatctgtggcgttaccacaaacccgtctctgattgcaaaagaaggccgtgattttaatgaggttatcaaagagattaccagcattgtagatggaccgatttccggtgaggttaaggctacgactgtgaaggcagaggatatgatcgccgagggtcgtgagatcgctaagattcatccgaacatggttgttaaaatcccgatgactaccgagggcttaaaggctgtgaaagctctgtccgctgagggcatcaagaccaatgtaaccctgatctttactgccaaccaggcacttctggctgcaagagcaggcgctacatacgtttctccgttcttaggccgtctggatgacatctccaccaacggtacagacctgatttacgatatcgtagagatctttgacaattacccggagatttccaccgagattatctgtgcttccaccagacatccgatgcacatcatcgagtgcgcgaaggctggcgctgacatcgcaactgttccgttcaaggttctgatgcagatggtaaaacacccgctgaccgatgctggtatcgagaaattcaaagcagattatgaggctgtattcggtaaataaagagaaacaataggaaatacctcttgaacttccgaaaaaagcatgttatactaggcacgataacataatagactgactggaaagagtggacaaaaaagtccactctttctaatttcatagaaaggtggtgggggtgtggcaaagggagagcagtacgaagcacgggtagaggcgtggatcacgccggttctggagcagcatcagtttgagctggttgatgtggagtatgtccgcgaggtcggtgtctggtatctgcggtgctacattgacaaagagggcggtattaccgttgatgactgcgaggtaatcagccgtctgcttggtgaatggctggataaggaagatttcatcgaggacagctatatactggaggtgagttctccgggactgggacgtcctctgaagaaagagaaagattttgcaagaagcatcggcaaagatgtggagatccgcctgtataaagcgatcgacaaacagaaggaatttacaggaacgcttacgtcctatgacgcggattccgtgacactcacgatggaggacggcagcgagcgtacatttgaaaaatcagagattgctttgattcgtttagcctttgatttttagacggtaggaggagataaaataaaatgaataaagagttgattgaggcaataaatctgctggaaaaagaaaacaatatcagcaaagatgttcttttagaagcgattgaaaattctctgctgacagcatacaaaaacaattatggccgggcagataatgtcaaggtaaacatcaaccgtgaaacaggagatttttccatcgtggcagagcgtgaggttgtggaaaccgtagaggatccgatgacccaggtaagcctggcagaggcaaagctcttaaacagcaagtatgagctgggcgacatcgttcagttctctgtcaattccaaggagtttggacgtatcgccgttcagaacgcgaagaatgttatcttacagaagcttcgtgaggcagagcgcaacgccctgtatgaggagtggcactgcagagagaaagatatcgtaacaggtatcgtacagcgctatgtaggacgcaacatcagcatcaacttaggcaagatcgacacgatcctgaacgagagtgagcaggtaaagggcgaggtattcaaaccgaccgagcgtatcaaactgtatgtcatcgaagtaaaagagacacagcgcgacccgcgtatcaccgtatccagaagccatccagatctggtaaaacgcctttttgagtctgaggttgccgaggtccgagacggtaccgtagagatcaaggcgatcgcacgtgaggcaggttcccgtacgaagatggcagtcagctccaacgacccgaacgtcgatccggtcggtgcatgtgtcggcttaaacggcgcgcgtgtcagcgcggttgtcaatgagctgcgcggtgagaagatcgatatcatcaactgggatgacaaccctgcattcctgattgagaacgcgttaagcccggcaaaggttatcctggttgcagcagatgaggaagcacgcgaggcacaggtgatcgttccggattaccagctttccctggcaatcggtaaagagggtcagaatgcacgcctggcagcccgcctgaccggcttcaagatcgatatcaagagcgagacacaggcaagagagtccggtcttttagatgagcttgagagcggttatgaggaaggcttcgagggctacaccgatgacccgctgatcagcgtggcagaggaagacgcagccgaggcagcagaaaatgaggcggctgagggcacagaagagccggcagcggagcaggaataatcctgacagataatgtgcggggatgctgatttcgggcggaacgagcagatttggcagaaagaaagcagcagaaccgggatttgacagaaatggaagtgatagacagtgggagcaaagaaagtgccgctcagacagtgcatcggatgcggagaaatgaagagcaaaaaagaaatgatccgcgttttaaagacagccgacgatacgatcgagattgacgcgacaggccgtaggaatggacgcggcgcctacctctgtccttcgatggactgctggaaaaaggcggtaaagagcaaaggactggagcggtcgctcaagatggcgattccgaaggaagtctatgaggcgctggaaaaggagatggagcagtttggagaatcgtaaaaaggtgctgaatcttctgggactggcgacgcgcgccggtaagacggcaagcggcgagttcatgaccgagaaagcgatcaagagtggaaaagcgtatctggtgatcgtgtcagaagaagcgtcggataatacaaaaaagatgtttgaaaattcatgtgcatactacaaggttcccgtgtaccagttcggcatgaaagaagagctgggacacgcgatgggaaaagagatgagagcgtctctggccgttttggattccggttttgcaaaggcgttaagagagaagttaggtgattaacgcttttctgggcaggctcttttaggagcttatgcagaacgggaaggcagtgccggaacggaggtagcaaaacatgagagttaatgagttgtcaaaacagattggcaaatcaaataaagaagttttagagatactgcagaaaaatcattttgacgtaaaaagccattcttccaaggtgacggaggaacaggcagaagcagtcagatgcttccttgcaggagcaaagagacagacgacagcgtcaaagacagatacaggaaaggcggaaacaaatcgagtggaagatataaagaaagagccgttagaggcagagaagaaagaggcggagaagacaactgagccgccgaaaaagcggattgcagcggtttatcgtccgcagaacagcgtacagagaggaagccgtccggcaggcaaggccaatacaggaaacgcagccaagaccggcgcaccggcaagccgtccggcagcagcaagtgcagagcagaccgcagagccggctaagagcgcagctccagcggagaaccgtgatggacagagaagcggctatcagggaaaccgtgacggacagagaagcggcggctatcagggaaaccgcgacggacagagaagcggcggctaccagggaagccgtgacggacagagaaacggcggctatcagggaaaccgtgacggacagagaagcggtggctatcagggaaaccgcgatggacagagaagcggtggctatcagggaaaccgcgatggacagagaagcggcggctatcagggaaaccgtgacggacagagaagcggcggctatcagggaaaccgtgacggacagagaagcggtggctatcagggaaaccgcgatggacagagaagcggcggctatcagggaaaccgtgacggacagagaagcggcggctatcagggaaaccgtgacggacagagaagcggcggctatcagggaaaccgtgacggacagagaagcggcggctatcagggcggccgtgatggtcagagaggcggacgcgatggacgcggcggtttaaatattccgaagccatccttcgacagcccggttgtacagaaaccgcagaacaacaagcagaataagaataattacaagaacgataaatatagcaagatcgaccatgaggaagagatgcactccaagggaagaggcggaaagaacgtaaagagcgctgttcagccgccgcagaagaaggaggcaaaggttgaggagatcaagacaatcacgatcccggaggtaatcaccatcaaggatctggcagacaagatgaaacttcagccgtctgtgattgtaaagaagctctttttacagggcaaggttgtcactatcaatcaggaagtagattacgagcaggcagaagagatcgcgatggagtttgacgtactctgtgagaaagaggtcaaggttgacgtcatcgaggaacttctgaaagaggaagaagaggatgagaaggacatggtaacccgtccgccggttgtatgcgttatgggtcatgtcgatcatggtaaaacctcccttctggatgcaatccgccagaccaatgtaactgcaaaagaggcaggcggtatcacccagcacatcggtgcgtacatggtagagatcaacggacagaagatcacattcctcgatacgccgggacatgaggcatttaccgcaatgcgtatgcgtggtgcaaaatccactgatattgcaatcctcgttgttgcagcagatgacggtgttatgccgcagaccatcgaggcgatcaaccatgcgaaggcagcaggggttgagatcatcgtagcgatcaacaagatcgacaagccgagtgccaatatcgagaaggtaaaacaggagcttatcgagtacgaactggttccggaggactggggcggcagcaccatcttcgttccggtatctgcacataccaaggaaggtatcaaggaactgcttgagatgatccttctgaccgcagaggtcaaagagttaaaggcaaacccgaaccgtaatgcgagaggtcttgtcatcgaggcggagctggataagggtaaaggtccggttgcgaccgtcctggtacagaaaggtaccctgcatgtcggtgatccgatcgcggcaggtgcctgctacggccgtgtccgtgcgatgatggacgataaaggacgccgcgtcaaagaggctggtccgtccactccggtcgagattctgggtcttaatgacgtgccgaacgccggcgaggtatttgtacagccggagaacgagaaagaggcaagaagctttgcagaaacctttatctctgagagcaagaataagttaattgaagatacaaagatgaagctttccctggacgatctgttctcccagatcaaggcaggaaatgtaaaggaacttccactgatcgtcaaggcagatgtacagggttctgtcgaggcagtaaaacagagcctgatgaagctgtccaacgaggaagttgtagtcaaggtcatccacggcggtgttggtgcgatcaacgagtccgacgtcagtctggcagccgcatccaacgcgatcattattggtttcaatgtgcgcccggacgcaaccgcgaagtccatcgcagagcgtgagaaagtagacgttcgtctctaccgcgtcatctatcaggcaatcgaggatgtcgaggcagcgatgaagggtatgcttgacccgatctacgaggagcaggtaatcggtcacgccgttgtacgtcagaccttcaaggcttccggcgttggtactatcgctggttcctacgtcctggatggtaaattccagagaggctgcaaggcacgtattacccgtgacggcgagcagatcttcgatggtccgctggcatccttaaagcgtttcaaggacgacgtgaaggaagttgcttccggatacgagtgtggtcttgtatttgagaagttcaacgatctgcaggaagacgatatgatcgaagcatatgcgatggtagaggttccgcgctagaaaggcagagggattcatgcgtaaaaatagcattaaaaatacaagaattaacagtgaagtacagagagagctgagttccatcatcagccgtgagctgaaagatccgcggattcatccgatgacaacggttgtctccgtggaggtaactccggatctcaagtactgcaaggcgtatatcagcgtgttaggcaacgaggaagcggcgaaggatacgatccagggactgaaaagtgctgtcggatttgtccgcacccagcttgcaaaacgcattaatttacggaatacgccggaaattacatttattctcgatcagtcgattgagtacggtgtacacatgacccgcctgatcgatgaagtaactgaaaacctcagagactcagaatcgggagatgaggaagaaaatgagtaaaaatatcttagaggcgtcactggaaggggcggggcacatcgtactgcttggtcacatccatccggacggggactgtatcggaacgactctgggactgcttaactatctgcgggagaattatccgcagatagaggcagaactgtttctcgaccatccggctgctaaattttcttatatgaatgattttgagaaaattcataccgagattgtgccggaaaaacagtttgatctgtgcattacgctggatgccagcgacaaagagcgtctgggcggctacgcggtctattttgacagcgccgccaagacactctgtatcgatcatcacagaaccaatacaggatttgcagaacaaaattacatcattccggacgcaagctcctgcagcgaagtgttatacacgcttcttgatgaggcaaagatcagcagggaggcggcagagtgtctctataccggaattgtgcatgacacaggtgtatttaagtacaattcaacgacccggaaaacgatggaaatcgcgggcgcgctgatggaaaaaggcgtgaacgcggcgaagatcatcgacgacagcttttaccgcaagacctacgcacagaaccagattctcggaaaagcgctgcttggcagtacacggattctggatggaagatgtattttcagtgtggtttcccagaaagaaatggagttttacggtgtcgatacgaacgatctggatggcattatcgatcagctccggattaccgaaggagtggaatgtgccattttcatctatgaaaaggcgttcaacgagtacaaggtcagccttcgttccaacgactatgtcgatgtgagcaaggtggcggcgtatttcggcggtggcggacacatccacgcggcgggctgcacgatgcagggacatccgagggatgtgatcaacaacctgacgggacatattgagaaacagatggatgcccgtagggaggaataggaggttctgttgctgattgcgctgcctgctttcaggtgcacagcgcatggacggtaatagttctgattttttaggagattttatgtttcacggtgtgataaacatttataaagaaccggggtttacgtcccacgatgtggtggcgaagctccggggcattttgagacagaaaaagatcggtcatacgggtacgctcgatccggcagcggagggcgtactccctgtatgtctggggaagggaacgaagctgtgcgaccttttgacggataagaggaagacgtatcaggcagttcttttgctgggaaccgaaaccgatacgcaggatatgacaggaacgattctttcggagaaaccgacggaacagctgacagaaccggcagtccgcggggcggcggagagctttgttggtccatatatgcaggtaccgccgatgtattcggcgctcaaggtcaacggaaagaagctctacgagttggcgagagccggaaaagaggtagagcgggcagcgcgtccggtggaaatctatgatcttcagatagatgcggtggaactgccgcgtgtgacgatgaccgtgacctgttccaagggaacctacatccgtaccctgtgccatgacatcggtgaaaagctgggatgcggcggctgtatggaaaaactgatccgcacccgcgtcgatcgatttacgatcggggacagcctgcgcctgtccgaggtggaagcgctggcgaaagccggtcagatcgaggataggatcgtgccggtggatggaatgtttgagggctgcccggcgtatgtgtcggagagcgaagttctggataagcttctgcagaatggaaatccattcccgaaggggctgggaccgagagacggctgcttagtgcagatcggaagcagtttggctgaacaccaggtttctgcggatggaaactcagagatggtacttccggattctggaataatccgcgtctatgacagcgcaaaccagtttatcggtctctatgcctatcagccggagaagaaacaatggaaaccacgtaagatctttctgggaggagagtaagatgcagtattttgccggaaccagagaatttcagataaaagagccgactgcggtcacgatcggtaagtttgacggtcttcacagagggcatcagaagctgctgcgggaagtgatgcggtatcgggaaaaaggatataaaccagcggtgtttacctttgagacggcaccgggaaccttgatccggggaaagctgcagacgatgatcacgaccaacgaggagcgcgaggagaacctgcgcgaggcgggggtggagtatctggtggaatatccgttcaaccaggaagtcgcacatatggacccggaacagtttgttgccgagattctggtcggcaggatgggcgcaaaggcgatcgtgtccggtccggactgccattttggctaccagcggaagggcgatgctgaactgcttcggaaactggcaccgaaatatggatatgaggtgtcgatcgttgaaaaggcgatggacggcgatcgcgagatcagcagcacctatatccgggaagagctggcgaagggaaatatccgcaaggcgaatgaactgttgggatacgagtaccggatcagcggacaggtagtacacggggagcatttaggttccaccctaggttttccgacggcgaatatcctgccgggaatccagaaacatcttccggcgttcggggtatatctctcccggacggtgattgatggtgcttcttatggaagtatcacgaatattggaaaaaaaccgacgattgccggagaacgaccagcgggggcggagacatatatctatgatctggatgaaaacctgtatgggaaaaagatagaggttcattttttggattttatgcggccggagatgaaattttccggggtggatgagttgaagatgcaggttttgaaggataaagagaccgggagaaaaatgcacggagcggaacgatgagagttcagcttcgtgcattttttaaatatgattcaggtaggcagctgcttcctctgccgccaaatggatatattcattcattggtaaattctgtgttcctactaaaatatggcggcaataggagcttccactgacaggaatcaggattttctgggcgcggctttgtccgatggcggctgccatggcgggggtgatttctcctaagagggagtctgcaatgacgatgccgattggtccgatgattaggtcggcatcgcggcaggcgacgagaacggggttttctccggtggcgcccatggcagctccggctttcatcatcgcggcagtggcagtggtgttggcaccgagcgcgagaagcggctgtccgggacagagtttatggatttcttctacgagggcgcgccccatgcgtccgccctgaccgtcgatgatgacaacttttttcataatggataacccctttccttttcgtaggattttcgtaggacaagataataaaaaagaatgtgccttggcacattctcgcgcaggaacgaaaataagagggtctaaatctgcctttttgacaaaataaacaccccagtatatctttcctataatatcatagaagatcaaatttgaaaagcgaaaaagatcgatttttgtaaaattttttgtttacaaataaagcgctttctattataatgctgataatggctaactggggtctggcagagctgcgattggtggaggctgtcagggtgacggaagatcagacagacgcgcgtgaaggcaccgcggaggtgcttgatttttagttgatccgggaggccgcttttttaaagccaaaaaacagcagacaatgagagggagaaaacatgaggagaaatgacattcacaaagtattgattatcggttccggtccaatcattatcggacaggcgtgtgagttcgattattcgggaacacaggcgtgcaaggcactgagaaaactcggctatgagattgtgctggtcaattccaatccggctacgattatgacggatccggagacagcagatgtgacttatattgagccgctgaacgtagaccgtctgactcagatcattgaaaaagagcgcccggatgcgctgctcccgaacctgggtggacagtccggactgaacctctgctccgaattggcagcagcaggtgttctggataaatatgatgttaaagtaatcggcgttcaggttgatgctatcgagcgtggtgaggaccgtatcgagtttaagcatacaatggaaagcctgggtatcgagatggctagaagtgaggttgcctacagcgttgaggatgcactggcaatcgcagataaactgggttatccggttgttcttcgtccggcttacaccatgggcggcgaaggcggcggtcttgtatataacgtagaagaactgaagaccgtgtgtgcaagaggcctgcaggccagcatggttggtcaggttctggtagaggagtctatccttggatgggaagagcttgagctggaagttgtccgcgatgcgaagaacaacatgatcactgtctgctttattgaaaatattgatccgctgggcgtacacaccggagattccttctgttctgctccgatgttaaccatttcggaagaagtacagaaacgtctgcaggagaaatcctacaagatcgtagaagcaatccaggtaatcggcggtaccaacgtacagtgggcacacgatccgaagacagaccgtgatattgttatcgagatcaacccgagaacctcccgttcgtccgcactggcatccaaggcaactggtttcccgattgcactggtatcagcgatgctggcaaccggtatgactctggatgagattccatgcggcaagagcggcactctggatcagtatgttccgtccggcgactatattgttatcaagtttgcacgctgggcatttgagaagttcaaaggcgcagaggacaagctgggaacccagatgaaggcagtcggcgaggttatgagtatcggaaagacctacaaagaggcattccagaaggcgatccgaagcctggagagaggccgctacggtcttggtcatgcgaaagacttcgataagaagacaaaaaaagaactgcttgcgatgctgcatgttccgagcagcgaacgtcagttcattatgtacgaggcacttcgtaagggcgctaccgtagacgagctgttcgaattaaccaagattaaacattacttcatccagcagatgaaagaactggtagaagaggaagaaagcctgatgcagtataagggcgaggttccgccggttgaggttctccgccaggcgaagctggacggttttgcagataaatatttaagcgagctgttaggcgttacagaggaagagatccgcgatgcaagaaccaaagaaggtatcgtagaaggctgggagggcgtacacgtaagtgccacaccggattctgcatactacttctccagctatcacatcaaggatcagagtccgtgcagcgacaacaagaagatcatgattctgggcggcggtccgaaccgtatcggtcagggtattgagttcgactactgctgcgtacatgcagctatcgctctgaaagagcttggatttgagacaattatcgttaactgcaacccagagaccgtatctacagactatgatacctccgataaactgtatttcgagccgctgactctggaagatgtattaagcatctatcataaggagaaaccgctgggagttatcgcacagtttggtggtcagacaccgctgaacctggcagcagacctgaagaaatatggtgtcaatattctgggtacaactccggaaaccatcgacatggcagaggatcgtgacctgttccgtgcgatgatggataaactgcagattccgatgccggagtcaggcatggcagttaccgttgatgacgcattagagattgcgaataagatcggttacccggttatggttcgtccgtcctatgtacttggcggccgcggcatggaggttgttcatgacgatgaagcgatgaccttctatatgagagcagctgtcggtgtaactccggatcgtccgattctgattgaccgtttcctgcatcatgcaaccgagtgtgaggcagatgctatcagcgatggcgagaacgtatttgttccggctgttatggagcatatcgagctggcaggtatccactccggtgactccgcttgtatccttccgtccagaaatctgaccaaggatcaggtagagacaatccgtgattacacaagccgtattgcaaaagagatgcacgttgtaggtctgatgaacatgcagtatgcaatcgaggacggcgaagtgtacgtgctggaggcaaacccgagagcatcccgtaccgtgccgctggtatctaaagtatgcaacatcaagatggtaaaactggcaacggatatcatgacttcctacttaacaggccgtccgtcaccggttccggcactgaaagagaagaagattccgcactacggtgttaagatgccggtattcccgttcaagatgttcccggaggttgacccggtacttggaccggagatgcgttccaccggtgaggttcttggtatgtccaccagcgttggtgaggctatctacaaggcacaggaagcaacccagacacgtcttccttcctcaggaactgtcctcctgagtgtcaatgacaaggataagatagagctgatcgaggttgcaagaggcttctacgagtgtggctttaccctgatgggtacaggcagaacctgtgatgtgatggtagcagcaggacttccggctgagaaggtatgcaagatcaacgaaggccgtccgaacattttagataagattaccaacggagaagtggcaatcattatcaataccccgaacgataagaagggcagaggcgatgacagctacatccgtaaggcagctgtaaaggcgaagattccgtacttcaccaacatggcagcagcaaaggctaccgtacaggctctgagaagtatcaagaagaacggacatctggaggttaagtccctgcaggagttccatagcgagattcagtaaataaaaataaaagggtaaaatccattgttacagagtcgtttcagtggaatttaccgtgacagtgaattaattgagctgttatagaaaagagcgtctgcccggctgtgaatgcggggctggcgctcttttaaagttgccatgcatctggaagaggctgtcagtggcaggttctgtgggagagaatttcatatacgagatgcagtagccaggcacccaggatgatcgaaagcacgtacactgcgtttccggcaaaaattccaaatttagcagcgatctgggagtacacaatctgcgtggttgcgtagtacggcgtgatataaaacatatccgcgtttccatacggatgcgaggtaacattgatgatggttgcgatgacacatccgaccgcaaatacaactgtagactgccagaatcctttggcggttggcagcaccatgcgggaaaaggcgatgagcagtccgatgaagatcagaaggatatgccagataaatccatgcagggtcagcgtccagtacgggtgcatcagaccggacggatcgatgaacaccatgacggcaccgagcaggttgtaattatacataaaagtgcaaaaaatacgttgatatttatgcggaacaaagggcagtagcaggcagaggtacatcggcaggctgcagagctggaatggaaaataccaccagtcgtagtgccggttgttttctatgtaatagagaaaaagctgtttgtagacctcggaaaatgccagaaaaacaccgcaggcaaagagcagatgcagacggaacgcttcggagcgcgtccgcaatttccatgcggcaaaggcggcgagcaggatgccgatcagcataaatgctaaatgaaagggagaccagactgcgggcggtgtcatggaccaggcagttaaggtaagtagacgggaaatcataaaaagccttctttcgtaataaaacctaaggaatggttccgtatcttgtgaatcaggtgcgatttctttgtttcatgggaaactgtgtcctatgaaacaaaaacgcgaaaccgatgcccagtacagagaaaacggtacagaatagttatagtacgaaatattagatttgccaagaattaacaaccagatctgtccgtaataagacgatggagatttacatatttgcaatttttttctttccaaagctgcaagttgacaagcgctgccaatttcctatattctgtagatataagaatcgagtaaatgatacgggagatataccatgaaccaaaatgaaactcaatgggatagatttctgaaaatccgaacaagcggcagagacgattcgcatgcggatcaataccgatacccatacgaaccgacggcatacgtggtcctggaacggttggcgaacagcggattaatccgtaagaataataccttattggactatgggaccggcaagggaagagtctgtttttatttgtcctatcagacaaggtgtaaaacaatcggaatcgaatacgatgaacgtatttatcagggggcaacagaaaataaggagacggcagtgtccggaaaccgtacttcctttatcttaagcagtgcggagaactatgagcttcctccagaagtgaaccggtgttatttttttaatccattttcgttagagatattgcattctgttcttgccaggatatatgagtcctattacgaaaatcagagagagatactgctgtttttttattatccatcggaggaatatatcagttgtctgatgacggaggaacagctaatgttttatgatgagatcgacacatcggatttgtttccgggcgaggacaaaagagaacggattatgatatttgaggtgattttatgaagcttttatttaaacagcggttattttcgtggtttgacagttatgatatttatgatgagtttggcaatacagtatatgtggtaaaaggccagttgtcctggggccataagctggtgatatatgatgcagacggcaatgaaattggaatggttgttcagcgtgtactgacatttctgcccaaatttgagatatataaaaacggcacctatatcggatgtctgagtaaagaaatctcttttctgacaccgcattacaacattgattacaatggctggcatatcgatggttcgattatggaatgggattataatatcctcgatcaaaggggatattcggttgccagtgtcagcaaagagctgttccatatgacggacacgtatgttattcaggtaaatgagccggaatatgcattggatgcattgatgtttgtgctggcgatcgatgcggaaaaatgttcgaggaagtaagaaagggtgcgtctgcttttggatacaagagcaccgaggtattcttgaatgatttaatatattcaggatagaaatgttgatacgacatgctgcagacggaaatttatatctgtatgacatggtgaacataaaaaaagaaacgagcaccccgcttgagcaatagttgtacggtaacaaacccatttcttgattatatgatacattgaacagtattaaatgtcaacgaaaaaaagcataagaaatctcaatgaaaagccagccaagctattcatcggaaagaccatagaaaagccaggttcagatacaccagtctttggcagttgagtgaaaataaaatcgctgtaacctttgtatttgctggggtgcagcgatttttgttgctgttgcagactatagtatttttttcttccttgtccatttttggaattgttctcattttactgttcgttatgaattgataatccgttcggaaaccggaaacattcttcgagatgtcatctgctttcatttactttcaaaatttcaccaaccgcatcatccagaagatccgtacatacggagtaagaagtgcttccatttgctttcgtgtaggaatgacaaatataaaaagtctctgcgttttttgattatgcaactattaaactcccgtgccaagaattaacaaccagatctgtccgaaactggaaccgtacaaattggaaaagaatgcataatcatacaaaaccctgtaaaaaacaggaattcaggcttgattatttataaaaatgcggtataatgtattcctagatacaataataaaagtaagaatattcgtatttactgcataaaaatacaaaagcagcgaatagaaatgaggaggaatttattatgaaaaagaaattagcagcaatcgctatggcaactgctatggcagcatcgttagcagcatgctcttccaaaccggcagagacaaccgcagccgcagaggagaatgaggagacaaccgcagaggcagcagagggcagcgaggcagcagaggctggcgacagcgcatttgcaggaaagactctggttatgtccaccaacgctgagttcgcaccgtatgagtaccacgatggaaatgatatcgtaggtatcgacgtagatattgcaaacgctatctgcgaggatatgggagcatctctggaaatcaccgacgtagcattcgattctatcatcccggaggttcagtctggcaaagctgatttcgcagcagcaggcatgactgttaccgaggatcgtcagacccaggtggatttctctgacacttacgcaaccggcgttcagtctgttatcgtaaccgaggacagcgacatcaaatccctggatgatttaaagggcaaacagatcggtgttcagcagggtaccaccggtgacctttactccaccgatgatttcggcgaggagagtgtacagagattttccaagggcgcagatgcagtacaggcactgtccactggcaagatcgatgcagttatcattgacaacaaaccggcacaggtatttgtagacgagaatgacggcttaaagcttctggaaacaccgtatgcagaagaagagtacgcaattgcagttaagaagggcaatacagagcttctggacgctatcaacgcatccatcgcaaacctggaagagtctggaaaactggatgagatcgttgcaaaatacattaccgctgagtaatataaaagagaattgaaatgaatcgtcagacggatggattcaggtgatccggaaaacacccggagtgtttccggtatctgacggaacggaaaaaggttgctgcagaatggcgaaaacacggttcggcggcagccctttttcaagtctatatcaccttacaaggaggaaaacagattggagaaactcaagcaggccttatatttaaacctgatcaaggatgacaggtggcagtatctgacagggggcctgaaaaataccctgatcatcacgttatttgcgaccctgatcggcattgcccttggtctgctgattgcgattgtccgtgcaactcacgacaaaaccggaaaaatgaaatttttaaatggtgtctgccaggtatatctgacggtcatccggggaacgccggttgtcatccagttgatgattttctattactgtatttttgtatcgcgtgtatttgccggcgtctttgtcggtgtgatcgcgtttggtcttaactcggcggcatatgtagcggagatcttccgttccggtatcatgtcgatcgacgagggacagatggaggcaggtcgaagccttggttttaactatgtccagacgatgcgttatattattatgccgcaggcgtttaaaaacgtacttccggcgctctgcaatgagtttgttgttcttctgaaagagacttcggtagccggttacgtggcggtgcaggatctgacgaagggcggtgatatcatccgttccagaacgtatgacgcgtggacaccgcttctgatcgtggctgctgtttatctggcgctgacgatgatcttcaaccactttgcacagaatctggaaaggagcctgagaaagaatgaacgataacgtacaaaacggagaagtgataattgacatcaatgacctttccaaggcgttcggtgatttaaaggtcctgaccaatatttccacccagatacgcaagggggatgttgtctgcgtgatcggaccatccggttccggtaaatccacatttctgcgctgcatgaacctgctggaaacaccgaccggcggacacatctattttgagggaacggatatcacggatccgaagacaaacattgataaactccgtcaaaaaatgggaatggtattccagcagttcaacctgttcccgcacatgacgattcttgataatatgacgctggcaccgatgaaactgctcggacgcccaaaggatgaggcagagacggaggcactgaagcttctggaacgcgtcggattaaaggaaaaggcatccgcctatccgggacagctctctggcggtcagaaacagcgtgtggcgatcgtccgcgctttggcgatgcatccggatgtgatgctctttgacgagccaacctctgcgcttgacccggagatggtaggcgaggtattaaacgtaatgcgccagcttgccgaggaacacatgacgatggtcgtggttacccatgagatgggcttcgcccgcgaggtggcaacccgcgtcatgttcatggagggcggcaacttcatcgaagaaaacgaaccgaaggagttctttgagcatccaaagagcgaaagattgaaggcatttttgagtaaggtgctgtaaggaaatttaatattaggaaaagtccggtagggagagaatgtcatagcacattttctttctgccgggctttttttatgcctgtaatatctttatgcgttttctattatccatctggttcttctaacttccgttttgaaaaacgtttatttggaaagaaaagttgttaaaaaatgcaaatatgtaaaaccaaatgaaatctcccatcgtcttattagtagaacagcagaaaaggaggaagattctgaaaagaaggcggaacagaatgttgagacaaagctggacagtgggaagcaggagaaaaaagagaatgcggtagaacggtcgggtgaaaacattagaaccgatagcgctgaggaagcacttccatatgagctcgtgattgtggaggcagagaaaaaataaatctataataaaggggaaagaattgtggaaaatggcagttctttccccttttatggttttcacacgcctgtgcctaccacgtcaccacccggtcaatcaccgtctgctgttcctgactcgatttcatcaggtaaatccgggttgtttcgagatttttgtgtccaagcagatcggagagcagggaaatatcgccgcatttttcgataaaactcttggcaaaccggtggcggaatgcatgcggatgtaccatttccggtgtcatgtggtaggagagggcgatggttttgagctggctgcggatgccgcctggagagatgggggaaccgaagcggttgaggaagatgggaccgtgggatttgtggagaaaggaaagccatttgagggtatcggttcggagtgactgtgggatgtagatgcgccggactttatttcctttggaatagatgtccttatagccggagaaaatatcttctgcctggaactgaatcacctcgctgacccggacgccggttgccgccatgaaacggataagaaaatagtaagtgtaccgttcatcccgaagcaggcagcgtttcaggtattcataatccgcctcgctgatcatgtgatccagataggttttctgctggatttttaccatgggaagatgcccgggatagagctttttaaaatccaggtaggcattcaaagcccggatccgctggttgatggtctgcggcttgtagtgctcgagcagaaagattttgtatagctttaaattggggtaggtaatgtcacggtaataggtaaaatactgccgtaccgcataagtgtaagcgcggagtgtctcatcggcaaggttgcgcgtgagcaggtagcgggcaaattcgtccgcggccttttgggctcttgcaggtgtggcagcatgcgtttgaccggaaaggcgtggaatggcagcagaagtttgcctggatgagagggggagagtgtgcttgctatgagtagcgtgtggaaaaatatgattttctatcatttgtggcataatatgtaggaaccttctttctgtatcattgagaaacgtccattggcacagaaagaaaactctgccgaggtgtggaacacaccggaacggatgaaaggatgaaatggcagagaaatcaatccggaatgctgctggacgttacaaaagtcaattatacaggatttaaaagaaagcggagaaaaaagtgtctccggtgtctttatcatatggatacattcttcgcaggttcatcggtttcacagttgaatttcttcattaagtccatcaggcggcacaggcactcgtccatcgatgccagttcttccggggtgtaagcgcgcagcccaaacagggtggaagacagcatttcctgcttcatctggttcatcatctcacggccggaatcgcagatgcggatgtagacgcggcggcggttggctgtatcatggatccgctcgaccagaccgcgttcctcaagaaccttgatcatatgggagagctgctgctttgtgatactcagcttgtctgccaactcagacatggtatagtcctggtccgcccagctgtcgagcgcgatcagggcgaaaaatggaagcgagttgactttcatatcatggcttggctggtagtggcattttgccagggagagaaagccgagtgcaaactccaggaagtgaataccggttttttttaaaagatttgaattttttttgcctggattcatagggaaacctccaaatttaaatatcaaagtaataaaatgcggttcatttcacaaacataaattgcaaacaaggaaacatcaatttacttgtactctagcacattcagacaaaaaggtcaacaaatataaaaagtaaataaatatttactgttgtggattgacaaataacaaagaatgcggtatatgttaatgtatcacgaaacgatgtgacagaaacacagaaaccacttgtcacagactcacaataaggagaacaatctatggtagagaatacgaacggaggcggaaagcagccgcccagaaaatcatttctatattattatggactggtaatgctggttgtcatgctgttaaacattttcctcttcccatccatgatggatcggacgcaggaagtgcggtttgaccagttcagtgaacagctgaaagagaataatgtcgatgaggtgtatgtgacgacgaacaatgagatcgtctatacgctgaaaaatgacgataaaaacaagacctggaatgtcacctacaaaaccggcgagattccaggtgtcaacctgtatgacctgctggatggtaaggacgtgaaatacagtgcggagatcaatacacaggcttctccgcttctcaattttctgctgacctggattctgccgctgattctttttatcggaatcggacagctgatggggcgttcgctgatgaagaagatgggcggcgccggaaatgcgatgacattcggcaagtccaatgcaaagatttatgcggaatccgagaccggcatcacctttgcggatgtggctggtgaggaagaggcgaaggatgcgttaaaagagattgtcgatttcctgcataagccggaaaaatattcggagatcggtgcggtgcttccgaagggtgcacttttagtcggtcctccaggaaccggtaaaacaatgctggcgaaagcggttgccggtgaggcacacgttccatttttctcgatctccggttcggaatttgttgagatgtttgtcggcatgggtgcggcgaaggtgcgtgatttatttaaacaggccaatgaaaaagcgccgtgtatcgtatttatcgacgagatcgatacgattggtaagaagcgtgacggcgccggcatgggcggcaatgacgagcgcgagcagacgctgaaccagcttctgactgagatggatggttttgacggcaagaagggtgttgtcattctggcggcgaccaaccgtccggaatccctcgatccggcgctgcttcgtccgggacgttttgaccgccggattccggtagagctgccggatctgaaaggccgtgaggcaattctgaaagtccatggcaaaaaggttaaagtggatgagagtgtggattacaatgagatcgcccgtgccaccaacggtgcgagcggcgcggagctggcaaatattgtcaatgaggcggcgctgcgggcagtacggatgggacgaaagaccgtgtcccagcaggatctggaagagagtgtcgagacggttattgccggatatcagaagaaggatgccggtgtttccggggatgagaagaagattgtctcctaccatgagatcggtcatgcgctggtagcggcgctgcagacgcactcggctccggtccacaagatcacgattgtgccgcgaacctccggggcactcggatatacgatgcaggtggaggcggatcagcgcttcctgatgagcagggaagaggcgttcaacaagatcgtgacactgaccggcggccgtgcggcggaggagctgatcttccattctatcacgactggggcttcgaatgatatcgaacaggcaaccaagatcgcccgtgcgatggtgacgcgttacggcatgagtgaccatttcggcatggtagcgctcgagacggtcaacaacgcctacttaggcggcgatacttccctggcttgttcggcagagacggcggcgagggtcgatgaggaagtgattgcgctggtaaagagcgcgtatgagaaagcgaaagctattctttccgggcatgaggataagcttcatgagctggcagactatcttctggataaggagacgattaccggtgaggagtttatgaagattctggaagagaagaaagaggatggcgaggcagaggcttaaaacagagccgtgtattataaggtggacggttacgtgtttgccgaagttataagagaaatcagttacagtgagctgagcaggtatcaggcattttgaaaggaaatgtctggtgcctgtttttgtgttgtctgcgtcgaaaaaagatgctggcagctgattcctccggtgttcccttcctgcatatcgggggattacaggagagaaaaagaaataagtaaaacttatgaaaagagattaataaatatcacagtaaaaatcaggcaaattccttgaaaatcgtctgtaaatatgcaataatatttcctgtatcgatccaaattttcgggaatgcggttttattttcggatttcaagttctgcgagggaattctgacaaacgatgagaaagggagagaaccgcattcgcaggcattcttaggaggaaatgttatgagaaaagtagtaagcgtgttactgagcgctgccatggcgctgtccctgtgtgcaggctgttcttcttcgtcttctgatacagcagatacgaaggcagcggaggaaaagggagctgacgcggcagacacagaagcaggcgaggcagcagagggcgtgatgccggcagttgctaaagaggatctgaaggtcggagtgattcatattggaaatccggcggatggttccggttacagctatacgcatgatcagggtatcgtagcgatgcagaaagccgttggtctggaggatgatcagattatccgcaagaacaacgtagcggacgatgatcagactgccatcgagacagcaatgcgcgagtgtgtcgaggaaggatgccagattatcttcgcgacaagctggggctacatggatgcatgcgaggcactggcagaagaatatccggacgttatcttctcccatgcaaccggctacaaatccaacggtgtgaactttaacaattattttggacggatttatcagtcccgttacctcactggtatcgcggctggtttaaagacagagagcaataagatcggttatgtcggcgcctggggcaaggacaatgccgaggttaccggcggatgcgacgcatttgcaatgggtgtatattctgtaaacccggatgcaaccgtttacatcaagaccaccaacagctggtacgatccggaaggtgagaaacaggcagccgtagccctgatcaacgagggctgtgatgtcattggacagcactgcgatacaccgaacccgcagttggcagctgaggaagctggtgtatttggtgttggttacaactctgatatgagcaaggatgctccgaaggcagttctgacctccaccgtttggaactggggcgcttactataccaaagctgtacaggatctgattgatggtacatggacaggcgagaactacttcggcggtctggaggaaggtctggtagacatttccccgttatctgacctgtgcgtagatggtacgcaggagaagatcgatgaggcacgtgcgcagatcgagtctggcgactgggatgtatttgacggcgtgatcgagtgcaacgacggaaccaccgttggcaccgagggcgagcatatgtctgatgcagatatcacaggcaatattcactggtacttcaagaacatcgtagagaaataatcacggaattatatacctggaagcgatactgaaacaggttcggaaacgcttccgggtgttgcagatttcaagagtatataacagataaaaggaggcagcttcaaatggatccactttcatttgcggcacctcttttttcttttttagaaaattgattaaaaaattggttaaatattcatttgaggtgacgatatgacagaacagtatgccattgagtgtaggcagatcacgaaagtattcggaagcgtcgtggcgaacgataagattgatctgaccgtccggtacggcgagattatggcacttttgggagaaaatggttccggtaagacaacgctcatgaacatgctttccggtatctaccacccagatgccggttcgattctggttggaggaaaagaagtctccataaattcgccggtagattcgagaaatttaggaataggtatgattcatcagcatttcaaactggtggatgtgttcagtgcgatggataatatcgtgctgggaaccaagggaaaacggctgggaagaaaggcgttgcgggaaaaaattgaagcgcttggacagtcatttggacttgaaattgaaccggagaaaaaggtctacgacatgtcggtcagcgagaagcagacggtcgagatcctgaaggtattatatagaggcgcccagatcctgattctggacgagccgacggcagtcctgacgccgcaggagacggagcggctgtttaaaatcctgcgccggatgcgggaacagggctgtgcgattattattattacccataaattaaatgaggtcctttctatcagtgaccgtgtcacgattctgcgaaaaggaaagagcatcgagacggtggaaactgccggatgtgatgagaagaaacttacggagcttatggttggacgaccaatcagcctgaatatcgagcgcccggagatggagaagagagagactattttgaagattgtcgatctgaccgtcgataagagtgacggcggcgtggcgctggatgatatttcttttgagattaaaacaggcgagattctgggcgttgccggtgttgccggaagcggccagaaagaactctgcgagacgctgaccgggttgatggacgcgaaaaagggcgctattttgtaccgtaaggaaaatatcatcggtaagactccggcggagatcatccgcctcggaatcagtatgagtttcgtgccggaggatcgtcttggcatgggactggttgcttcaatgggtatggttgataatatgctgctcaagtcctattcggaagggaaaggattgtttgtagaccggaaaccggcgagggagatggcagaacgcctgatcggagaactgggaatcgtgacgccgggcgttgatacgccggtgcgtatgatgtcggggggcaatgtccagaaggtacttttgggacgtgagattgagtcgagcccgcaggtgctgatcacggcttacccggtgcgagggcttgatattaattcttcctatctgatttacgacctcctgaaccagcagaagaaaaagggcgtggcggttgtctatatcggcgaggatctggatgtgcttttggagctttcagaccggatcatggtactctgccatggaaagatcacgggtatcgtggatgcgaagaagctcacgaaagaacagctgggactgatgatgaccggtaccgaagcgggcgagctggggctggataagagtatggcatccgaaaagaaggaggaacaggcatgaaagaaccgtggatccgcgttgtaaaaaaggcggaacttggaaaaagagaaacattgatcctccgtctggaggcgatcgtgctggctctggtggcaggcggattctttatcctgctgattgggcagaatccatttgtcatttatcagacgattgtaaccggagcgctgcgaagcgagatggcaatacaggcaacggtcaaaatcatgattccacttttaattgcgtcgctgggcgtgacgctggcatttaaaatgaaattctggaacatcggagccgagggacagatcattatgggcggtatttttgcctcgtattttgcactgttccatgcgaactggaatcactggctgctggtgatcgtgatgtttctggcaggcgcgatcggcggaggtctgtggggactcattccggcgtggtttaagacccggtatgatacgaacgagacgctgtttacgctgatgttaaactatatcgcgctgaatgtcatcgtatttttgagagagggcgcatggcgtgacccaggttcccagggatatgcgaagattgcccgtttcaataagaatgcggcgctcgataaggtgttcggcatccagttcggctgggtgattgcgctgattcttgtggtagtgatagcggtttacttaaatcgttccaagcagggatatgagatcagcgtcgtgggagagagccaggagacagcccgctatgccggcatgaatgtaaaaaaagtggttctgcggacgatgtttctgtccggcgctgtctgcggcatcggcggcatggtgcaggcgaccggttcggatgtcacgctgacgacggcagttgccggaggtgtcggatttacggcgatcatcgtggcatggctggcacagttaaatccgccggtgattctgctggttacctttttgttcagcgtgctggaaaaaggaagcagcgtagttcagtcttcattcggattgtcctcggactgcgcggatgtgctgcagggaatcatcctgttcttcattctgggatgtgaactgtttatacggtatcaatttgtatttcgcggaaaaggaggtacacgcgcatgagcagcgagatcgtaattaaatttctggtggcggctgtattggcgggtacgcctttcctgtttggcacggttggcgaaattttgagtgagaaggtcggacacctgaatctgggcgtcgagggcatgatgtcgattggcgcgtgcgccggattcatggtcggctatcagacggataactttgttgcggcgctgttagctgcggcggtggctggaatgctgtcggcattgatttacggtgttttgactgtcacatttatggcaaatcagaacgtaacgggattgactctgacgattttcggcgtcggattatccaattttatcggtgtctttatgctggaaaaatcagagaacggtaccctgaaacttccggatgcggtgacggcacagatgcgtaacatccacatcccgggactcagtgatctgccggtggtcggagaattattattttcctataacccgttcgtttatcttggaatcatcatcgcgattgtggcgagtttctacttatataaaacacaggttggtttaaatgtgcaggcgatcggagaaaatccgggcgcagcagatgcggcaggtatcgaagttacaaagtggagatacattaatatcctgctatccggtgcgatctgcggtatcggcggcgcatattgctcgatgatcatcaacggcggcgtgtggctgcgcgacagcgtcggcggtcttggctggatttccgttgccctcgttatcttcgcggcgtggaagccgatcaatgttatttacggttcctttattttcggggcgctgcgcgtgctgaaatactatgtgccgaaaaacacgtatgcgattccaacggcatttttcgatgcccttccgttcattatcaccgcattggtgctggtgatcgcgtcgatgcgtaagaataaaggggcacatatcccggcgcatcttggcgagaattatttccgggaggaacggtaggaaaatgaaggggaacttataggatttgtgggagggctgcaaaaagtagttacatggaataataagggaagcccttgataggtgatgtcagatggcggcttgagatgataggacgacatcagaaatgatatagaaataatagaaaagacggttgtttgtcaaagattttaaagggatagaacagaaagatcggacgaaaaccgtctttttctgtttgaaatggaaggaaaggttataaaacgatgtggcaggttcggaaattcagaagataaaaggaagaatttgaaaaatgaatttcggacatagaaaggctgatgggaggaaaatctatggttgcatcgaaacagattgcagaaaattatgtggagacgggcagaaaaaaggcggaacttccggtgtctcatatgctgatactcggctttttcgccggaatgttcatcgcgctggcaggcgcgggggcttcggttgcctcggcagcaatgacaaatgcctcggcatcgcggattgcttcggcactcgtattcccggcaggattggcgctggtggtctgcaccggggcggaacttttcactgggaactgcctgatgacgatctcggcgctgcagaaacggatttccgtgggcgggctgtttaaaaatcttctgtttgtttatctgggaaatctgattggcgcgatctttgtggcggttttatttgtctacgggcatattccaagcctgtacggcggcgatctggcgcaggttcttctgaatacagccgtttccaaggtgaccctgactctgccggaggtgctgtgccgtgcgatcctctgtaatgtgctggtttgtattgcagtctgggcggcgatgagctccgagcaggtatctggcaaaattctggcgctttatccgccggtggcgattttcattctctgcggcttcgagcattgcatcgccaatatgttttacatcccggcggggctgatgatcatgggcgagtacggtctggcagcggaagggctgacgatcggaacctttattctcaataatctgattccggctacgatcggaaatatgatcggcgggatgctggtgattggaggcgggtactggctggtgtatcttcggggaacgaaaaatcgtgaaataaaataaatgcgtgaaaaaatgaaatagggcgaaagggtatttttgtctggtctccatgctaggtttggagccgggcggaggtgccctttttgtattagaattgatgaaaagtttgacttctactcccaaggaatatctatgtttagctgattcaattttatcaaacagaacaaatgtttgcaaagacttttggaatgtgttatactaagcataattacagggaagactgtgactataaaataagtcagcagcgacatgataaaacagagcagagtcaatgataattgaggtacagatatggcgaagcaatatataaagatacgaggtgccaatgagcacaatctgaaaaacatttccattgatattccgagaaatgagctggttgtcctgaccggactttctggttcgggtaaatcatctctggcatttgacacgatctatgccgaagggcagcggcggtatatggagtccctgtcgtcctatgcgcgtcagttcttaggtcagatggaaaagccggatgtcgagagcatcgaaggcttgtccccggcgatctctatcgaccagaaatcgacgaaccggaatccgcgttcgacggtcggcacagtgacggagatctatgattatatgcgtctattgtacgcacggatcggtattccgcattgcccgaagtgcggtcgtgagatccgccgtcagacggtcgatcagatggttgaccagatcatggcgctgccagagcgcacaaagatccagcttcttgccccggtcgtgcgcgggcggaaaggacgccacgagaaagtgctggagcaggcaaagaagagcggctatgtccgtgtgcgggtggacggcagcttatacgagctttccgaggagatcacgctggataaaaatatcaagcacaatattgagattgtggtcgatcgcctggtggtcaagccggggattgagaaacgcctctcggattcgattgaaacggtcatgggtctctccaatggtctgatgctgaccgatacggcggtgcgggatgaaaacggcgaagaaaagcacgataccctgacgttcagccagaatttttcctgcccggactgcggtatcagcgtggatgaggtcgagccgcgcagcttctctttcaacaacccatttggtgcgtgcccggactgcttcggtctgggatataagatggagtttgacgaggatctgatgattccagacaagagcctgagcatcaatcagggtgcgatcacggcgatgggatggcagtcctgcacggacaaaacgagcttttccggcgcgatcttaaatgcattggcaaaagaatacgatttcagtctggataccccgtttgaagattatccgaaggagatccatgatattttaatttacggaaccggcggcaaggttgtgaaggtgtattaccgtggacagcgtggcgagggaatttatgatattgcctttgaggggctgattcagagcatgaaccgcaaataccgcgagacgttctctgattcaatgaaggcggaatatgagacatttatgcggatcacaccgtgtccaacctgcaaggggcagcgattaaagaaggaatctctggcagtcacggttggtgggaaaaatattttcgaggcgaccgatatgtcgatcgtcaaattccgcgaatttatcgatgcgctggagttgacgccgatgcagcaggcgattggtgcgccgattttgaaagagattcgggcgaggatcagcttccttatcaatgtcggtctggaatacctttccctgtcgcgtgcgactggcacgctgtccggcggcgaggcgcagcgaatccgcctggcaacccagatcggctccggtctggtcggtgtggcatatattctggacgagccgagtatcggacttcaccagcgggacaacgacaagcttctggataccctgaaacacctgcgggatctgggaaattcagttttggtggttgagcatgacgaggatacgatgcgcgcggcagactgtatcgtggacatcggtccgggcgcaggcgaacacggcggcgaggtcgtggcgatcggcacagcggaagagattatgaaaaatgaaaaatcgatcaccggcgcatatttgagcgggcgcattcagattccggtgccgtccgagcggagaaaaccggctggctggctgacggtaaaaggcgcagcggaaaataatcttaagaatatcgacgtcaaattcccgctgggcgtgatgacctgcgtcaccggcgtttccggttcgggaaagagctcacttgtcaatgagattctttataaagcgctggcaaagaagctgaaccgagcacacacgattccgggaaaacataaatccatcgagggcgtcgagcagctcgataagattatcgcgatcgaccagtctccgatcgggcggacgccgcgttccaatccggcaacctatacgggggcatttgatctgatccgggatctgtttgcggcatctacggatgccaaggcaaaaggctacaataaaggacgtttcagcttcaataaaaaaggcgggcgctgtgaggcgtgctccggcgacggcatcatcaagatcgagatgcatttcctgccggatatctatgtgccgtgtgaggtctgcggcggcaagcgctataaccgggaaacgctggaggtcaaatataaagggaaaagcatctatgatgtcctcaatatgacggtcgaggaggcgatgaatttcttcgaaaatgtgccgtccatacaccggaagattgcgacactctacgatgtaggactttcctatatccgcctgggacagccatccaccgagctgtccggcggtgaggcacagcgaatcaagctggcgacggagctgagcaagcgtggaaccggcaagacgatctatattctggacgaaccgactacgggacttcattttgccgatgtacaccgtctgattgagatattaagacgtttgtcggatggtggaaataccgtggttgtcattgagcataacctggatgtcatcaaaactgctgactacctgatcgacatcggaccggaaggcggcgagggcggcggaaccgtgattgcgaaaggaacaccggaagaggtggcagcgacgccgggatcgtatacggggaagtatgtgaagaaatatttaaatgtttaggacaataagcgggaatcctcggcaattcaattaccgagatgaaagcgcagggtgtgcatatctgcacaatgcaaatagtataataattctcatcctttgctctcagttgagaagcccccacctctttaggtggcgagtaataacaaatttgtctcagtgggagttaggtctccgattgagataaacgctccgcgaggatgcgcagtgattctgcatagaatatgcatttttacttgcggataggaattttccgcactgaaaattccgtacgatatcatactggtagcggattttgccgatgcttcgctgaccagaatcacgcgccaagtctcacggatgttcgacttgaattgaatcgaaaagcatttttctgaaaaaagtgcctgaaaataccgtaaaaatggcttgtctttaattgccgggtattttataataaaagttacaggaattgacaggaagagaacgtggtatagctgctgaacagattgcgaccggttatttttcgattggcggcgatggggctggaacggagtgattacctgcggtagcagtatgactgttacagttcacatgttgtgcaagcgtgtgaccataaatcctggaagttgattcgaagctacaagttgatgaagtacggatcgcagcataaaattataggaggaatactcgtggagaaagagatgatcattgtactggactttggcggacagtacaatcagttgattgccagaagagtaagagagtgtaacgtatattgtgaggttcatccttacaccctgccgctggaaaaaatcaaagagatgaacccgaagggtatcattttcaccggcggaccgaacagtgtatacaaggaggaatctccgagatgttcaaaggaaatctttgatctgggaatcccggtactgggtatctgctatggcgcacagctgatgtcctacctgttaggtggcgaggttgccacagcaccggtcagcgaatacggaaagactgaggtagaggtagacacaacatctaagctgtatgagggtgtatccccgaagaccatatgctggatgagccataccgactatatttccaagatgccggaaggtttccgtgtgacagcccatactccggtctgcccgattgcaggtatggaaaatgaagaaaaaggctggtacggcatccaggcacatccggaggtacttcatacacaggaaggctccaagatgctgcataacttcgtatacagtgtctgccattgtgcaggtgactggaagatggatgcgttcgtagagaaatccatcgaagaaatccgtaaaaaagtaggaaatggtcgtgcccttctggctctgtccggcggtgtagactcttccgtagcaggcgtcctgatggcgaaagcgatcggcgaccagctgacctgcgtattcgtcgatcacggtctgcttcgtaaaaacgagggtgacgaggtagaggcagtatttggtccgaacggtccgtacaagctgaacttcgtccgtgtcaatgcacagcagcgtttctacgataagctggcaggtgtaaccgatccggagcgcaagcgtaagatcatcggcgaagagttcatccgcgtatttgaggaagaagcaaagaagattggcaaagtagattacttcgtacagggtacgatttacccggatgtaattgagtccggtcttggaaaatccgctgttatcaagtcccatcacaacgtaggcggacttccggaacacgtagatttcaaggagatcatcgagccgctgcgtatgctgtttaaagatgaggtccgccgcgccggtctggagcttggtattccggaaaatctggtataccgtcagccgttcccgggtccgggacttggcgttcgtatcatcggtgaggtaaccgcagagaaggtacgcatcgtacaggatgcagacgctatttaccgcgaggagatcgcaaaagcaggtatcgaccgcacactcggtcagtacttcgcagccctgaccaatatgcgttccgtaggctgcatgggcgatgtcagaacctatgactatgccatcgcacttcgtgccgtcctcacatccgacttcatgaccgcagaatccgcagaacttccgtgggaagtacttggaaaagtcacaagccgaattgtcaatgaggtaaaaggtgtaaaccgcgtactgtatgattgtacggggaaaccgccggctacgattgagtttgaatagttggagcagagcttcaaagcctttattttcaagggttttgaggctcttttcttttagaattgcattttgattgcatttttttattcaactgctctgtgatagattgctgtatgctgattgctggtgtaatcggcaacactggttgttgccggagtata

SEQ ID NO: 11011 - DNA, 44840 bp, Unknown
  gut microbiota DNA sequence
aaaaaatatcaatatatatacttattgctttgatacaacacttctcaataaacaaattgcgttcgttgcaattagcgtattccaaccttgtaactcgttttatttcactatttttgaaatttacaaaatggagcgcttttaaaaagtaagttttgagttgaaaggaaaacactttatcagccttgttcgcgatagatgggaaaacacagatttcaagtttttctctcttattcgcgataaaagggaaaaaccatttgcaggtttttccctttctgttcgtgatataaaaggaatgaaacaaaaatctattacaattcctccacattctcaactacttttccgtctctccagatgcgctccagatcataaaacagtctgtcatcgcgggagaaaatgtgtacgatcagatcgccgtaatccatcaggatccatccggcagtctgatagccctcgatctgacggcactcatgaccggctttgccgagttcttcctctacattatctgccattgcctttacctggctggcgttgcttccgtctgcgatgacaaagtaatcagccagtacagatactccatgaatatcaatgacgcgaatatcttcgccttttttatcttccagcgcctttacggcaagtttggtcagctcttttgcttccacggggattatcctcctcattattttatttaaatcctgttaatgtgtctattgatgaacatgacgttcatgatagtattcccaggtctgttcggttgtatcatcctctgccgtgcccgtttcctttaaataattgcgggtgctgtccagaatctgatacagcgcttcgtccagatcttcaaatgcaagacggcggagcttcggcagatttggcgccttatcacggcgcggttcgatgtaatcggctacgtacaggatcttgtctaacagggacatcgccggttttccggtcgtatggcaggcgattgcagataagacctctggatcggtaataccatacttgtgttctgccatccatgcgcctaattttgcatgaatcacagccggagcccgcagttcaccttcagtcagttcaatgccatgctcctggcatttgcagatgatagtcgcatcatcatagcgctttgcacagtcgtggagaagtccagccatctccgcctgctccagattggcactgtaacgcattgccagagccatacatgtgtatgaaacacccagcgtatgttcatagcgcatcgggttcaatttctttttcaaatgcttccgtatctctgtaattctttcgtccattacacatttacctcctgatacaagccgtgctgttcgatatattgacagacttccttcggcaccagggaacgaacgtctgctgcgtgtcctgctcggaaagccgcgcggatctccgccgaagcaacatccatttcacggcagtgaagacgcagaatatgcgcctgatatttctggtttaaataggaaatctgctcatccagcgaacgatccgcctcctcatgctctcttgctgccgccaaaaatgtgacggctggaagaacatattcgggatgataccatttttcaatgtccataattgagtctgcgcccgcgataaagaaaaattcaacatccggatattcttctttcaataagcgaagcgtgtctgctgtgtaggtatttccgccggttctgcgaagttcaaaatcagacagcttaaaataaggatacggcgcgatcgcagctgcagtcattgccaaacggtcctttgccgctgtgatcgtatgatcctttttatgcggcgggatcctggagggcatataccagatgcagtcaagatcatattcttcatacgcctgtcttcccaacatgatatgtccattatggatcgggtcaaatgttccccccataataccgatctttttcatcgtcatccgtatcctttctgtcagagattcattcgcagaatgcagctcctttattttggcagaacgatcttacgtttcttctcgtcctttgcctctttataaagaacaattttcttgccgattacctgtactacctgtgcgtgggtacgctcagccagaacggctgccagctcattgccgtcatcgacgcagttcttcagaatattcagtttaattaactcgcgggcctccagcgcctctgccacagcagcggtcagttctggcgtcaggctggatttgccgatctggaagatcggatccatggtcatcgcgagaccttttaaataagctctctgtttgcttgtcataaaatctatctcctgttaaaattcaaactcagatccagtgtggatttctgagtttgaaatattgtaaatgtgtaactattcagtaggtctgcgcatttactgcgctgaccgtacgaaaacatggaccagcaggcaaaaatcccattgccgtaggcaatttttaatggatttttgcgcgtgactgtgaaggtactgaacagttacgtaaatgtcaattatttatagtaatcaaattcaagaccatacatacgaactgtatcgccctcttcgatgccagcctcttccagctcagccagaataccgctgtcctttaagaatttctggaagaactggaagcccttctcagaatcaaggtttgtgtaaccaagcatcttctcgatcttcggtccttctaccacataaataccatcttcattgcgttccacggtatacggaagattctcgccctgatactggtattcaaattctttttcgaaaataactggcttgcggtcaaccgttttcagcagatcatttacatggtaaaggagctcttttacaccctgtccggtaactgcagaaatggcaaatacctggatgccttccggctcaaattcgcgttttaagcgctctaccgggtcttcccagtcctcttcgccagtattgtaaatcgaatctaccttgttggcagcaatcacctgcggacgctctaaaagcgacggattatatgcttttaactccgcattaatggtgcggatatcctcaaccggatcacgtccctcgacggatgccgcatccacaacatgcacgagaaccttggttctctcgatatggcgcaggaaatcatgtcccagaccgattccctgggatgcaccctcgatgagtcccggaatatctgccatgacaaagccttgtccatcctgtagatcaaccacaccaagatgcgggttcagtgtcgtgaaatggtaattggcgatcttcggacgcgcattggaaacgcgtgaaagcaaggtcgatttaccgacgttcgggaaaccaaccagaccaacatcggcaattacctttaattccagctgtacccagagttcctgtgccggctgtcccggctgtgcatacttcggaacctgcatcgtcgaggtcgcaaagtgcatatttccaagaccgcccttgccgccttttaaaatcacttctcggcggttctcgccggacatatccgcgattaccttaccggattcaaaatccttgataacggttccttccggaaccttgacaatcagatcctcgccgtctgctccgtgacagcggcgctttccgccctgctctccgtcgccagccacatatttgcggacatgacggaaatcggtcagggtattcagtccgtcgtccacttcaaaaatgacatcgccgccgcgaccgccatcgccgccgtccggaccgccagcagctacgaaaagttcccggcggaagctgacatgaccgtcgccgccttttccggatctgatataaatttttgcactgtcggcaaacataaatacctccttctgatctgaaaaaagctccatacaatccgtatggagcttctttataattattcgttaattgttctcgggtaaacagaaacctgctttttgtctctgccctttctttcaaactttacgacgccgtcaaccatagcgaataatgtatcatctccaccgcgtcctacgttcacacctggatgaatcttggttccgcgctgtctgtaaagaatgttgccagctaatacgaactgtccgtctgctctcttcgcaccaagtctcttggactcagaatcacgaccgttctttgtggaaccaacaccttttttatgagcgaataactgaaggttcattttaaacatgcgttacacctccctgaatcgaattttaatgtatttatctccataactctccgcgatatcggtaagtccaagtatcagcgaatccatcaggagttttgattccgcacttacagtaccggtaaaatgaaaaataaactgacctgtcttttcatccacactgcccttaaaaccgtcatcggtaaatttttccaccgaattagccatattgacagtcagaacggatacagccgcacagacaatatctttgccgtactcatcatatccagcatgtccctttacttccactcccgtggtacatcctttggaatcggagtatacgtctacttgaatcatttcaattaagcgttgatcttttcgatcttaacttctgtaaagagctgtctgtgaccatttttcttatggtagccagtttttctcttatacttgtaaacgataacttttttgcctttgccttctttaacaactgttgcggatacagtagcaccctctacagtcgggcatccgatcttcatctcaccgttgttaacagccagaacctgatcgaaagtaacagcttcacctgcagcagcaccgagtctctcaactttgattacatcgccctcggcaaccttatactgcttaccacctgttgcaataatcgcgtacatctgatggcacctcctattatcattactcgccagctatggcggcttgcgcacttttagcctcgctgtgcggcacacttagatattctagcatcggaatatggatctgtcaatggttttttcttgaatttgggagaaaatttcaaaccagtgttacggataaagctgctttttccaagtcctcataagtaccaccaaactgttcaacccttttgcctctgtaaaataagcagaaaaaaagctggaagtcctgatcaacttcatttttcagtatttaccagaaagaatggtgaggatctccttttactatttatttcactcagccagagctgcaaactgctttccaatctccaccagtatctccgccgtcttctgaagcgaatccaccggaataaattcatattttccatgatagttatacccgccggtgcagaggttcgggcacgggagccccatgtaggagaggcgggcgccgtcggtgccgccgcggatcggaacgacctccggctcgatgccgcaggctgtcatcgcctctttggcggtatcgatcaggtacatgcacggctcaattttttctttcatgttgtagtagctgtccgttacttcggcgatcacggtgcccttaccgtatttgcggttcaggaaatcggcggcttcggcgaaaaatttctttttctgttcaaatttttcatggtcgtgatcgcggatgatataatttaactgcgcctcttctacatttccgctcatttcatccaggtgatagaatccctcataaccttctgtgtacatcggattttcaaagaccggcagcaggctctgaaattccatgccgatgagaagggcatttttcatcttgagcttcgcatctcccggatggatgctggctccctgaatccggactttgccggaagcggcgttgaaattttcatattcgatctcgccgatcggaccgccgtctaccgtataagcaaccgctgcaccgaagtctttcacatcgaaacgatccgcgccgcgtccgatctcctcgtccggcgtaaatccaatgcagatctcgccgtgcgggatctccgggtggctcaggaaatattctgccatcgtcatgatctccgccacgcctgccttatcgtcggcgcccagaagcgtggttccgtcagttacgatcagatcctgaccttttaagtcggctaaaaacggaaattctgaaactttcatgacaatttgtttttctgcatttaatacgatatctttgccgtcatatgcctggacgatgcgcggctttacgtttgttccggttaaggacggcgcggtgtctatgtgggaaatgaagccaagtgccgggatggtggttttctgtccaacgccggatgcactgtgagcagaggtactgcctgtattatccggaatgcgtgcaaacaagtatccgtactcgctcatccgcacatcggatgcacccatttcttccagctcgcgtttcagctcattggctaacagaagctgtttttttgtgctcgggcaggtgtcatatgcctcgtctgactgcgtatcatatgatacatatttcaaaaaacgttctacggctgttgtcatgaaaaatcatcctctctttctcctaaatcccggctcagcggttccagataatggactaatatatcccggtggcttttgatgcgccacgttttatccatttcctcatatgtaaaactctttcgtccgccctgctgcatccgctcccagtatgcgtccagatggaaaaatggcaggtagtaaagttcatccctctgtgaaaaatatataattaagaaagcaatcccgccctgctcttcaaattcccgcataaatgcgacctgatgcggatggacgttctgcagtggaaatgtatctgctgcgcattctttcgcatcaaagcagaccgggacgccctgaatcgcgccgatgtaatcgacggtactcttctgatcgaaatacgccagcgtgatatggcggctggttttatcgatcgagacgggcgtgatcggcgtcgggattttctggatcaatgccagctttttctcacggtaaagatcgtttgtgtggtttatcatatcctccagggttgaaccacgaagtccccggctgttccaagtccccatgttgttgctcctccacttatttttttgatttttcgcacaatttaaaatttacaggcgatgattggctgggcgttttggagctgatttcatcatctcttccatccgtttcatctccgccggcataggcgcggtaaattctttgcccgccagatatgaaagcggctcggagatcgtttccggcattaccagccgccacgcatgaagcatctgcgaacagacgccgaagcgtttcttcacttcctcattgacccggggatcgccgtactttggatccccggcgatcgggtgtccgatggaagccaggtgggcgcggatctggtgggagcgtccggtgatcagatgaacctccagaaaggtatatccatttccagataccagcggtctgtatgcagtccggatcggcagacttccaggggtctcctcttttcggatcgacacctgattcgtcttttcatttttcgtcagccatccctcgatgcgagcttcaccttttacgattccccgcacgacgcagacataatattttcccagactccgatccttgatgacttcggacatgatctgcagtcccggcagggaacgtccagctgccacgatgccgcttgtgttgcggtcgaggcggttgcagacggacggacggaagcacgccaggtcctctttctttaatttgccggaatccagcagatagtcaatcaggtattcaaccaacgattcatccgtctctttcgctttctgggacagcattccagatggcttattgatcagtaaaatatgttcgtcctcgtagacgatatcgagctttttcttttgaaccttctgaatcttcacttccgaaaatttctcgatcgtctcctctgccagaaacagcttgatctcatcgccctcggtcagatgttcggaaccgtcgcatttttttccattcagggtaatgtttttcttccgcatcattttataaatgaagctttttcccgccagattcagatattttgccagcagcttgtccaggcgctgccccgcctcatttttagatactgtcagcatccgcatggctgccgcctcccttttttacatcgataatccttttattacgcgcacgccgtactctacagttccatcgtcctcatactctgacgccggtttcaggctgtgaatccgcttgtcaaaggtgctgcgtgaggtcacgattttcaggttcggatccagtttgttagcctttaacagttcatttaaacctgcctccgcgcgctttacattcagctttggattaatgcagtacacatagatgccggtcgggtgaacgacggtcacatcggacggaatcacatcttccggtgtcgtcagaaccagatcatagagaacttcaaatttttcctcatacggcatatatgcctcatgaaacgcctgctccggcgtatggtatttgaaaatggcaatcagcggggaagcgagattcgccgccggaagtaccgtgacgatcgccatgaccgtcagaatttttttgacggaatcattgtctgtaaaagaccgcccaaccagctgtgcgatgataaataatgccagaagtgcgatgataaaaagctgtttccgcttgaaatgattgcggtagccataatcgcctttttttatctttttcacggtgtaaaaatcctttctatcatgtttttattgaatgatactagctttttgtctgatttaatggtttaacgcctgcatcgcgcgcagaatccattcatgcggaactaccttgcagagcacaaaaaatgccttcatccatacgccgtaaaccgacacgctttttcccgccatacagtcgcggatggcaagttttacaactttgtgcggatctgccatcaccagacgcttataaagcggaatctccccggttgtctcggcaatgtcgaaaaactcggttttgaccggtccggggcagaccgccgtcacgccgattctgcgcgggcggagttcttcccgcagggcgcggctgtagcttaagacaaatgccttggttgccgcatagatggcaaatcccggctgcggcagaaaggaggctgctgacgcgaactggagaatccggctgttttcgctcatatagggaagcaccatatgcgtgaccgcgcacagcgccttgcagttgagctctaccattcccgtttcatcgtcaagcggcaggttcccgaccgttccgattttaccaaagccggaagcatttaccaaaagctttacattgggcttgcgcgccgccagctcgttttccagcgtctcccgctgggatgcatccgtcagatcgatggcgaaacaccgcgccgggatcggcagcgtccgttccagctcctgcatccggtccatccggcgggcaatcagccagacttcctgaagtcccgaaaagcgatccgccagctgtctggctgcctcgcgccccatgccggaagaggcacctgtaattatcgcaattttcatgagaaattcctcccgtctcaagtatgtacgctcggagtcgttcctgcattccgagcgtacatacgttttatttcttcttgtgcacgttccggatggtttttttctttccgcttccgctgctctttccacctacagcgccgccaaatccccccgcatttcgtccatttccatttacgccggtctgtttgtgcccggtcataccgcccacagccggtcttttgtcgtcttttgcacgattggcagcagccggttttgccgcctggctgccatgatgcgcccctttatatccgccagccgcgaaatcgcgtcctttgatctgccgcggacggatcaggcatttcttatcaaaaccgatcagatccgttctgcctgccagacggagtgcttccagcaccagatcatagtttttcggattgcggtactggatcaacgcacgctgcatcgctttctcatgcgggttggtcggcacgtacactttttccatcgtgcgcggatcatatcccgtgtaatacatacacgtagacagtgtggatggcgttggatagaaatcctgcacctgctccggcatgtagccgaggtcgcgcagatattctgccagttcgatcgcctccttgagcgtggaacctggatgggaggacatcaggtacggaacgaggtactgcttcattcccagcgagtcattcatcgctgcatattccttcatgaactggcgataaaccttattctccggttttcccatccgttttaatacattatccgatatatgttccggcgctaccttgagctgtccgctgacatggtactgacaaagctcccgcaagaatgcccggtttttctccgccagcagataatcgaaacggatacccgaacggatgaaaactttttttaccttcggaatcgcccgcagcttctttaacagggaaatatagtcgctgtgatcggcattcatgtttttgcacggctgcgggaacaggcactgtttgtgcggacaggcaccgtaggtcatctgtttttcgcatgccgggtgacggaagtttgcggtcggaccgccgacatcgtggatgtagcccttgaaatccggttcctgggtcaaaagttctgcttcctgaataatcgattcatggctgcgggtctgcacgatgcgtccctgatggaaggtcagcgcacagaagctgcatccgccgaagcatccgcggttgctgatcaggctgaattttacttccgtgatcgctggaataccacccgctgcatcgtaacacggatgccaggttctcatgtatggaagtgcgtagacatcgtccatctcttcctgggtcagtggtttcgccgccggattctggaccacataaaggcggtcgctgtacggctcaacgaggcgttttcccgaaaatggatcggtgttgctgtactgggtgtaaaagctctccgcatacgtctttttatcggaggaaacctcgcggtaagacggcagacggatttcgtcgtaaacagaatccaggttttccgccttataaacagttccctcgatgaaggtgatatcctttgcctcgatgccgctggccagtgcatccgcgatctccacgatcgagcgctcgcccattccgtaggaaatcagatctgcctgggaatccagcagaatggaccgtttcatttttccggaccagtaatcataatgtgccagacgccgcaggctggcttcgataccgccgagaatgatcggctttttcgaccaggtgcggatcagattagaatagacgatcgtcgcataatccggacgttttcccatctcgccgcccggtgtgtaggaatcctttgcgcggcgctttttcgaaaccgaataatggtttaccatcgagtccatatttccggcgctcacaagccatccgagacgcggttcgcccagaatctgaatggattccggattcttccagtccggctgggcgatgatgcctactttatagccgtgcgcttcgagtatacggctgatgatcgcgtggccgaacgacggatgatcgacatacgcatccccgcacacgtagacaaaatcgcagctctcccagccgcgcttgtccatatccgccctgcagatcggtaaaaaatcatgtatcattttatcttgccccctgtatcagttcccggtagtcccggatataaaaatcagctaattctttcttttcttcgatcatggaaagtgaaaatacgtcctcgaccgcgccgacgcgcataccagcccgttttccagccagaatccccgccgggacatcctcaaataccaaacatttttccggctgtacgcccagatccgccgccaccttcagatagatatccggcgccggttttcctgccgccacctcacaggcagttgccaccacaccgaaataggaacggatttccagagaatccagcacagctgctaccatatcctgtgcattgctcgtcgcaattcccatgcggattccttttttctttaaaaatgaaagaaattccgcaacacccgatttcagcggtacctcatggcggtatttatcgatcgacatttcaatccagatggcctttatctcatccagggtcatcggcagctggaagcgatctttaaaatagattgctgtctcggaaaagctcatgccctcgatcaccttctcaagatcttccggacagtcatagccgtaacgctttaaaaattccacatcgatcgctttccacatccacatggaatcgaccagggtgccgtcgagatcgaagaggacggcgtctactgtgttccagttgatttcaggaggtgtgttattttgggtgtctgacaaattttcgtcattcgatacacaattttgtgaggttagcgttctttctattaacgctctaatttcatcttccgtcagcgcccggtactctcccgtcgccagtgcctcatccagggcaagcggtcccatcgaaaggcgtttcaggtaaatgacttcgccgccctctgcctcaaacatccgctttacctgatgaaattttccttcatggatggtcaggcgcgcctcgcagaggtcttctcctgcgtcgttccattttttctcgatcacaagctctgccggccgtaccggtgtgccatccttcagcgtcagtcctgcctgaaagcgcgcttcgattccttctttcagtgttccctttacgcgtgcaaaatagaccttatccacgtgttttttcggtgccagaagctcatgcgccagcgcaccgtcgtttgtgatgagaagcagtccttccgtatcaatatcgaggcgtccgaccgggaagaggtcttttcgctttgcttcatcaataaggtcaatgacagtctgatagcgcccgtcttccgttgcggaaacgacgccctgcggtttatttaacatataatattccgtgtctgcccagccaaccggctgtccatccagtgtaacccgggtttcgtccgggaatattttccggtcagactcgcggcagacggttccatcgaccagaacccgccctttgcggatcatctcttttacctgactgcgcgttccctgcttcatctctgccaggaaacggtctaaacgtatacttttaccctgtcccatcactgccacctccatccgggattgtatttatttttaagctgaccgccccgtttctgcgcccagccaagcggaaatccatccacacagattagtacaagaccatctgctgcctcttcctctgcggctgtcaatgtctcgccctttaaatagcggatcgtgcgctcatccgaggcattaaaatttaagtaatttacaaattcctgcatccgcaggttcattgccagcgcctgggatggttcaaaccgcccttttttcagttctccgagcagaagtccggtacgcagacagcggagcggcttaaaataacgtgtattgtcgcctgccagcgctgccgggaggtaatagatgcgctcgccgtcacggtagaattgctccggattccaggttcttaccggaagctggcgcagaagctcaaacaggggggaaaaatcctcggcggtctggttttgcgccacgttttttccctttccaaacattttccctttcgcttttccggaagccatctgtctggacttaccgtcttccgccacacggcacaaccgcgcttctatttcctctaccaaaagtggatcgctcaatgctttctcaccggcattttccaaatccttgacatttgcgtctggtttctccgtccgcttctccaacagcgcaacaaaatgtccttcgccctccagacggtgcggaaacaatctcagacagccctcaatgccacggcttccctcaaagccatattccggtttctgcggcacgaccgccatctgaggatatttctccagaatatactcgatcgttccctcgtcctcgcccctgtcaaaggtacaagtcgaataaaccagtttcccgcccggcgcaagcatctgcacggcacagtcgagaatctggcgctgcagcggcgcataataatcgggacctttttcgttccagctctttaccatcgacggatcgcggcggaacataccttcgccggagcacggcgcatcgaccagaatcttatcaaaaaactccggcaggatgccagccattttttccggtgcctcgctcgttacacagatatttcccgctccgaacatttccagatttttaagaagcgcttttgcgcgcgaattgctgatatcattggaaaacaggacacctgtaccggctaatttcgccgccagttccgtacttttaccgcccggtgccgcgcacaaatccagaacccggtcgcccggcttgatcggcagccatgccgccggtgacatcgcactcggttcctgcaaatagtagagtcccgcgtagtaccacggatgcctggatgggcgttcgccctgataataaaaaccgttcttcgtccacggcactggtttcaaattccagtccgccgtctgtgccatctctaaaaactgttccggtgtcagcctgcccgtgttgacgcgcagccctgaacgcggctcttcctcatacgaagccagatactccgggtattcctcccccagaaattgtttcattttttcaagaaattcttccggcagttctcggtaatccaatcgttttcctcctgtttttgtctattgctctgtatatccatttataatcgtgattctaaagactttttcttcgcgctcattcgttctttctttgttcggtatgccggttttcaggcttccaaaaggaatgagccattttctgtctacatatatataatctatctttatattactttttaatgatagaaaggcgctcccatgccatatataaaaaaaatattatccgccctgttcccagcacttatcctggcgcttctgctctcgcatccgcgtctctctgcggatggggcacagaaaggacttcttttatggttcaatacggtctttccgacgttatttccctttatgctcttctcaaagcttttagctgaacacggcggcgtccggctgcttctagcgccatttcatccggttttggaacatcttgggatgtctgtctacagcggctatgccctgcttgccgggctgctctgcggttacccgatgggaatgaaaactgccgccgattttaaccggaaatcgctgctttcggcacatgaaaaacggcttctgaccgccatcagtgcttcgccaagccccatgtttatcgccggatatgctgcacctaggctgaacccggcagttccgtcaaactatctggttctggcactatatacgccgcttttattggttggaagtcttctatgcatttataataaagtaacttcttttacccttcaaaaccgatttttttcgaaagaaaccggctctgtcaagcctgcccgcacaaaatccacatctgtctccgttcccgcttccttcgacaccatcctgatggactgcatcgaactgcaggtccgcatcggcggtttgatcatgctgtattcgatcctcgctgcctttgccgacgccttctgttccggcacgctgcgtctggttctgatcgggacggctgaaatgacaaccggcatcgatgcgatcgcccgttctggtgccatattcagtatcccggttcaatccggcgcgatagcggcatgtgctgcgttcggcgggttatccgggatcgcccagacaaattcagtcatacgggacagccgaaaagacagagaaaaaaatgccggactttccatccggcattatgtactgtggaaactggttcacgccagtctctcgttcgttctctttattctgctgcttcgccggatgccgcctgtgtagcggccgctgctgcctcggcgcctgtgttctcctccggctcggtcacgacactgccagccagctcattgcggttggaagatacgacatcgtagctggactgcatcgaactcatgtaagactcgaaacggctctgcgcgccctccatcgaatgcttgatgatggtctgcaggctgcggagcatgtcgtccgtgtactgaacggaaccctggcggatattgtttgcctctgtgacagcgttgtccacgatctgctgtgcctgtgcatttgcctgctcaataatgctgtttgcttctgcatatgcacgctgcatgatctcatgctcattaaccagttcattggtctgggcggtcgcctcggctaccatcgcgtctgcctgggaacgtgcctcctgcagaatcgcatcctggttgctgatgatcttctgatatttcttgatctcctccggaatgcgaagacgcagttccacgagcagttcttcaatctcttctttatttactaaaatcttcgtgttggacagcggctgaaacttgcagctgtcgatataatcttcaatttctgtgatgatctgttcaattctgctcatagcttttctccttacttacattccctgtcttcctgaagcgcctggtatttctcctgtacttgttttgcaatgaccggatcgagaaattcggaaatgtctccgccgtacatcgcaacctcttttgccatactggaacttaaatacgcgtatttaaggttcgttgtcagaaacagggtatctatttcgggtgcaatcacccggttcatctgcgcgagctgcagctcatattcgaaatccgtgatcgcacgcagaccacgcacgatgacctttgcgtgattctggcgcatgaaatcgaccagaagtccgtcaaacgactgcacctccacgttaggaatgtcttttgtcacttcctctaacatcttaacacgttcttcgacagaaaacaacggagattttgcgttattacacaaaactcccacgatgacctgatcaaaaatttcggaggatcgctttataatatcaaaatgtccgagcgtcaccggatcaaagctgcccggataaatggctgttttcatctttttttctcctttggtattcaagcttttcggataaacagatgtttattcgtcttatatatcttctctttttcgagatggtatcccagttctgaaaggtagctgcacccggtctctttcgatgcctctgtgatgatcatcgtatgttcatctgccagggacgaatgtgccagataagtaagcacttctttctcccagagatggttgtacggaggatccataaaaatgaaattaaacgcgctcttccggttttctatccgtttcaatgcatccgaaatatcacagtttaacagcgtcgccttatcagctaggcgggccgctttcagattgtcacggatgcagtccgccgctttcggattcttctccacaaaaacagcttcttttgccccgcggcttaaagcttcgatcccgatcgccccgcttccgctgaataaatcgagaaatgtgcatccataaatatcattctgaatcatattaaaaagagtttctttgatacggtccgtcgtcggtctcgtatccattccctcgatcgtctttaaagtaagccttctggcacttcctgctattacccgcatggatttttctccatcttactagaaatattaatgtattttgaactgcaaccgtaaaattcaccaaacagtttgcgtattttttaacactacatctgttctattatagtatgagttttactgatatacaagcataaaatcggatcaatactaacttttttccctacattgtgggagttttgccccaaaatgtcaattcgcacaaaaccttctagtgtatttcacttttaagatccgcatactgagaatgtaacaaaaagagacacccggacaaacgaaagtttgaaggggcacacgcaaaaaaggaggcgtctgttatgtctagttccaacaacacgaacaaaaccaatgtaccggaagccaaggaagcgatgaaccgctttaagatggaggttgccaatgagattggcgttccgttaagcgagggctacaatggtaacctgacctccgcacaggctggttccgtcggcggctatatggtcaaaaagatgattgaggaacaggaaaaaaagatggctggtaaataaggcatcgtagggctcttctgaatcttcgctgaaacggcgaaaaaaacggcagcagcatgattgacaaaaccggacttgaacgaccgattttcaatcatgctgctgttcttttctgcaaaacattcattcacttgtttgacagacagattgtatacttactttagcgataaaaatgccgccagattccccctcttatctcccatcacgcggtgtgaatataaaagatccggattgcatttcgtacatacattcgtcacagccagatgctccggcaaaattccggcattcaggagcacccggcggttcgcgccccagaggtcaagctgatacttgccattccccttattcatgagaatcgatttcccattccaggaataacaggatgttgaatcatcctgactgatttctgctccaaattcttctttaaatgcgtctgccacatcctcactgacctcataacagtcccggcagatgctcggtccgatgcagacgcacagatcctccggcttcgtgccgaacgcctctcccatcgcctcgatcgttttctgtcccatccggtgaacggttcccttccagccggaatgcgacagtccgatggcatgatgcaccggatctacaaaatataatggtacacagtccgcaaaaaatgtaaccagcgtcagccccggcacgtttgtgataagcccgtcgatgttttcataatcgcgttcccgccagattccttttccagcgtccgcttccgtaacaagacggatattcgtcgtgtgtgtctgatggctgagcaccatctttgacacatccgttcccagaatccgcgccattttccggtaattttcaagcacatcgtcccggttgtcgccgcgcgtcagcgaaaagttcatcgtactgaaataccccttgctcgctccgccaagccgggtagaaaatgcgtggcgcaccatcctggtctgctctaagagcggaaaggtaaaataagccactccgtttgactcatgaagggtaattggtgtcggatgaactgttttttgtatataggtaagcgccatgattgtcacatcctttttctgtctcttgctcaaatctgattgtgcagtttttgaattctttcatttgtaattatccgcaccagaacgcgtcccgaattaatctcacgttactgccaagcaccgccaccacatcaaaccggcacggcgtgtcctcggaaatatgataacgcgtcatataataccgggcggtacgaagaatccgcgcctgcttgcgggcatccactgcctccgccggatcgccttcgtgttcatcgcggcggtatttgacctcgataaaaaccaggtagtctctatctcttgcgataatatcaatttcaccctggcgacagcggaaattccggcagagaatctgataaccatgccgggtgagatattcacacgccagggtttcatattcagttccgatggcacggcggttgaatgaatttccatgaagatgaaagtttctttctcccattcagctccctttctgttatttcattccctgcatcgtggcttcctcgcccagcagcttcttcaaaaaggttctccggtggatcgggcatggaccataggttaaaattgcctcgttatgcatcttggttccgtatcctttatgcttcgcaaacccgtattccggatagattttatcgtactccatcatcatatgatccctcgtcacttttgccaggatactggctgccgcgatcgagacactttttgcatcgcccttgataatcttaatctgcttttcctccgaaatccccggaatgatgaccgcgtcatttaaaaagatatccggctcctgcggaagctgtgcgactgcctgacgcattgcttcataggtcgcctgcaaaatattgatggaatcgatcacctccgggcttacaattccaattccgtaggcagctgccttttctttgatttccagaaataattcttcccggcatttttccgacaattttttggaatcgttcagccgcagaatcgtacagtctttcggaagtaccgcgaccgccgccaccaccggaccggctaatggacctctgcccgcctcatcaatgccgcagacgatccctgcactttcgtactgatgttcataggcgcgcattccttcgagacgcgccagttctgcttccagtttttctcctgttagttttctcatgttttcctatacctccggcacttccagcgtcacgcgccccagtttgccgctgcggaagtcatctaataggaagccagccgcttttttcgtatccagctcgctgccctttaaaagacaggaacgtgcccttgcgatttcacgcagaatttcccaggctttttttgtatcttcgccgtccccagccgtattctcaaccagcgtcacaccataccgctcttccaggcgctttccgtaacgtccggacatatttttgatcagctcggctgccagctcttccttatccagaatctcatcgttgatcgagccgataaatgcaaggcacagtcccacattcggatcttcaaatttcggccagaggattcccggcgtatcgagaagttccagtgtcttatttaagcggatccactggtttcccttggtaacacccggtttatttccagtcttggcgcaggcttttccggcaaaggaattgataaaggtcgattttccgacattcggaatgccgactaccatcgtccgcaccgggcggtttttgataccgcggcggcgatcacgctcaattttctccttgcatgcctcctgcaccagcggctggatctgcttcattcccatgccgctgcgcgcgttgatgcggagtgcatggatgccctgctccttaaaccatgcgatccagcgctctgtacagccgtcgtccgccagatccgccttatttaaaaggacaatccgtccctttcccttcgcaagctcatcaatatccgggttgcggctgccgagcggcacgcgcgcatccaccagctcaatcaccagatcgatcagcttgatatcttccttcatggctctttttgcctttgtcatatgtccagggtaccattgtatctgcatgaaattttcttcctttcttagaacctatctcgacgaaatcaacccaaaccggctaaccggctggatccgcagccagacctttcctttgatctgccggaacttcacatttcccacattggaaaagcggctgtcctcactgccggagcggttgtcacccagcagaaaatattcgtttttatccagactaatcggatattccgccagtccagccagagccgccttacccaagtcgttcggggcgtctaatttttcattattaatgtaaatataaccgtccttgatctgcaccgtctcacctggcagtccaatgacgcgttttatattgtaatttcccgtttctttttcaaatacgataatgtcatagcgctttgggcgcatcacgcggtaactcaggcggttcatcagaaccttttcgttctgcgacaacaccggttccattgattgaccgctcacccgtatctgcgtccccatcgcaaacacggcgaaccacgcgatcgaaattaccaccgcgatatccacgatccatccaaccaccagacggatgcggtttttatcctctttcagctccatatgtcactccctctctatccgttccccatgaatcatcgctcatgtcgcaagcgaccgcgctcggcgcgagaatgtgccaggacacattcttttttataatagggaatcacaaggaatttcctattacacgaaaaaaagctgctgcacagctcctcccgccgcgccggacacacataaccgcatatccggatgcacagcaggctgacctgtacagcagccccatccgcttcagaaattattttactaactcttttaccttcgctgccttgccgattctggatctcaggtagttcagttttgctcttcttactttacctcttcttactacttcaacgttctctacagacggagaatgtaacggccaggtcttctctacaccaacaccgttggagctctttctaacagtgaaagtctcgcgaacgccgccgttctgtctcttaataacagttccctcgaaaacctgaattctctcgcggtttccctctttgatcttagcagatacacgtactgtatcgcctacgttgaaactcggaacggtttcctttaactgagctgcttcaatgttcttaataatctcgttcatctttgtgaacctcctttaaaatctttgatgttcttaatacgatcttttatcccgtaaaaacgtgcttcctgtaacagcggaacatctctttatttcacagaatatgattttatcatagaaatccttgatttgcaaggactttctgctctcttttttagagtttttttgtttctttttcctctttctgacgaatcagctcttccagatatttcttctctttcttatccagaaccgcatcctttaaaaggtccgggcggcgttccagcgtccgttcgatcgatttctgacggcgccaggtctcgatatttttgtgatgcccggtcagaagtacgtccgggaccgccttatccataaatacaaccgggcgggtgtactgtggatattccagcagattgtcgtgaaatgactcaaattccgcggatacgtcattatttaacacaccaggcaccagacgggaaatgcagtcgatcataaccatcgccggaagctcaccgcccgtcaggacataatcgccgatggagagatagtcagttacaaccagctccagcgcgcgctcatcgatcccctcataatgcccgcagaggaacaccagatcctcttctttcgccagttcttccgcgattttctggttgaaaacctgcccctgcggagtcagatagatcactcgcggacgttttccggtgcgcgccgccagggcttcatatgcatcgtaaatcggttccggctgcatcaccataccggcgccgcctccatagggcgcatcgtctacatggtggtgtttgtccttcgagtaatcgcggatattgaccgcctccaccgagatcaaccctttgtcaatcgcacgccccgtaatacttgtgttcagtccccccatcaccatctccggaaacagggtcagaatatgaaaattcatccgtttctcctatatttatacagcactttcacaacggtactttcattttaggattttcattccatttacagatccagcagaccgtccatgatatgaaccgttacggtgccagcctccagatcgacattcaggatgcattccttgatggacgggaagagatattcttttccctcaggtccttcgatcacgtacacgtcgttagccgctgtctgaaggatatccttcaccgtaccgaactcctcaccctcgtccgtcagcactttcaggccaatcagatcggcaatgaaattctcatccggattcagtttcaccgcctgatcgcgggtaatcagaatatccttattacggaacggctcgcaatcctcaatccgattcatctctttaaatttaagaatgaccatatttttgaaaaaacgcacctgttccacggtcaccggcattttttcttttccagtgtcgatatacgctttttttaattttttaaaacgattcacatcatcggtggtaggaaatactttcacatctccgcgcagaccatgcggggatgtaattacaccaactctcagataatcaaccattctataatcctcctgtatgaaatagaacgtgccttgcattcccgcgccgggttgcggttgcgttggcatcctcttgaatttcctgtgattgatataaaaaagccggacaccctttcaggcagccggcttttcagcttcgtctgtattactgaatctctacaataactttcttgtcttccttggatgaagccgccttgacaaccgagcgaatcgctttcgcgatacgaccctgttttccaattaccttacccatatcggccggtgcaacggaaagctcgattacagtctcgtcgtctttgaccgattctgtaaccactacctcgtccgggttctcaaccagtgctttcgcgataacttctactaattctttcatacctttgcacctcacaggtcagtatgcttgatttactggataccagcgatctttaagagtttaccaacagtctctgtcggctgagcgcctgttgctaaccatttcttagcagcttcctcgtcgaatttcagagtgctcggctctgtgttcggatcatagataccgatctcctcgataaatctgccatctctcggggatctggaatctgcaacaacgattctatagaaaggagctttcttctgacccattcttcttaatctcatctttaccattttaaattacctcctgaaattttccttacttccttgaattataaaatatagctaatgcacactgcatctactaacacttgtttaaaacggcagcttcatcttgccaagcataccgccgagtccgccaagacccttgcgttttccgccgcctgccatgcccggaagctgtttcatcagctttttcatatctccgaactgttttaccaggcggttgacttctgcgatatccacgcctgcgccctgtgcgattcgtttcttgcgggacggattcatcagatccgggttgcgccgctcttcggctgtcatcgagaggatgatcgcctccacgcgccccatcgtcttctcattttcatctaaatccagacctttaagctgtcccatgcccggcatcatgctcatgatgctcgccatgccgcccatcttcttgatttggttcatctgatcgaggaagtcgttgtaatcaaattctgccttcttaatctttcggccgagttcttttgccttctcctcgtcgatcacagcagatgctttgtcgataatggaaagaacatcgcccatgcccaagatccgggaagccatacggtccgggtaaaactgttccaaatcggaaagtttctcgcccataccgacatagagaatcggttttccggttaccgccttgatagaaagagccgcaccgcctcgcgtatcgccatccatctttgtcagaaccacaccgtcaatgccgattttgtcgttaaacatgctcgctacattgactgcatcctgaccagtcatggcatctacaacgagaagtgtctgataaacatccacattctctttgatctcaaccagctcatccatcatcgcttcatcgatgtggagacggccggctgtatcgatgataaccacattgttgccatttttcgccgcgtgctcaagcgctgcctttgcgatattgaccggtttgtggttcgttcccatcgcaaatacgggaacaccctgtttttcaccatttttctgcagctgttcgattgccgccggtcggtagacatcacatgctaccagcaatggatttcttccctttgccttgagctttccggcaatctttgccgttgtggtcgtcttaccagcaccctggagacctgccatcatgatgacggtaatctcattgcccggttttaacgcaatctctgtcatttcggagcccatcagcttgaccagctcatcgttgacaatctttattaccatctgtcctggattcagaccatttaaaacatcggttccaatcgcccgctcctgtacagaattgataaactgttttactaccttgaagcttacatccgcttccagaagggccatcttgacttctttgagtccggcttttacgtcgctctcgctgagtcgtcccttgcctgtcaggtttttaaacacattctgcagtttgtctgccaagctttcaaatgccatcaaaaacctcctgcattataaatccaatatctcgtttgagattcgcccgattgcctcaatcagcgcctgattctgtgtctggctgaattcttccgtcaaccgatgaatctcagttactttttccttggttttctggaatttggcaatcagtccaagcttttcctcataaccaagaagtgtacggtcacagcgccggatcagatcatgcacaccctgacgggtaatgccctgttcgtctgcaatctcactgagggacagatcgttaaataccacatccttatatacactttgctgatgctttgtcaggagttctccgtagaaatcatacaaaagaccctgttcaacaattttttccattcctcatcacctgtgttatcatacacgataatctaattggtgtcaagtgttttttctttacaccaatcagattatcaatcgaattattttttaatgacgttctgtttatgtttttcaaattctatccccgtaccggatggccatcttccttcggcatcttcttcgccgcccgccagaagcagatcatatgtgccgtcgctgtgaccgcccaggagatcgggtacgacagatacaggatcgccagcgatcgctgcgctgcaaatatggtaaagatccaaatcactcgcagtccgcaggcgccggtcagagagactagcgtcggcaggatcgaatacccaagtccgcggatgcttccgaccatcgtatccatcacgccgcacaggaaatacgtcgtacagatgatcgacatccggagcagtccataggaaataacgtcggcgtcttctgaatatatctgcaacagccacggaccgccgaggtatgctgcaaatccaagcaccagtcctactgtcacaacgacgccctggcaggtggcaagaatctttttgatccgcgtgtatttctctgctccgatattctgactcgtaaagcttaaattggtctggtacagcgcattcatcgaggtatacacaaatccctcgatattctgcgatgccgtgttgcctgccatcgcgatcgaaccgaaggaattgacagacgactgaatcagtacgttggagatcgcaaaaatcgccccctgaataccagccggaagacctacctttataataagaagaagtttcctccggttgactcccagcttggaaagcgacagcttcatcgcgccatctgaacgcatcaggcagcggataaccagaaatgcggaaatacactgggaaatcacggttgccagcgcgacacctgctacatccatctggagctgggtaacaaagaatacgttcagtgccgcattgataacacctgccacggtcaggaaatacagcgggcgtttcgtatcgccgatcgcgcgcaggattgcacttccgaaattgtacaccatcgttgccggcataccggcaaaataaatccgcatgtagatcgtcgatttatcgatgacatcgtccggcgtccccatcagttccagccagaaacgtgaggtaaacaaacccaaaaagaccagaaacagcccgctcatcaggctgaccgtgatcgccgtatggattgtctcgctcatgtcgcggtcattcttcgcaccataatagcgcgctaccaggacattcgcgccgatcgacagaccaataaagacgttaatgagaagattaataagggaactggtcgagccgactgctgccagagactggctgcctgcaaaacgtcccaccacaatcacatccgccgcattaaaaagaagctgaagcacgccagaaagcatcaacggaatggagtatgtaagtacctttctgagaatcgggccattgcacatatccatttcataggatttcgccatgtttttttcctttcgtatccaaaaaaagtcctttcatttttcaaaggctggtcagttgatactattctaccccctttccatacacttttcaagcgttcttttatcgttgactttttctcagcgcgtcttataataaaagcagctaaattgtgactgtgaaggtactgaacagttacgataaatttatggcgtaaactgtctggcatcttcacagttacagccactttacttataaggaggacatcatgatgaacacacagcgacttgagaacgttttgaagaaaatggaaacagagggactcgagcagatgattatttccgatccttatgcgatctattatctgacgggtcgttttattgatccgggtgaacgtctgctggcactttacattaaccagtccggcaagaataagatctttatcaataacctctttaccgttccggaagatctgggcgtagagaaattccgcttctcggatacagacgattacctgactcctctgtgcgactgtgttgaggcaggcaaaccgctcggtattgataaaacatttgctgcccgtttcctgattccggtcatcgatcattcgggcgcttcctcctacaaggtcagctccatctgcatcgatgaagtccgtgcgtgcaaggatgacgaagaacgtgaaaaaatgcgtgcggtttccgcaatcaatgataaggcgatggcacagttccgaggtctgatccatgagggcgtgactgaggaagagatcgcttccaagatgttagatatttataagagtctcggtgcagacggatattcctttgagccgctggttggcttcggtgcaaactgtgcgcttggacatcacggtccggacaacacggttctgaaagagggcgacactgtcctgtttgacgttggatgcaggaaggatggctattgtgccgatatgacacgtactttcttctataaaaaagtaccgtccgagaagcaccgcgctatttatgagaccgtccgccgcgcaaatgctgccgcagaagcaattctgaaaccgggcgttccgctctgcgaagtcgataaagctgcccgccagatcatcgaggatgccggatatggtccgaactttacccatcggctgggacatttcatcggtctggaagtacatgagtacggcgatgtttcttctgcgaacaccaaggtcgctgaggttggcaatatcttctccatcgaaccaggtatttatgtagaaggcgaagttggcgtgagaatcgaggatctggtgctgattactgaggatggatgcgagattataaactccttcagcaaggagctggatattgtagagtaatcacatcgcatcatttataacacgattataaaaaagaaactgttacagatggtatttctggtaattccgattacaaatcacgaatcatccagaaagccagcatctgtagacagtttctttttagttttctttaaaagctaattataattttcatttataaaaaggcgtttttacgcgttcagcttctccgtcatcatttcattcactttacccggatttgccttgcccttcatcgctttcatcacctgaccgaccaggaaaccaagtacctttgtctttccgctcttgtactcttccaccgtcttcgggtttgcggcgagcacatcggaaactgcctgttccagagcactgtcgtcattgaccatgccaagtccgtgtgcatcgacataggcggacggatcgacatcttgctcaaaaatagctgtaaatacttctttggccgtgttgttattgatcgttccggcatcgaccagatcggtgagctgtgccagatgtatcggggagaaccacaggctttcagcgtcctctcctttttccttgagcaggcggcttgcctcgccgatcagccagtttgccaccttcttcggtttctggcagagggtggtggtcttttcaaacatatccgccattttcttagactcagtcaggatgcggctgtcatattcagacagaccatattcgctctggtaacgtgccattttttctggctgcaattccggcagggcggcgcggacagattccagccactcatcgctgatgcagaccggcggaagatccggatccgggaaataacggtaatctttcgcatcctctttggaacgcatcgcataggagtattccttgttgtcatcccagcgtctcgtctcctggatgaccttcctgccctcttccagcagctcaatctggcgggtgcgctcgccgtcgatcgcacgggcaatcgccttgaaagagttcaagttcttcatctcggttctcgtaccaaatgtttcacttcccacctcacggaccgataagttgacatcggcacgcatcgaaccttcctgtaacttacaatcggatgcgcccagatactgtaccagcaggcgcaggcgttcgaggtaggcaataacctcatcagcactccgcatatccggctcagaaacgatctcgatcagcggcacgccgcttcggttgtaatcaaccagcgagcagtcttcccactcgtcgtggatcagctttccggcatcttcctccatgtgaatttcatgaatacgaattttcttttcaccggcaggcgtatcgatcgggatataaccgtcgtggcagatcgggagatacagctgggaaatctggtagttctgcgggttgtccgggtaaaaatagtttttccggtcaaatttacagaactggttgataccacagtttgccgccagaccgacagacatcgcgtattcaacgaccttcttatttaaaaccggcagagaacccggcataccggtacaaaccgggcaggtatgagtatttggttttgctccaaattcggtggagcagccgcagaaaatcttggttttcgtcgccagctctacgtgtacctccaagccgatgactgtctcatattctttcttcatcttatctgccctccttgtctgtcataaccggaagcttccatgcacctctcgccttttcgtatgcagatgccacgccaaacagcttcttttcctggaagcagtctgcgatcatctgaagcccgatcggaagtcccttcgaatccagcccgcacggaactgaaatgcccggaagacctgccaggttgaccgaaacagtataaatatcgcccagatacatcttcatcggatcggaaaggctgtcgcccagcagcggtgccgtggacggcgctgccggtcccagaatgacatcgtatttctcaaacgccttgtcaaatgcctgtttaattaatgcttttgtgcggagtgctttcagataatatgcatcgtagtagcctgaactcaaaacgaacgaaccgagcatgatacggcgttttacctctggtccaaagccctcggaacgactctttttatacatttcatgtaaatcttcatattccggtgtgcggtaaccgtacttcacaccgtcaaaccgggacaggttggagcttgcctccgccgatgcaatgacgtaatatgccggaatcgcatactcaaccatgcctaaatcaaaaaactccacttctgccccgcattcttttaacgcatcagctgcctccagaacagctttttttacatcttcatcgagtccttcgcccagatagtcggacaggattccaatcttcattccttttacctctccggtcagggcagcggtaaaattgtacgcctcccgcttgacagaagtgctgtcctttttatcataggaagcgatcgtctccagaattgccgcgcagtctgcggtatctttcgcaatcggtccaatctgatccagcgaggaaccataggcgatcagaccataccgggaaaccgttccataggtcggtttgatgccggtcacgccgcagaaggaacttggctggcggatggaaccgcccgtatctgaaccaagagcaaaaaaggtctctcccgctgcgacagccgcacacgagccaccggaagatccgcccggtacatgctctgtattccaggggtttttcgtcggtccaaaccaggatgtctcggtcgtacttcccatcgcaaattcatccatatttgtcttgccaagcaggatcgcaccggcttttttgaggttcagcgctgcctccgctgagtacggaggtacaaatccccttaaaattttggaactgcacgttgtctcaattccctctgtacaaatattatccttgatcgccattggaacgcccgccagcggtccggtcagggtgccatcgtcaatctgtttctggatctcatccgcctgtgccagtgctgcctcctcggtcagcgttacataagcatgaactgtatcttcatatttatgaatccgttccagagatgcctgtaccgcctcccggacggagattcgtttttctttaatttcttttcccagctccagcgctgttaattctgaaattcccatcctgatttcctccatatcgctgcttatatctctaattctttttactccactgtcctaggcaccttgtactgtttttctttctgctccggtgcattcgaaagcatcgcatctgattcatctccattttccacgacatcttcgcggaacacattgtgaatgtcaaagacatgcgacatcggttctacctccgaagtatcaagctgattcagcatatcgatatactcaagcatccggctcatgtcgcttttcgctgcctccttttcctccggggaaagggaaagctttgctaaaataccaacataatcaatcatttcatcgtctattttcactgccataagttctgttccttcctattataatatgtgttatggacaagctctttgtttcataggaaattgcgtcctgtcacgttacggtaccagacggctcatatctctcgggaagagcgaaacctcacggacattctcctcttcaagcagctgcatcgtcatacgttccagaccgataccgagtccgccgtgaggcggcataccgtgtttgaaggtgcttaaatactgttccattccctcggtatccataccgcgtttttcaatcttctccatcaactcggtgtagctgtggatacgctgtccgccggttgtgacttccagtccacggaataaaaggtcaaagctgagtgttactttcggatctgtcgggtcatccatcgcatagaatggacgcttcttggatggataatgggtgacaaacacgaaatcggcgccgtactcttctttaaaatagcgtccaatcaggtgttcttcctccggctccagatcgtatgggtttttgatctgggttccatatttttcggaggcaaggcgtttcgcctcggtaaaggtcactgccggaatcttctctacttccggaagtttgactttaaggatttccagctccgtggaatattccttctttaaaatttccaccatatgatgaagaaatccggtttccatcgccatgatatcggtaaaatcatcgatatatcccatctcaaaatccagtccggtatattcgtttaaatggcgtttcgtgttatgcttctccgcacggaacaccggaccaacctccatcacacggtcaaacacgccgaccatcatctgtttgtaaaactgcggactctgcgctaacaccgccgggcggtgaaaataatcgagtttaaagacgtttgctccgccctcggctccttttgctccgatcttcggggaatgaatttccgtaaatccttctccatgcaggtactcccggaatgcccgtgcgattccttcctggattctgaaacgtgcgcgctcccgcaggttgcggagtgtcagagaacgcatatccagtttggcttccagggatgcgctcattttccattttgatacggcaatcggcatcggttcttccggtttcgagaggatccgaacactctttaaacgaagttccatgcctctcggcgcccgctcttcttttcggaggacaccggaaacttctacgaatgtttcttctcttaattcagcaaaatccgcgtcggtcacacctttttcatagacagtctgcaacacgccgtcacgtttccggagaatcacaaatgcgatatcgcccatgttgcggacactcatgatcgcgccgtttacctttacttcccgtccttccataccgtctgcaaacacggctgccagatccagcacttctttttcctttttacctgtcataaattccatcgctgtttcctctctttctctgctttttgatatgtccgggacgggaataatgaaaaagaatgtgccttggcacattctcgcgccgagcgcggtcgcttgcgacaaactacatcttcgcgcgagtgcgcatcattggcacgttagtgcctttttgtgtaataggggattccaaggaatttcctattacacaaaaagtcccggaatgacgttcactcacatcattccgggacgggatattcccgcggtaccacccgcatttaaaaagaaacgattgtttttctttttactctttcgctgcttaacgcgcagtcacgtgatgacctacctgcggcggctggcggggtgtccagtgtcgctctcagtcatccggctccggagtgttccctattgtcccgctccctcctgacacggctctcagccggtgaccgcgtctttctgtcggattcttcgaaacagagtctccatctttgccttttaaaaaagtgggcacgaataccatgattatcatggcatccttgcccaccccgttggattcaattttttatgttcaaactataaactatttttctgagtttgtaaagaggttttttaattttttttcacgcagtaattctgtatggaataggtcagcttcgctgaccagtatcacgcgccaagtctcacagatgttcgacttgaatagaagaaatcttgtacaatattctcccttgaaacattttttcaaaattcgtgtgcaaattgtattgacattcagaatttttcgtgtatactactacacataaaagcaagggcgcttcgagatgatcgaggtgcccttttctttatgtaaaatgtgtcagagcacattcatcttacgtagatttaatcatcacaaaatcgcagacataaaacctgaaaggagacatgagttatgaaaaaaaacatccctgaactgtatggaagtcttgtattcaacgacaaagtcatgaaaagcaaattgccgcgagatgtttataaggcactccgcaaaacgattgaaaatggcagtcatctggatctcgacattgcaaatgcagtcgcagttgcaatgaaggaatgggccgttgaaaatggtgcaactcacttcacacactggttccagccgatgaccggcatcactgctgagaagcacgacagtttcatcaacccggttggcaatggcgaagttatcatggatttctccggcaaagagctggtaaagggcgaaccggatgcatccagtttcccatccggcggacttcgtgccacctttgaggcaagaggttatacagcctgggatccaacctccccggcatttattaaagacgatacactctgcatcccgaccgcattctgttcctacagcggcgaggcacttgataccaaaacccctcttctgcgttcgatggaaaccatcaaccgcgaggcgctgcgtgtcctgaagctcttcggaaatgaagatgtgacccgcgttgtctccaccgttggtccggaacaggagtatttcctggttgataaaaagctgtttaataagagaaacgatttgaagttctgcggaagaactctgtttggcgcaccagctccgaagggtcaggaaatggatgaccactatttcggcgctctccgtccgagagtttccgctttcatgaaagaactggatgaagagctctggaagctcggtattccggcaaaaaccaaacacaacgaggtagctccggcgcagcatgaacttgccaccatctacacgactaccaatgtggcagttgacaacaaccagctcactatggaaatcatgaaacgtgtggcagagaaacatggtcttgtgtgcctgctccatgagaaaccatttgagggcataaacggaagcggtaaacacaacaactggtctttatcgaccaacaccggcgaaaaccttcttgatccggaccgcgatccggcaaagaacttacaattccttctcttcctgttcgcaacgatcaaggcagtcgatgtctacggcgatctgctccgcgtatcagttgcaactgctggaaatgaccaccgtctgggcggcaacgaggcaccgccagctatcgtgtctatgtttatcggagatgatctggaagcagttctcgatattgtggaaaaagatctcgagtctgaggcaaaagaagtccagaccatgaagccgggcgcaaaggttctgccgcactttatcaaagatacaaccgatcgcaaccgtacttctccgtttgcctttaccggcaataaattcgagttccgtatgccaggttccgctctctctgtatcggaaccgaacattgtcatcaatacagccgtagctgaagttttaggcgaatttgcagaccgtctggaaggtctttcaggcaaagctctggaggcagaaatccatctgctcttaaaggaagtgctgcgtgatcaccgccgcatcgtattcaacggcaacggttacaccagcgaatgggtagaggaagctcacaaacgcggactcttcgacctgccgagctgcgcagaggcatttccgcgcctgattgctgagaaaaacgtagaactgttcctgaaacacggcatctacaccaaggaggaactcttctcccgctacgaaatcaaggaagagaactacatcaagaccatcaacatcgaggcaaagacgatgctttcgatgatgaagaagaccttcctgccgtccgtcctctcctactgcaaggagctggctgaaaccgccgcaaagacaaaggcaatcctaccggacgcaccgatcagcgccgagagcaaactgcttgagaagctgtccggtctctacaccgagatttccgagaaaaccgaagcactggcagaggctgaaaaagcggcagaatccatggaagataatatcgagaaggttgcatatttccactatacgattcttgccaagatggatgacttaagaagcagcgttgataccgcagaagccctgattccagattccttcctgccgtatccgacttacgatgaactgctgttctccgtataatctgacatgtcaatattatgacttgattgaaaaatcgagaaaaatgtgttatgatttggctgcaaaatattggtatattgtcttttatactgatattttgcagtcaattttgggttcttatccctgttattttcttatcattcaggtatcttgaatacaaaggaggtttatatcatgagggagtcactcacatacgaaaccgggcttcgtgaggaatgcggcgtatttggaatgtttgacctggagggcggcgatgttgccagagatatgtactacggactcagcgcactccagcaccgcggtcaggagtcatgcggcatcgcagtctgtgacacgaacggcccaaagggcgttgtcaactgctacaaagggctgggacttgtcaatgaggtatttcatgaggagacgttaaaacgcctcggcggcaatctgggagttggtcatgttcgctactccacaaccggttcttctaccatcgaaaacacacagccactggtacttaagtattttaagggaacactctgtctggcgcacaacggaaacctggtaaatgcgtttgagatgcgccgccagcttgaagaaaccggcgcaatcttccagacgacgatggattcagaggtaatcgcgttccacatcgccagagaacgtctggctgccccgaccgctgaagaggcaatcaaacggaccgcggcaaaaacacgtggcgcttatgccctgattatctccagcccgcgcaagctgatcggtgttcgtgacccatttggtctgcgtcctctctgcctcggcaaaaagggaaatgtctggatcatggcatcggaaagctgtgccatcacctcggtcggcggcgaatttatccgtgatatcgaaccgggtgagatcgtaaccatcacccgcgacggcgttttttctgataaaagcctgcagcaggaaaaacgggcgcactgcgttttcgaatacatctattttgcccgcctcgacagccacatcgatgatgtgagcgtctatgaggcaagactgcgcggcggcgcggctctcgcacattccttccctgccgatgccgacctcgtcgccggtgtaccggattccggtctgaccgccgcgatgggatatgcgaaggcatccggcattccatatgagattattttccataaaaacagctatgtcggcagaactttcatcaaaccaacccaggaagaacgcgaaaatagcgtccggatcaagcttaatattctggaaccggctgtcaggggaaaacgcattgtcctcgtcgatgactccatcgtgcgcggtacgacgatgaaaaacctgatccgcatgctcaaaaaagccggggcgaaggaaatccatgtgcgcgtcagctctccgccattcctcttcccctgctatttcggtaccgatgtcccctccaataaacagctcatcgccagcagtcattccgtcgaagaaatctgccgggagatcggtgcggattcgcttggatatatgccggttgaagatctcgaggagatggcaggcggactgccgctctgtacggcatgcttcaccggaaactatccgatggatgtgccggatggggagattaaggatgcattagaataaatattgcgcaaatgaaaaagaatgtgccttggcacattctcgcgccgagcgcggtcgcttgcgacatgtttctgcttcgcgcgagtgcgcatcattggcacgttagtgcctttttgtgtaatagggaattccaaggaatttcctattacataaaaaagggctctcaccgagtccttttttatccctcacactttttcacgttttgtcaaaacttttgtttttgtttaaaatgtcttatatgtttttatacattggatgacggacggttgttctgcgcttttaacgctttcaactcgtcaaatacaacatcgttcagaaccttaatgtaggttcccttcataccggacgaacgggactcaataacgcctgcactttcaaacttgcggagtgcattgacgataacggaacgggtaatgccgactctgtctgcaatcttgctggctaccagaatgccctcgttgccttccagctcatcgaagatgtgggtaattgcttccagttcggagaaggacagggtgctgatcgctgatttaacgatctggatctttcttgtctcctctgcattctcctcgttgacagaacgcatcatctcaagtccgacaacagtggttccgtactcactcaggatgatatcgtcgatgtcgtactgtgcatctgatttgtagatgaacagagtacccagtctctcaccggatatatcaataggcgtgatgatcgcctgatacttcttcacgttctcctcggcgaatcccaatgtggcaaggttgacattttccttcgttgacaaaacgcttaaaaggcgttcattcaacatacggtcaacaaaaccgccgacctgatccttgatcaactcttcgatctcatccacaccctcatgaatcgcaactccgagtactttacctttcttgctgattacgagaatattggattccagtatgtcactgaggacttcacaaatgtcattgaacacaaccttatgagaatggttgttgtgcaataacttattaatttttctagttttgtccagtaattgaacgctcattttaccagttacctcctttgcctttatcgtaaattagaattcgatcctaacctgtaagaattgtaacacgattttcgtataatagcaagagtttttctgtatttttcattttttttaataattaatatctatttcaagagtttttatgagttttttacaaaaccgcaggcttcgttagaacaaagaagcttatttcccttttcgagcataatatgtccacatttcggacacatttcttttgacggtttctgccaggtcataaaatcgcagtccgggttattttcgcagccgtaatatcttctgccctttttcgatttacggatgacaatctcaccaccgcatttcgggcacttcacgccgatcttttccaggtacggcttcgtgtttttacagtctgggaatcccgggcaggcaaggaatttgccgtgcgggccatacttaattaccatgttgcgcccgcactggtcacagatcacatccgtcacctcgtcagcaatcttgacgctctcaagcgtcttctccgcttctttaaccgccttgtcaagatccggataaaagttttcgataacagtcttccagccgatcgtgccgtccccgatgctgtcgagcaggtactccatatttgccgtaaactgcaaatcgacgatggatgggaacgccttcttcatcatccggttgactacctcgccaagctctgtcacatagaggttcttattttccttcgctacatagcggcgcgcgatgattgtcgtgatggtcggtgcataggtacttggccgtccgatgccctgctcttccagcgccttgacgagcgacgcctctgtataatgtgccggtggctgtgtaaaatgctgtgccggttctaactggtttaaatccagcttcatgcctgcttccagcgactcgttcagaacgccgtcggtctccttatcctcgtcctgtgaatagacggacatgaagccatcaaatttgattttggacgccgacagggtaaaaagctcctctccggctgctaccttgacggaggttgtctcgtaaaccgccgggcgcatccggctcgccgtgaagcgcttccagataagctggtacagacggaactggtctctggaaagctgttcttttacctgtaccggcgtcagtgtaatgtcggtcggacggatcgcctcgtgtgcgtcctggatcttggcgtctgattttgccgccgccggcgcctcggacacgtaacttgccccaaactggtcgccgatatagcttctcgccgccgcatctgcctctgccgcgatgcgggtggaatcggtacgcaggtaggtgatcagaccgattgtgccgcgtcccttgatatccacgccctcatagagctgctgggcaaggcgcatcgtcttctgcgttgagaaattcagcgtcttggatgcctcctgctgcagcgtactggtcgtaaacgggatcggcgccttcttcacgcgctcgcccagcttcacatcgcgcacttcgtactcacagccctccagacgcttcataagcgcctccacttcctctttgctgtgaattgccttcctgccgtccttatcgccgtaataatgggcggtcagcttctttctggagccatgtacgtggagctgtgcatccagcgtccagtattcttccggtataaacgcattgatctcttcctcacggtcgcagatcatacgcagcgcgaccgactgcacacgaccggcgctgagtcctctcttgaccttcgcccagagaagcgggctgatgaggtaacccaccatacggtcgagcatacgtctcgcctgctgtgcatccaccagattttcatcgatggcacgcggctcttttaaagatgccttgacggcgttttttgtaatctcattgaaactgatacggtaaacctttttatctttctgttcatccagctttaatgctttcatcaggtgccaggagatcgcctctccctcgcggtccgggtcagttgcgagatagatcttatccgcttttttgacctctttccgcagacgcgccagcacatcgccctttcctcggatggtgatatacttcggctcatatccgtgctccacatccactcccagcgtactcttagggaggtcgcgcacatgaccgccggaggcgtccacctcatagttggaacccaaaaattttttaattgtcttgactttcgccggagactctacaataaccagattttttgccataacagacctctatacaatcttcctaacgtaatattgattcattggctgcaggatcactccctgcatttccagatttaaaagcgcagtcatgcattcccctgctgtcaacccacagcttttcatgaccgcttccagatgtttcggttgtgaatctaggcaactatacaccattttttccgacttggcaagtgcatttactgattttattgtttttttacaagaatttttacattttatatggaagaaatccaacacatcctccggtttcgtcacgatccccgccccctgtgcaatcagccggttgcagccctcactgagcggatcgatgcgccgtcccggcagcgcaaatacctcttttccctgttccagcgccagatccgccgtaatcagggagccgcttctttttcgtgcttccacgaccagcaccaggtcggaaagtccgctgatgatccggttccggattggaaaatgggatgccgtcggcggtacacccggtccatattctgacaatatgccgccttgttcacggatgcgcgcatgcagccggatgccggatggcggataacaggtgtcaatcccacagcccatcacggcatacgtcagtccaccgccatccatcgcgcccttatgccccgcctgatcgatccccaacgccatgccgctcactacctgcacgccattttctgccagaatccggccgaaatactctgcctcctgtcgtccatacggcgtacagctgcgcgccccgatgactgccgcggatggtttcgcatcttctggaagcattccacgcacaaacagccacatcggtttatcatagatatgcatcaggcgcttcggatatgccgcctcaccgcacagaatgaaacgtaccccctgttcctccagcttatcgtattcttccacgcgctgtttgaagagcggaactgcttcctccagcccctttttcacagcctttccgagaaaggaacatataaacggatccagtttcttcctattatataaaacccgctcatagattccctcaaaactgccgcaggattcatataatttagccgccgtcaccgcgccgattccatccactctcgataaccagtaggcatggatgcgctcacggtcggaatactgcatattttctgtcagaagcatttttttatgcggcggttcctgtgtttttccatatagttcctgcatagaaagctgaacattctgtacattgctctcttcttttcctatttccatatctttcccccctatatatgtcagatcggctgccttttaccttcaagaatgcctcggcattcttgctgcgagatgcgcgtcatgcaaagcatgacatacttcttttgcgcatcttaagcaatcctgccggaggctatatcagatgggggattggctcccaccactgatactaatttgcttctcgccacctgaagaggtgggagtcatctcacatctgatataacaattacaacccttgttaaactttttattctttcaatcttttagacatgcttcttttcagagactcccccaatattttttttcaaaactccggaatccaatcgcctccgccaactgcgtccgcccgatctccgcctgtccatccagatcggcaagtgtgcgcgctacttttaaaatctttccgtgtcccctggcactgattccctgctgccgttcgaccttttccagaaataccgcatcttccccggatagacggcaatactcttcgatctggcggcgggtcatctggctgttgtaggagatagattcgtctgcaaacctcttttcctgtcgagcgcgcgcctccatgacgcgggcgcgcatgacagcggaggaattcctctgctctgtctgtggaaaactcccctcatctatactcttctctgcagccatcatccccaaatcctgccgcggtacttccaccccaatatcgatccgatctaaaaatggtcccgaaacgcggttcaaataccggcggatctgggttggagtacaacggcattttcccaaatctgggaaaaaaccgcatttgcagggattcatcgccgccgcaatcatcgtttttgccggaaatacaaccgtctggttgagacgggaaaccgtgatgcttccttcctccatcggctgacgcagcagatccaaaattttcggctgaaactccgttaactcatctaaaaagagggttccataactggcgagtgagatctccccaggcttcggatttcgtcctccgcctgccatcgcctgggcggtcgtgctgtgatgcgggctgcggaacggacgctgcaaaaccagcggtgtgtctggcttcaggagaccgcagatactgtatatcttcgaaacttcaatgctttcctccagcgtaagcggcggcaaaattgtcggaatacgccgagctgccatcgtttttcccgttccagccggtccgatatagagaatgttgtgacgccccgctgctgccgcctcggttgcctgccgcaccagcggaagtccgacgatctcatcaaaatcgacgtcaaattcttcctgtcccgcctgaaacagatctggtgtgaaccattgtccgtgaatctgttccggatgctgcaggcaacccgtcagcgctttcacatcccggactccgacgatctcgattccatccacagcccgtccctcctgtacattctcttcggatagaaaaacccgtttcattccgcagcggcgcgcttcatagaccatcgagagaacaccggtcaacggcttgatgctgccgtccaaacccaattcaccgataaacgcccattggtcccaatccggtgcagaattgttctcctcatcttccatcccatccatttctgggcagatttcatccgtctttcttatttttgccttttcaccctgttcccacaagcacctcaaaattcctgccgcgatcgccagatcacaccccgttccctctttccgcactccagctggcgataaattgaccgtgatccgcttcggcggcaggcaaaatcccgcattccgaagtgcggtccgaacgcgctcctgcgcctcccgcacctcctccgccaggtagcccaccatgacaaaactcggcaatccgttgctcacatcaacttccaccgtgatccggtagccatcgatgccgcgggtgctgaaactgtttattttactgaacatatatttccccctattattgattttttaccttgccttgtatttttcatatcatacaggcttaaaatttggatacttttaatgatattttgaatttttagaattaaaaatatattataacaatcttatcttctctgaaattgatatcacccaaaagag

SEQ ID NO: 11012 - DNA, 1171 bp, Unknown
  gut microbiota DNA sequence
agaggttggagggggatgttctcttttggcagcattgcaagagtacatcccctttttctttttaagtatttcttctatacgtcaaagtccgatgatattactacttttgcctttcctctgcttttttctggaaaatttagaaaaaagaacaagattgagtaagtgttttcttttagctgcctgtttttattctcgaaaggggaatgagaaccccttcactggagaaaaacaagtcagtgttaacgaatttataaattatgaaaggcaatcaattaatgagaaagcccaaattactcagggcgcttttgattcttttgtttgtggctgcacccatacaatggacccgcgcgcaaatcgttctttcaactcccaagacaacgcttggagcagtgatcaagaacattaaatcacagtctaactatcagtttttctatgatgacaagctggctgaaatgccggtgaatgccattgatgtgaagaacggttcattacagtctgtacttgatgcggctttgcaaggcaaaggaattacgtataagatagaggataacattgtctatctttcagcatccggagagcctcagacacctcaacagacaggacaggaacatacagtgaccggaacagtggttgatgcgacaggcgaagccttgattggtgtaaacgtacaagtgaaaggaaatcccacagccggtacgattacagactttgaaggtaactattctttgtccgttcccggaaatggtgagattgtgttctcatacattggttaccgttcggaaacattgaagcccgatggcaagaatgtactgaatgtaaccatgcaggaagatacacagcagattggcgaagtggtggtaaccgctttggggatcaaacgtgagaagaaaatgttgggttatgcggttcaggaactgaagagcgatgaactgaacaagacaggtgacccctcggtaaccagtgccttgcagggcaaggtggcaggccttcagatgaatacctcggctaccggtctgggcggctctacgaagattaccatccgtggaaactcttctctgacagacaataaccagccgttgtggattgtggatggcgttcctttcagcgacactagcacttcaagcgcatcccgctatgatggtgtagaccgtggtagcgcttccatggacat

SEQ ID NO: 11013 - DNA, 1703 bp, Unknown
  gut microbiota DNA sequence
cgcagattcccaaaactccgcgttttcagagttcttcgatgaaaccaccgaccggatttccggcacacgctttttgatgatgctgcaaacaggggcgcaaagagccatcttttccaaacagggaatcaccatcagcataccaaaaaacgccttgccggagggcatccaaaacgaagatcagattgaagtcatcatccaaaaggatacggacggcggtttttctttttcgttttccatcaatggaactgcgctcagctccctgccggatgtttctgtcatgctgccctgtccaaatgacccggcagccggcacatggttcctctgtgatgaaagcggcgtggaaatccccatgaccggttacgacgatgcggcaaaagccgcctcctttcagatcagccatacagggacatacaccattgcagtaaaggaagatgccatttccctggcacaggccgccgacacagagcatagccggtcgcccatactccttttgattccggcctgtctgcttcttctgtctgccggtgtgtttttcctaaggaggaggcgaaaataagatggtatcttctgcagtaaaaaaatatgctgccttatgtatggtctgcctgtgctcatccctgttttttcttggcctgtatcagttcaataataaatatagccagaacacaatccaggcggcaaatgggattctggcgctttctgaggaagaacttcaaaagtcaccggtgcgctttctggtatccggctgggcattttatcctgacgcgcttttgaccccggaagaaatacgggatgaaagccattatatgcgctacctttccatcggagagcagaccaatttctccagccctgcaaacccttctccctatggctgcgggacttatcagatgacattctttctgccggaacggaaggaaacatatgcgctggaaatcccagaagtgttttctgcttacaacctttatctggatcatgacctgatcctgcaaatgggggaaccggcacaggggacaccattggttcaaaaccgcatggtcacttttcatggcggaaaaccggtcacactcaccatagcggtcagcaactatgaccacttttacggaggaattgtctatccgcctgctttcggaacgatgctggcggtcaatacaaccagaggaatccggtttgcattctgcctgttcagctgtacagttacctttgtctgtgcgctgctgtccttttatttcagccgccggatgaaacagaaaaatacattcctgttcggactgatctgccttgccatgtgcggcctgtcatcctatccggtgcttcatatgctggctgcggttcccgtattcccctggtacacgattgaactgttctgtatctatctggttacctggctgatcgtagttctgcaaaaccggatatgcaggccgggcttcctgcctgcggccatcagtaatggggtgggcgctgccttcctggtatatgcgtttgtgtatggcatgatggcttcccatctctcccttggagcgattcgtttcttctctgcatcggtcttttgttataaggcggcatctgcgctctatctgcttatcatcgctgtgcttgccattcacagaggagaaaaacggagcaggccgatcttctatgctgcggcagccgcaacctgcgcctttatatgggatcgccttctgccggtttatgagccggttatc

SEQ ID NO: 11014 - DNA, 10618 bp, Unknown
  gut microbiota DNA sequence
gggagattgggaactgtgtgactaaagtaataatatgataattatatttaataaatatgtacactactttttacgctttgaatttaaagtaatgtaaaaattttatagcgtgaagtttgaagttgagaaattgccttgacaaataataaatttcgcttataatacagaatatactcaataaccttacaaaggcaatgaagggaacaagtagagatccgcaggagagcgcacagaaagcagccggatgatgagaggcgcgcgtgaaccggatattcgaatacatcccggagcttcgcaccgaagaatctaaaatcggatccgatgaaaaggctgcgtggaaaatgtgcggcggttgatttggtaggctgcgacgtgagagacacacgttatccggtcacggtatcagagggtaccggcagaggcagataggcgcgagctatctgtgaacaaaggtggtaacacgggaattttgccccgtcctttttggaggacggggctttttgtaccccaaattttaataaaggagtagagagaagatgcagatttacgaagaattagtagccagaggtctgatcgcccaggttacaaacgaagaagagatcaaaaaactggtcaacgaaggaaaagccgttttctacatcggttttgacccgaccgcagacagccttcatgtaggacatttcatggcactgtgcctgatgaaacgtctgcagatggcaggcaacaagccgatcgcattacttggcggcggcaccggcatgatcggcgatccgtccggacgtacggatatgcgccagatgctgacaccggagacgatccagcataactgcgactgcttcaaaaagcagatgagccgtttcatcgatttctctgatgacaaggcgctcttagtcaacaacgcagagtggctgatgaatctgaattatgtaaacttactgcgcgaggttggtccgcatttcagcgtcaaccgtatgctgaccgctgagtgctacaagcagagaatggagagaggcttaagcttcttagagttcaactacatgattatgcagagctacgacttctatatgttataccagaaatacggctgcaacatgcagttcggcggcgatgatcagtggagcaatatgttaggcggtaccgagctgatccgcagaaagcttggcaaggacgcacacgcaatgaccatcaccctgctgttaaactccgagggcaagaagatgggtaagacccagtccggcgctgtatggctggatccgaacaagacatccccgttcgagttctaccagtactggagaaacgtagccgatgccgatgtattaaagtgcctgcgtatgctgaccttcctgccgcttgagcagatcgatgagatggacaaatgggaaggcagccagttaaatactgcaaaagagatcctggcttacgagctgaccaagctggtacacggcgaggaagaggctgagaaggcacaggcagcagcgaaagcactgttctccagcggaaatgcagccaatatgccgacctacgaactgactgaggatgatttcaacggtgatgagatcgatattctctccatcctgcagaaatccggtctggctccgtcccgttccgaggcaagaagaaatgtcgagcagggcggcgtatctgtagacggaaaccaggtaaaagatatcaaggcagtcttcacgaaggatcagctcgctggcgaaggaatggttgtcaagagaggtaagaagaactttaagaaggttgttttaaaataagtggagatgttccgccagaatcttcaccccatacaaatcagaatcacgccgccggcgatctctgccgggctttcaagcgaagcccggagagatgtccggcggcggttccgatcatggagagaagcagagcaaatccgaaaccatatcttacattcactcccacaaaaattacccaaattttacataaacgataccaaatcatgatttctgtaaatccaggaatcttttatactgcgtactgtaagaaatcaaggataaaaaactctgagagaaaaaagagagaggaaagaggaattttattatgaagaaaaatgttcagaaaacaatcgcagtattaggagcagccgttctggcaactggaatggtaggatgtggttccagcaatacaaatacaagtgcagcagacacaagcgcagacagcagcgcagctgaaagtaatgcggcagcggatacaactgagaacagcgcagatgcaaaagatttaagtggttctatcaccttagcaggttccacttcgatggaaaaatttgcgaatgcactggcagaaacgttcatggagaaatatccgaacgtgaccgtacaggctgaatttaccggctcttccgcaggtatcgagtccgtactggcaggtcagtgtgatgtcggtgattcttccagagcgttaaaggacgatgagaaggcaaaaggtgccgttgaaaatatcgtagccatcgatggtattgccgttgtcgttgacccgtccaacgcagtagatggtctgagcaaggacgagctgaccggcatttacgacggaagcatcacaaactggaaggatgtaggcggcagcgatatgccgattgtcgtagtcggacgggaagcaggttccggtacaagaggcgcatttgaggagcttctgggtctggaagatgcctgcaaatatgcaaacgagctggattccaccggtgcagttatggcaaaagtagcatctacaccgggttccatcggatacgtttccctggatgtagtcgatgataccgttaaggcagttaaactggatgatgtagagccgacggaggagaacatcaaggcaggcagctatttcttaagccgtccattcgttatggcaaccaagggagaaatttctgagcagaacgagctggtacaggctctgtttgactatgtatactctgcagaaggcgatgacctgattaaatctgtaggcctgattactacgaagtaagaaactgcatcggaatttgtgaatgtggataaaattaccggtggagacaggtaaggatagaaaaatcagaaattcacgaatacacataatattgaatagattcaaataatatcgagtcgcttgcagtcaagccgcagaaaggaaactctgctttgaccgaaagcggctcgctgttcaatccgagacaggagagacatatgcacgaaaagaaatttaccatttttggaagccatgccacgaaatcagcggtagagagggcagcggaaattatttttaccgcctgcggcctgctggcggtggtggcagttttttcaattaccttatacatgattatcagcggtactccggcactttttaaggtgggggttccggaaatcttatttggaaccgtctggaagccgactggaaatccggcgtctttcggaatcctctacgttattttaacctccatcgtcggaacctttctggcgatcctgatcggtgttccgattgggctgtttaccgccatctttctggcagaggttgcaccgccgaaggtagcggcagtggtccgcccggcagttgagcttctggcaggtattccgtcggttatctacggactcttaggaattttgattttaaatcccctgatgtataagctggaaatgaaactctttgccggttccacgacgcatcagtttaccggcggtgcgaacctgatatcagcggttctggttctggcaatcatgattcttccgactgtcatcaatatcagtgaagcgtcgcttagggcagtcccgaaacatttaaaaagcgcatcgctggcgctcggtgcaacgcatatccagacgattttcaaagtaatcgttccggcggcgcactccggcatcatcacggcggtggttttaggctgcggacgtgcgatcggggaggcaatggcgatcagcctggtatctggaagttcagtcaatctgccgcttccatttaactccgtccgtttcctgacaaccgcgatcgtggcggaaatgtcttattcagagggacttcaccgggaagtgctctttaccatcggtctggtgctgttcgtatttatcatgtttatcaacacggtgctcagccggatgtttgtgaaggagggcggcgcaaatgactgataatagaatgaaaagtatttaccagaagcgcacccgcatcggggacaatatcttaaaagtgctgatttatctggcagctggcgtggcgatcgcgctgttagttggcatcatggggtatgtgtttgtgcgcggcctgccgcaggtttcctggcagcttctgtccacggtacagagctccctcaagggcacctttggtattctgggaaatatcatcaacacgatttacatcattgtaattacccttatcattgcagcgccgatcggaatcggctccgccatttatctgaacgaatacgcaaagccgggaaaactggtgcggacgattgaatttacaaccgagatcctgtccggtattccgtcgattatttttggcttgttcgggatggtctttttcggaatgacgctgaagctgggttattcggttctgaccggatccttcacgctgaccctgatggtgcttccgctgattacgcggaacacacaggaagcactcaaaaccgttccggacagctaccgcagcggcgcactgggaatcggtgcaacgaaatggtatatgatccggacgatcctgctgccgagcgcggcaccgggtattctgaccggcgtcatcctttcgattggccgtatcgtgggcgagtcggcggcgcttctgtttactgccggaagcggcttccagcttccgaaaaacctgtttggaaaactgtttgagtcgagcggcacgctgaccatccagctctacctgtcgatgcagaaagcaaaatacgatcaggcgtttggaatcgcggtcgtgcttctgattatcgtgctgggaatcaacctgctgacgagatttttgaccaaccggtttgatgtgacaaaattaaaataaagtaaaaaatgaggaaatgatatggagacaaaaatttctacgtcggatttgaatctgtactatggaaacaatcatgcattaaaaaatatcaatctggatatatatgaaaatcagatcacagcgtttatcggaccgtccggctgcggtaagtctacctatttaaaaacattgaaccgcatgaacgatctggtgccgaatgtaacaatcaatggaaaggtgtggatcgacggcgaggatatctatgatccgaaggttgatacgacgcttcttcgcaagaaggtcggcatggtatttcagcagccgaacccatttccgatgagtatttatgacaatatcgcgtatggaccgcggattcacggcattaagggaaagccagagctggacgcgattgtggagaagagtctgcgcggcgcggccctgtgggatgaggtcaaggatcgcctgaaacgttctgcactgggactttccggcggacagcagcagcgtctctgcatcgcgcgtgcgctggcggttgagccggagattctcctgatggatgagccgacctcggcactggacccgatttccacgctgaaaatcgaggatctgatgggcgagcttaagaagaattataccgttgtcatcgttactcacaatatgcagcaggcgacccgtattgcggactacacggcatttttcctggtgggtgagatagtcgagtatgcaccgacgacggatctgttctcgcatccgcgggagaagaagacggaagactatattaccggacggtttggatgataggtgtaagattgaggatttaaaaataagtagaaaatcagtttgttgttcagaagtggaaaatttctgggcagaaaacaggggagatggagaggagatacgggatggcgacgagagaggcatttatacaggagttagaagggctgaatcaggaattgaacgcgatgagccagatggtgcaggatgcgattgacagtagttttcaagcgcttaccgagcataatgaagagctggcacagaaggttatcaaaggagaccgggatgtggacaatatggagcgaaagatcgagacacactgcctgacgctgatgttaaagcagcagccggtcgccagtgatctgcgccatatctcgacggcgctgaaggttgtgaccgatctggagcggatgggcgatcaggcggcggacattgccgatctgtccctgcgtttggaggatgcagatattagtcttgtaagcaaacatcttccggccatggtggcaaatgtgaaaacgatggtaaaggatgcgattcacgcgtttattgagcgtgacaccgagacggcggagacattcgaacagagggatgatctgatcgatgccttctttgaacgggtaaaacgggaagtgattgagtttctgaaaaaagacggggataaatccgatgtggcagtcgatcttttgatggttgccaagtatctggagcgaatcgccgatcacgcggtcaatgtgtgcgagtggacagagttttcggacacaggggccgtgggggatgtgatgattctctaaaggtggaatcattttgtgaaaggcagcgcttgaaaacaacaagggaagaatgaaggcgaacggccagagtgcaaaattgtatggctgaactatcttaattgtgcataaaattaagtaagtatgcggcagtcaacaggagtaatatatcatgcgtgatatagttctggaacttctcagttcttacgggtatgcggggatgtttgccttgattctgattgaaaatctctttccgccgattccttcagaagtgattctgacattcggcggatttatgacaacgtacacacggatgtcaatcgcaggggctgtcctggcagcaacatccggatcggtacttggagcactgattttgtatgaactgggaagacgaattcctgtccagaagttttatttctttttgggcggcgcatggggaaaacggctcggagtggaagtggaagatgtaaaagatgcagacggatggctggagagaacgggacggtcagccgtctttttttgccggttcgttccgatcatccgaagcctgatctcgattccggcggggatggcaaagatggaactgctgccgtttctcctgctgacaacagcgggcagtcttatctggaatacggtgctcatcggagccggcgcggtggcgggggcatcgtgggaacgtattctggtgctgttaaagacatattcccgcttcgccgtgatgggagcgggaatcttgggatttgcggtggcgtgtgtgtattttcggaaacgataacaacaggagagtgataattcatgcagaaagagtttattcattcaagtaaaaatatatcgtgtcattctttacttccagccgtgccgtcccatcgatcaccagctgttccagatatgggcgcaggtggcgttcctgacggatgagctggtcgtaggtaccgatgtgcattccgatcaggcgtcggctttcctgataaaattcatcacgcgtcattggtctctgcaaaagctttgccagctctgcgagacgcagacggacaagatccatatttttgtccgccagttcccggatattgccatcaaatggacctttgtgcgataaaatccagtgctggtaaggcagttttgtgattgcttccttgctttccagatccagaccgacgtggtcgcagtatggaagcttgacgtgacgcaggacattttcggttaaaagcgcgtctccggcaaagcagacgccgtccggtgtgccgatgacgatgtggtcgagggaatgccctggcagatggtgaaccgggaaggttacgccgcagagtgtcacggaagtatcctccggctggatgatacagtcaaccgggcagcgctgctcggtgtcgatggaaatcttttcctcctcggagcgcccgaaataattggtataccgttccagcgccgcctgggaggcgatcagcccggcttcgccaagcgacatagccagtggaatctgaaaggcttcgcgcaggcgtttgctgtttccatgatggtcgatgtgcgcgtgggaaacgatcagccccgccggggtcagcccggcgtctttcagagagccgaccagctcgtcatattcctttgagtaaccattgtcaaacaggatgcagcgggtgtcgtcgatgcggtagacgccgacggctgttttgccaagcaggcagtctgtatttccagaaacgtgtatgagttccacggaaagagtcctccttttatcatgaataacacaaaaagcgacggctgagatatctccgctgtcgctttttaagaatgcgtctgataggaatcgaacctacgcctcaggctccggaggccggcgctctatccactgagctacagacgcattacttgtatgatactataatatttagaaaattgcaagttttttttcggaaataccgcttgccgagtaaccaaatcaccgctataatattaacaatcgaataagtcaggaggcggtcgggtgggagaaccgaaaaagaaaccgggacgcagccggaagaacggaacggactgggaactgcgccgctatgtgatgctgcttgcggcggtgattgtattgattctgattggcgcggtggcgatgttttccgggaaaataacaaacattctggggaaaaaggatggcttaccggcagaaatggtggatacaggcggatctggaatggtgattgagccggacacgaaagaatatattcaggactttggcggatgtattctgacagagaatggcgagccggggatcacagagctgatgaatacttattttcaggcggtttccgactgtgatatggatacgtttgtgaagttgtttacctcacaggatacgagtgaggaagaacactaccgtcaggaatttgaagaacagaagcagtacatttccgggtaccagaatgtgaaatgttatacgacgccggggcttagggacggtgagatggcagcgtatgtgtattatgagattttgtatacgggcgtggagacaccggcaccgagtctggtgcggatctatgcgatccgggcggaggacggaagctggcagatcgatgacgggaaaatgtccgaagagctgacgcagtattttgaagagctgtcggtcaatgaggatgtgcgccttctcagcaagcagacggatgaagcaatggatgcggcgatggagcaggatgaagcgctgaaagagcgcgtggaatttatgaaacagggcgcatcttatatgcaggaggagtcagaaccggctgcgtcaaatccttaaaatgctttattgaattcgtctggctggaaaaataaagtttttaaggtatggaaagctgaaaagcggatatgccggagtatggagaaatggctgatagtatataagatataaaatcgattgatttataaaaagtgaaagtacagatatagaaagacaaagaggcacaaagaatggatgtaaaagatttttattatgatttaccacaggagttaattgcacaggatccgctggaagatcgttcttcttcccggcttttagtgctggataaaaagacgggtgagatgcagcataaggtgtttaaggatattgtcaattatcttcatccgggcgattgcctggtgatcaatgacacaaaggttatcccggcgcgtctgatcggaagcaaggagggaacggatgcacacatcgagattcttcttctgaaacgccgtgagaacgatatctgggagacgctggtaaagccgggcaaaaaggcaaagccgggaaccgtgattaattttggtgatggtctgttaaagggaaccgttattgatgtggtagaagagggaaaccggctgattcagttctcctacgaggggatcttcgaggagattcttgaccagcttggccagatgccgcttccaccgtatattacacaccgtctgaaagataaaaaccgttatcagaccgtttatgcagaacatgagggatccgcggctgctccgactgccggacttcattttaccaaggaactgctggcacagattcaggagatgggagtgaagatcgcgcatgtgacactccatgtgggtctgggaaccttccgaccggtcaaggtttcaaatgttttagatcatcatatgcattcggagttttaccgcatcgaagaagacgctgctaatatgattaatgagacgaagaaaaatggcggacgcattatctgtgtcggtacgacaagctgccggacgctggaatccgcagcagccgaggacggcacgatccgcgcatgcagcggctggacggacattttcatttatccaggctaccagttcaagattctggactgcctgatcacaaacttccacctgccggagtccacactcgtcatgctggtatccgcactggcaggcagagaacacgtgctcacggcgtatgaagaggcgatccggcagagatatcggttctttagttttggggatgctatgtttatccagtagagaaaagggatgtatgaaaaagactcatagtgaaaggctatgggtctttttatttcgaaaaatgtttgaaaaacggcacaccgcgttctcgttactttagcctgcaaataaaaagtcaagacttaatggggaaaaaaatataaaattttacatggttaaaa

SEQ ID NO: 11015 - DNA, 66349 bp, Unknown
  gut microbiota DNA sequence
ttcacttttttatactttttaacacgaatatactctatcggtcttatttcttttattaattttataaatgatatatatgataaacttttttgcactaagataagaaaacttccaagtaaactaatcaaaaaaagtacagaaaaatgacttaaaaatcctattttcccccgcataaagcgacaaagttctggatataatatttttattcctatcgtatgacttattccgcaaatatctattggaaaaaataatcttactcctgttagtacagtgcaaaaaataagtaattttacttcatacaagctataattttcttgctttttccatatataaaccgacaaaaaacccaatagcaaaattgaactacatattgccgataaaattgatgtatatgttattttcataaaatctctttttttcttttttgaactatacgttctaattcgtcaataaccgactcttcatctactgctccattcaacaaagctgctgttattgtatttacaaaggacataggatttctagaatttttcatacatttttctattttttcttctatttcttcatcctgagtctttttcgctttatatcgcctagcaaaaacttttccagtctgaactgtatcaataacctgaacataacccttatcaagcaattttcttaacacagtatggactgttggcgttgtcaattctttttcagattctacaatttctgtcaccgtcatgggtttttcatacttccacaaaacctgcataacattcatttctcgttcacttaaataattattcttcataaaattcccaatctcataatttatagaaacaaagggagcaactgacgccccctttgtttttcactcaagttccaatactactaactaatattatcatttccaagatccacattccataaatcactctatcttttttcattagctcataccattcaggcgtatctaataatcttggttttttaattatataataataacaaaaaatcaaaatacaaagaaaaattctaacagttcccacctgatcataccaatttctaattcccattatggaagcaattcgctccccacaaagacacagttccattaataaagcggcaaacgttgcttctcttccttgacggaattcatttgatactctattctctttcattgcatctcccttttttattaccaatactcatacttggtataacctggcgtccaccctaatactccatcattattatagccatatgtataagatattgtaacttttgcatagtttatgccacccttttgtgcagctgctaaaactgttttagcaacaagtgctgccactgctacccctgctcctgctccgcctacctgtcttgcgataaaattagttattgtcgctaaatctttcatttcttgcaaatcaattgtatacacaatatttacaacggttcctatagcagctgttgctggtaatcttccagttatactagatgccctcgaagcacctgtagatcctccactaccacttttgcttacttccaataattctttaacttccgatcttgaaaaaccaaaatcttccattaacatatcttccacaacagtttcatccgttaccgaagcatatttatcataaatatctctcaattcatgttaatcaatcacaacctttgttgccactttatctattgaatatggcggcgcttccgcaaatgttgggattaccaatgaagttgacataactatcgacaataaaatactcataatttttttcataaaaccacctcttaacgttattcacattattaatgagcatcccacatttttgctgcattggaatccctcccttctttaaatttagtaaacaagctttaatttgattatatattatcatctttgattatatatgtcaatattaaaaatatattttcatttcaaatatactttcaatcttttctacacaattaaaaactactctttcgccagcgccgcgagcccggaaagaatctcccgcgccttcacaagcatcgtctcgcagtccgtatgtttctgccgcacgtcgcggtaatagaacgacggcacatcacccgtcctgaaggtcagcgtgcccttatatttctccatcagcgccggaatgccggagacgtccagatcggctttctggtacatctgaatcgtgatatcctgcttctttacatcgacctccacgacacccgcctgatgagcaagcgcttttagatcggcgatctttaacaggttctccaccgaacgtggaatctcgccaaagcggtcgatcagctcatcctgcatatccatgtactcttcctggttctcaataccggaaatccgcttgtaaacgtcgagtttctgatattcattgcggatgtaggacggcggaatatacgcgtcgatgtcgcagtccaccaccgtctcgaagtcctcggcttcgttcttaccgcgaagtgccagcaccgcctcgtttaagagcttgcagtacaggtcataaccgaccgcctgcatgtggccatgctgttccgcgcccagaagatttccggcaccgcgcagctccagatcgcgcatcgcaatcttgataccgcttcccagctccgtaaattcacggatcgcctgcagacgtttttccgcctcctcacgcagcagcttgtcgcgccggtacatgagaaacgcatacgaagtccgcccggaacgtccgacacggccgcggatctgatagagctgtgaaagtcccaaccggtcggcgtcgtggatgatgatcgtgttcgcattcggaatgtccagtcccgtctcaatgatggtcgtagacaccagaacgtcgatattgccctcaacgaaatccagcataattttttccagttcatgttcgtgcatctgcccgtgggcgaacacgacgtttgcctccggcaccagagccgccacatggtttgccacctcgtcgatgttattgacacggttgtagacataatatacctgtccgccccgcgccagctccctgtgaatcgcctcgcgcaccatctcgtcgttgtactccatgacgtaggtctgaatcggcaggcggtccaccggcggttcctccaggacactcatatcccggatgccgatgagactcatatgcagggtacgcggaatcggcgtcgccgtcagcgtcagaacgtctacattttcctttaatttcttgatcttttccttatgtgccacgccgaagcgctgttcctcatcgatgatcagaagccccagatttttaaagacaacatccttagaaaggacgcggtgcgttccgatcacgacgtccacctgcccttttttcagatcttccagcgtttttttctgctcgcccgccgtgcggaaacgcgacagcatatcgacccgcactgggaaatccttcatcctctgcacaaaggtattgtaatgctgctgcgccaaaattgtggtcggcaccagatacacaacctgcttaccctcctgaatcgccttaaatgccgcccggagcgctatctccgtcttgccgtatccaacgtcgccgcagatcaggcggtccatgatgcggcggctttccatgtcttttttggtcgcctcgatcgcctccagctgatcctccgtctcctcaaacgggaacatttcctcaaattccctctgccagaccgtatccggtccatactggtagccctcgctccgctgacgcgctgcataaagctcgacgagatcctttgcaatatcacggaccgcaccgcgcaccttgctcttcgtcttattccattccattccgcccagtttattgagcttcggcgtcctggcatccgaaccggcatatttctggattccctccaggcgggtcgccggaagatagagattaccgccgtcgcggtactcaatcttgatgtaatccttgacgaccttgtcctgctcgatcttctcaatgccccggtaaatgccgagtccgtggctctcatgcaccacataatcgccgatcgaaagctcggaaaagctctggattttcttaccctggtaggaggtctttttcttctttttccgcccccgtccgccgccgaacatgtctccctcggtgatcacgacgaacttaatcagcggatattcaaatccccgatgcagctttccgtaagtcaccaggatttcacccggtttcacggtgttttcgccctcatccgggcagaaggcacttaaatcatactcccgcagatcgcccgccagacggctcgcgcgcgtccgcgaaccagccagcaataccacccggtatttttccttcttccagcgcgccagatcgctgattaaaagctcaaatccattctggtaggaattgacatttttaacgctcagactgtattttttcttaaccgtcatgccggagagcttctgatccagccccagcagtaaaagagtgcgcgggcgcattgccatcgccagcgtctccttcgccgaatagaggaaggaagtctgccccggaagcagatagccgccctcgagacggtgcgacatgctctcccggaactccgtctcggtcgtctctgctttttccttcaagcgcagcggctcatccaggaaaatcgtcagctcatcgactggaaaatagtttaaaaacgataccgtttccttgcagaaataccggatatagcttcccagcccatgcacccggaagccctcgcgaagcccctctaagacctccgagacagccgaatccatccggtacgcctcttccgtcttcatggcatcccggagctttttcacgtatttcctgcggtctttctcgatcgcctcggttccatcctgaatctgctccggcgtcagcgccatctccgtcgccggatagatcactgcctcatccacctgctcgatcgatcgctggctctccgggtcgaaggtacggatcgaatcgacctcgtcgccccacagctcgatccggtacggcacctcctccgtcagcgggaaaatgtcaatgataccgccgcgcaccgaaaactgccctgatccctcaacctgcgcgaccttctcatatcccatttctgccagggcgtgcacaagcttctcaacctcgaccacatcttctgtcccgatcgtgagactccgctctttcatccacgcaagcggcagcagatgttccatcagcccgtcgatcgtcgtgaccaccacgccgccggaactctccaggacccgccgcatgacctgaatccgctgtttcgtcagcaggtttccgtggatatccgacgtataaaacagcagatccctcgccgggtacagcgaaatatccgtatcaaagcaccggtaatcctcacagatctcccgcgccctcgaatcatcgtaggtgacaatcagcttccagggcgtcagatccgaaagctcggacagcagatgcaccttctgcgaatccaggcatcccgtgacaagaagcggtccctgtccgcgctgtaaatccgtcttgagatcctgaaactcgatcatctcctctaacggatttgcaaataaatcgctcattgtgtcttgacttcctccttcctctccgccttctgcttctctagcttctccttctccccgcgcgccgcgccgttaaaatggttcatcgccgcctcaacgccctctgtcatcatatccacgactgccgccgcaccgtccttaaacgccgtcgtcatcgtttcggcttcctctttcggaaaacgtcccagcacatagtctgccagatccatgcgcgccggcttctcgcccacaccgatccgcacgcgtggaaattcctgcgttcccagatgggcgatgatatttttgattccattgtggccgcccgcgctgccttttttgcggatccggatgccgcccggaaccaggctgatatcgtcataaatcacgataaactccgctggatctaccttataataatccatcacctgacggatgcactcgccgctcaggttcatatacgtctgcggctttaccagaatgaccttatttccctcgatcacgccttttccgatcagtcccttaaatgctttctcccggacatcaatgttatacttgtccgccagcgcatccagcgtcataaatcccacattgtggcgggttccctcatattctcttcccggatttccaagtcctgcaattacatacataattctatttctccctctttttctatagtatcaaaaataccagattcttcactcatcgtctttctcaaaaagccaaaacagacacgactttaagcgttaaatcctgaaactgccactttttcaagctgtttcaggatctaacgcacttatttttctggatacttttaaagttactgttcacggataggcacttttggaatcgaaagtgccgtaagttttggggtcgtgtaaataagaagttactttcccttcacaacctcaaccgccttctgcagctgattatccttctcctctggaatcacgacttcctgcgccgcctcttcatccagctccacctcgagatccggctcgatgccttttccatggatatcatttccattcggcgtataataatggtcggtcgtcagcttgatcgcgcttccatccgaaagcggcatcagcgtctgcacgatacctttaccgaaagtcttcgttccgacgatcgtcgccacgccgtaatccttcatcgcaccggtaaatacctccgacgcgctggcggaattgccatttaccagcacaaccatcgggatctccaggctgtgtccatcctcagcgtcgtatgtctcctccgtgcccttcttatttgccacggtcaggatccgtccgccatctttcaggatataatccgccattgagacaaccgtcgtcacctcgccgcccgggttgttccgcagatcgatgatcaggcgcttcatgccctcgccctgcagttcctcgatcttggatttaaactgatcggcagtcacacggtcaaactctgcaacggaaatatatccgatctcttcatccagcatcttgcctgacaccgtctgcacatcgatcggtctgcgggtcagggtgatatccttgtactcgtcgctattttcacgataaaccgtgatcgtcagctggctgccttcctcgcccttgacgtaattattgaccagaagcgacagatccatgccaatcacctcggtgccgtctaccttataaagcgcatcacccggaaggatgcctgcctcctcggccgggctgccctcaaagacgcgcacgatcgtgctgacgccggtctggacattctgggataccagagcgccgatgccgcagtaagaaccatttgtctcatccaggaagcttgtcagctcgtccggcgtatagtaaaccgcatacggatcatttaaaccactcaaaaagccctgataaatgccggcttcctcctcggatgtatcaattttttcctcaaacaggtactttttatcgataatatcctgtatctgctccagctttttcgtgacattctcaaaattgaccggctcctgtgcctgcgacggtgttccctcggtctgtacctgtacctgtgtctgattatcgatcacacggcgtccaaacatgtaaatccccgccgaagcaccgaccgtgatcagacacaccagtgctgtcaccagcacaccgaccatcacaccgcgccagaatttatttttactgtccatctcttatgcctcctgattcctgtctattccttccggatttgtaactgttcagtaccttcacagtcacgcgcaaaaatccatcaaaaattgcctacggcaatgggatttttgcctgctggtccatgttttcgtacggtcagcgcagtaaatgcgcagacctactgaacagttacccggatttcatcttttgcagccacctgatactttccgcactacggacttacatagctcgaagggtttacataacttccgttcttgcggactgcaaaatgcagatgagaacctgtcgaatatccggtcgaacctaccttcgcgatcgtctgtccggcttttaccgtatcccctgccgataccagaagctgggaacagtgcatatacacggttgaaagtccatttccatggttgaccacaacataatttccagccgaataactgtaggttgcaatcgaaaccgttcctccggcggctgccacgatgctgctgccggtcgaagcgctgatatcaatgcccttatggttcgaggacgcgcccgccgtcggtgatttacgttttccgaatccagatgtaatgcgtccgcttgcagggcacggccagcgcagcgaagaacttcccgtcgaagtggtagtcgtactgccagtattccctttcgcggtcgaattattcgtttttcccgctgcggcggcttttctggcagcttcctctgccgcttttttcgccgcctcttccgcttccttcttcttaatctccgcctccatctgcgcgatcttggcttcctgcgccttgatatcgtcctcatacgctttcgcctgcgctgatttctcgccgatctgcgcgttgacgttctggagttctttatttttctcattcaggagaagctggactgaatcctgctttgcctccgtctgcgtcttcatctcttgcagctccgtcttctccgtctccagctttttcttgctgtccgcgatggactctttcgtcgccacatactggtcgagcatcttccggtcatactccgaaatctttgaaacatactctgcccggtttaaaagctccgagagcgaacgggcttccagaagcagatttaagtagctgctatcgcccttctcatacatatatttgatacgcattttcatcgaagcatactgctttttttcagttttctgcgcttcctccagctttaccgccgtctcattgatgcttttctgcttgctggaaatattattttccagcttcgtgacctgcgactgcagatcattcatcttcgtgtccagctccttgacatagctctcggtgttacttttcagaccctgaaggcttttgatcgcctcctcggtcttctttttctcctgttccagggcgcttttcttatccttggcgctgcttacatcctttttcgtcgctgccgccaccgaggtcagcactggggaagacgccagcgccgccgtcacaaggaacagagccgcacgtattttcaatccctgttttttcatgttctcatcctttttaccgcaaattttcgctgccgccgcattctcctacagcagccgccaatgtttcttacacctttaaatgtctgcggatcgtaaagaaacttccgacaaaaccgattcccacgcccagcgccatcgccacggctaccatgctcgggaaaatggtctgaatcgggataaattcaatcaggttcgacaagatatcaaaccgttccatcatatatacaaccgcctggcggtacagaaaatacgtgatcgccagcggaatcagcgcgccaaccagaccgatcatcacaccctgtacaacgaacggcgcacggatcatgaaattcgtcgcaccgatcaggcgcatgatccggttttcctcccgcctaaatgcagctgccgtcgtgatcgtattgctgataaggaagatagcaactgccagcagaatagcgatgatcacccccgacaaaagtcccagcatcttgttgaagcttgaaagcccggacgccgtatcgctcgaataattgatcttccggatcccctgcaccgtgccaagccatgcaaccatgtcatcctgcatgtcaatgtctttcagatagatctcgtaggacgccgaaccggctaacgggttgtcatccgcaaatccttctgccagatcctcgactcccttaaaatattctttcttaaaattctcccatgcctcctcggcagaaacatactttacttccttgacctcatcgcgggcgcgtatctcatccccgattttctgtatatcgtcctcactcatatcttcattgaagaaaaccgtgattcctactgtagattctgcattccgcaccatatactgtacgttggcaatcaagccaaaaaacatacagaacaggaaaatacatgccgaaataatcgccaccgacgccagtgaaaaccagatattccggatgatattgcgcatgccctccttggtgcagtaaatcaatgtactaattttcatgccagataccgcctttttgatctcccgtcagcacgccgcgcgtcagcgtgatcacacgttttcccatctctgctacgatctcccggctgtgcgttaccacaagcaccgtcgtcccgcgccggtttatctcctccagaagctccatgatctccatggaattatgtacatccaggtttcccgtcggctcgtccgccagaagtatctccggcgagttgatcagcgcacgggcaatcgcaacacgctgctgctcgccgcccgagagctggttagggtatgctttatattttgaagaaagccctaccagtcggagcatttccggcacatttttcttaatctcacggggcgatacgccgatgacccgctgtgcaaacgcgacattttcatataccgtcttatccttcaacagacggaaatcctgaaacaccattcccagccgtctgcggtacttcgggatgtagcgtctcggcatcttttccagatccatatcgttgacgataatctgaccggaagtcggctccagctccttcaaaagaagctttaaaagcgtcgatttgccggaaccgcttcgtcccatgatgaaaacaaactcgccgtcctgaatctgaatattgattccctttaaggctttattccccgtcttgtacgtcttggtgagatttttaacctctatcatgcgtaaatcctctttttcaattctccaaatgaaattgctgcggcaaaggcaatcttcctccccgccacagcaatttggattaataatccaggttttccatgtatttcatatattttacaaccatcagggcaatcttaaatgtgatcgcatcctcaaacacccgcagatccaatcccgtgctcttctggagcttatccagacggtataccagggtattgcggtggatgtaaagctgtcgggaagtctctgatacgttcaggctgttctcgaagaacttgttgattgtcgtaagagtctcctcatcaaactcatccggcgatttgccatcaaaaatttccttgataaacatccggcacagcggcagcggcagctgatagatcagacgtccgattcccagcttgctgtatgcgaccacatttttgctgctgtagaaaatctttcctacatccagcgccatcttcgcctctttataagaacgcgatacgtccttgatctcgttgacgatcgtaccgaatgccacgctgacacgtgtcagtgactcggtattgagcatatctacgatggatgtggctgtcttttccagatcgtcgtaagtctcgcccggtttcacttccttgactagaataatgttcttctcatccactgccgtgatgaaatccttcgtcttggtcgagaacaggctgcggacggtctcaagtgcattcacatccttctcatgctgcgtctcaatgataaatacgatccgcttgacgttcgtctcgatgtgcagcttcttcgcacggttataaatgtcaaccagaagcagattgtcaagcagcaggttcttgataaaattgtccttgtcaaagcgctccttataagctaccagcaggttctgaacctgaaatgccgccatcttgccgaccatgtatacgtcgtcgcttccgcccttggcaagaagtatatattctaactggtgatcgtcaaacaccttgaaaaactgatatccctgtatcacctggctgtccgccggagagtctacgaaagccagaattgcactctcatattcctcagcgccagtaaatgtggatgccagcaccttgccttccgtatcacagatacagagatcgacacgcgtaattccttttaacccctcaatgtttgtctggagtatctggttcgaaatcatattcctctctccttttcttttatcctccgtccagctgtgtttccgggtctttcaacctgtcattccccaaacccgtttgttacccctccggcaatctgtgcctgtggaccataaccgttccccatctgaatcttggacggatctttccctttattttaaagcaaagtgacgaaaaaaaaaagagggcggacgaaaaaaagtgaattttttcgtcattttgccctcacacgccgggattttcacagactggaacttgtttttccggcgaaattttccaaatatgcgattcattcttattttgctgcgatcgcttccatctccatcaggacgcccttcggaagtttagatacctcgacgcaggaacgtgccgggcatgcgccctcgaaatatttcgcatagatttcatttacttttccgaaatcatccatgttctggataaatacggaggtctttacaacctgctccatggaagcacctgctgccgccagaagattctttacattggttaaaacctgctctgcctgagcctcgattccctccgggatctcgccggttgccggattgaccggaatctgaccagatgcaaataccattccatttacttcgattgcctgggaatacgggccgatcgctgccggtgcattggttgtgctgattactttcttcatgtcaaatctctcctttgtcttttattttaaacggatagaatcttcgtttacctctacttttccttcttttaaaaggtgtccaaccgcacgcttgaacgcgtttttgcttagattaaattcgcggcggataatctccggctccgcgcggtcattaaacggcagaacgccgtttttttctttcagacgtgccagcaccgcctcggcatccgcattcatctgacggtacgccacctcgcgcaggctcaaatccatttttccatcctcgcgcaccttcgtcacgcgtacctttaaaacctcgcccagacggcattttccatacagctcacggttcggaatcagaccgaaatagcggtctgccactgccacgaacacgcccagattttcattgatctcatagacgcgtccctcggtccactcgtccttcttgtacggcgcatcactgcaaagatacgaatataccttcatcgtcgccgccagacgaccgctcttatcgatatacagcgctaccaggcactcttccccggcgcgaaccggatatacctgctctttaaacgggagcagcagatctttttccagccccatatcgagaaaggcgccgatcttcgatacatccttgaccttcaaaaccgccgtcccgcccagttccagcttcggcatcgaggtcgtcgcaatcaggcgatcctcggaatctttataaataaataccttgagcttatcgcccacttttgtgccctccggcacctgtttcttcggaagcaggaccgccgccgcatcatctttcttctgtcccagatacacgccgaagtttttctcccgcactaccatcagttcctgtactcttcccagttcaatcatgtcattcgtcctctcttttctgccgatctctttttttatttaacggttgcatttttcattcactggcagacaatccacgccgaatctttcttcggctgcaatgattcagtttcttcactgctacatacaaactctttacaaaccagtccttgccagccacaaattcgcatacacctgaccttccgcatcctgcagcgataccacgtatccttccggcacctgcgccagtttcgggtacatcacattcccaagcactgccgccttccggtactccactcgcagttctccgagtgcaaagtccacaggcagcaattcacgcgcaatcgccacatactgtgcattgttcacgtgccggttcgtatcgagatgatggcgttccaccgtgaccggcgccgccgtctcatacgtctcaggcaggcggattttcttcggcgctggcggcattgcaagcggtttatcttcaatctggtagccctccaactggctttccggcacccgcaccgggcatcctttttccagatcgtagtaaaaccaggtcgaatccgcccgcaccagcgggtttcccatctcatcctcgatcgtgaaattccggtagccatagattcccttaaacccatacggccaggtcgaaatacggatccgctcgccaaaatgcggctgtctgagaatctctatctgccatccgctcagccaccacgcccgtttttcctcattcagataggaaattccgagtttcagatcctccgactggaacgtcgaacaatcctgaagataattcatgattcccactacagaaagatttccctcttcatccgtctcactgtaccggacccggctgtcaaatgtatacatatcgctctcttttcctttccggcttccggctccccgcaccatctccgcgcatccgccatctgccgtttcgtcctatattgccttaacattctgtcatgaaactcattatatccgattcgaaccacgttgtctacttacagacccagaatattgcagaatttgccggacgcatggcgcggtttctgccacagcagccgcccaaacaaaaaaaattatcaaaaaagcgaaaaaagtagttgacgaatctgttcccttacagtataatacaaatcgttcaattcattgggctatcgccaaatggtaaggcaacggactctgactccgtcattttcaaggttcgaatccttgtagcccagctaaaaagcatttgtttgccaaagacggcatgacaagtgctttttttgtattatggaaactccctctgaaatgttccataatacaacatttttcaactcaataaacctccatatgtttgcgagaaaacaagaaaagaacccccgctccggtcatccctcacagccggcggcaggggttcttttctatttccaaatattcttaataaatgtatagatcagccaaatcagaagaatcggtcccgccagatgaatcaggatggtgaaaatacctccgaccagtgcaaacagcacaaataagatcgcgataaccaccacgctgagaatcaccttccagtaccatttgttcaaatcgatgtaatggaagttcggcggcagaccgctgtcgtcccgctccgaaaaaccgccgttgtaggaggacgctgtgcgcccgctcccggcagcgtctcccgaagtgtacgaaccgccctggccggtctccccagcgccctcgctgctgtcgataatggttttcgcaatcaggcgtgggctgccgatctcctcgatcacttcttcctccctgcgccctttcgccgcctcctggcggatatactgatcgtaatagcttatgttgctctggatgactgaagccgaaacctcgccgtccagcgcctcccgaagctcctgtaaaaactctgtctttctcatcttgtctccttattcctcaaaccgtcccgcttctcccgttttacccagccgaaagaaacaagcttccagttcccgtccttttcaactgcctcagcgcacgcgctctttcaaaagtccgctccggtacgctttcaagagctctttcagatcctcgatgcgacccgccagctccttgccctcgtcggtatccgccactgtgatgcgcttctgcattttctccacaatatataccttcggcgtccgctcgcgctccgggtcaaatggcttgtgttccgcaagcgcgagatggtgcgaattgaaaatcaacgtatatccggcgattcccgtccgctcctggtaggctttcgacagcccgccgtcaatgatgaagagcttgccgccagcccggatcggtgtctctccactcttaatcttcaccggcatatgcccgttgatgatatgcgatcccttcgtcggaagtccaaattccttcaaaatcatatcgcaggtctcttcttcctcactgagctggtaatacgggttcatcgtctctctcatcacttccggatcctcaatgaaataatgctcaaagctgcggtttttgtcctttccaaataccggcgatttcgcaccattccacagataccacataaaatcgcggcacgcctccttctccggcgcgtcctctggaagaaaataggcatttttaacctgtgtgtcaataaaatccatcaattccttgccgcggtacatcttgccgcccaccatcagaccgtcaaattcccgattctccgtcatcgggatacagccgtgatagagcaggttggaattgcagcatttatacatgcttccgttggaatataggaaacggacatgctcatgcagccgtgcattgtggcggaacgacagctccagcgtgtgaagcagctcttcctcttcgtccgtcagccgcagcggatccgccggatccaccgtcgggaaattcatgtcgcgcatcggatactcttttccatcgatcgtgaccgtgccgcggtcataacgaatcgctgacagaagtatccgctcttccatcccgtactccggatggcgcttgatgatctgcccctcttccttatactgtaacaccgcgatcgccttgtgcatcttcgccgccagcttcggatccactgcgtcgtaaatatttttgtcaagaatctgcggcagaaaacaggtacacggatcgtcccggtacacgcgctccgcaaacatcgacagcgggcgcaggttaattccgtagccgtcctccaatacatcaaatccattgtaaccgagcgccatacgcaaaacattgcagatacacgcccggttgcccgtcgccgcgcccatccacgaaatatcatgattgccccactggatatccacatcatggaaatgcatcagttcctccagaatgatatctggcctcggaccacggtcaaatatatcgcccaggatatgaagattatcgatcgtcagactccggatcaggctgcagatcacgacaataaagctgtccgccacccggacgtcaatcagggtattgatgagttcgctgtaatactccgtcttattgtcatcggtattatcgacatataaaagctcatcgatcacacccgaaaattccctcggcatcttttttcttaccttggaacgggtgtatttcgacgaaacctcccggcagatctgcaccagacggtagaccgccgtcttctgccagtcctccgtgtattcgttcgcctgtttgatctgattgatcattttttccggataatagataaggttcgccagccgtacctcgtcctcctccgaaataatatgtccaaatgtctcgcggatcttctcccggataatacccgacgaactgcggagcagataaataaacgcctcatgctcaccgtgcaggtcactgaaaaaatattccgtgcccttcggaagtccacagattgcctgtaaattaataatatcactcgccgccgcccggatattcggatactcccgcgaaagcagcttcaaatatgctaaatccctcatgttatcagctcccaaactgcgctgtctgcccggatattgtcgtgactcgttatcgtcgcgctcgctttgggtaaacagcacattatctacattgcatttgcctttttgatagatttatagtagcatagattcagatcagggtcaaaatatattttcggcactttcggttccaaaagtgcctactcgtgaacagaaacatacttttccatacataaatacaggaggaacattcatgacgcaaccacacactctctacgtgtttggcaccggcaacgccacgatgacacgttattataatacctgcttcgccatccgctccggcgaggaatatttcatgacagacgccggcggcggcaatggcatcctgcggattctggaagaaatgcaggttccattaaaccgcatccatcatctcttcgtgacacacgaacacaccgaccacattctcggcgtgatctggatgatccggatgattggcactgccatcaaaaagggaaattatgagggaatttttcatatttactgccacgacggcctgatcgacacgattcagaccttctgccgcctgacactccagaagaaattctgcgacctgatcggcgatccgatccagctcatcccgatttctgaccgcgaaacccggcagattctcgatatggaggtcaccttctttgacattcattcgaccaaggcgcgccagttcggcttccgcgctgtgctgccgggcggcaagatcgtctgctgcccgggcgacgaaccgctgaacccgctctgcgaagaatttgccaaaggcgccgactggcttttccacgaagccttctgcctctaccgcgaccgggaaatcttctccccttatgaaaaacaccacagcaccgtcaaagatgcctgcgaactcgccgaacgcctcggtgcgcagcatttgattctgtggcacactgaagataagacttatccggaacgcgctgctttgtaccgcgctgaaggggaagcctattatcatggggatttgctggtaccggaggatgggagtgtgatagagctgtgattgtatcttgcagctctacctcttcctcaaatgataatacgtcatcgtcgccgacgccagcagcgtctccttatcatcataaatcttgcattcgcacaccgaaaatgcataaccattctgtatttcctgcgcccgggcgatgattttggatgtgttttttccagctttcagataatggatcgtgccatccacggtcgggactgcgtagtcgcgcccggtcatcgctgcggtgccgcccacggtatccgccaatgaatacaggacgccgccgtgcacgatacctaagatattcatatgccacggtttcaatacaatctctccaactgcatagcccgggcgtgcctcggtgatctccatctcgattttcttccggaaatcattggctgcatccgtctcctgtccgcgcttgtcccagacttctgagaatgagccggacggctttttcttttcttccttcttttccatttcatgtacctccttgtatatatgatttactctcttttttatttctctgcaggtcatctattattttcttctattttttctatcacttttctctctgatataatctgtttgtataatctgtttgcctgaatcagcccatcctttttcctcgcctcaaacgctttttctcataatttttccaaagatggactcatactttctcccatcctctcatacaatcttatcagattgcaaaaatgttattgttcacgcatacgtgcccagtaacggaatttgccgtggcttcgcatttaaatactatcgcacaggagggatctgtcttgaaacgaagttctgttatcattgcactggaaatctgcgccattgcggcgctctttgtcagctggtccttccagcgtccgaacagccgtcaggtcacggtcgggaatgcgtcggaacattttatccgctgggtggatttcgatgtgaccgccgacgccatgacacaggcgttccgctatgatgttgatacctgccagcaggatctccacctgaactgggtcgatctgctcgcctacctgggggcgcgctacgggggcgatttttcgcattatcaggcgtccgatatgacggaagctgccgaacagctccaaaatggcgttacagtggaagaattgacgaaaaatatgacctcttttgcctattatcgtgaggcttacggcgcggttctggatggaatggtcggactgtatgaaattgagattccgaaatcggaagcaccggcttttgcactggcggacgcgcagatacaggaaggggatccggctgccaatacttcctacgcaacgacaccaccaccaacaacagcaaccacaacagcaaccacaactggtacagacacaatcgactcagccagtcaagcttcaccagaaacttcagcctcatccaacacacaaacttctctcgaaaccccagcccccactctctccgatcccgacgctgtccccctgactccctccggtgaggaaaaagtctgggttaccaaatatggtctgaaagcgtttctcccactagcgaaaaactttccctacagccactatgacgatttcggtgtctcccgcagctacggttaccggagacggcatctcgggcatgatatgatggggcagacgggaacgcctgtgattgctgtggaatccgggcgcgtcgaggcgctcggctggaaccagtacggcggctggcgcatcggcatccgcagctttgacgggaaacgatactactattatgcacatttacgcaaagactacccctaccagtcaaacctaaaagagggcagccttgtcaccgccggggacgtgattggttatctcgggcacaccggctacagcagcactgaaaacaccaacaacattgctgaaccgcacctgcatttcggattgcagctcatttttgacgaatcccagaaagaaggaaacaacgaaatctggattgactgctatgaactgatccgttttctggcgataaaccgctccgagaccgtcaagaaagaaggcaccaaagaatggacgcgtgtttatgaaatgaaagatcctagtatcgatcaattttccaccccatgacaaagttttcttaccaagtcaatcctgtcgcttaatataacccgccactgacagtttctcaccaatatatacatataattatcacgttaaaaagccatgcagagattcttcaataaaaacattctgcaatccataaaaatacagccggaaaaggtgcacccaaaaccgcactttctccggctgttttcaataaaacttattatttgatcacgcgcacgcgcatcataccctgaatagctttcagcttctcaatcgtcgccgcgtctgccttggtctccagatcaaccagcgtataagcgtatttatcacggctcttgttcgtcatgtttgcgatgttcatgtcagtcgatgccaggatcgaggaaatctgtccgatcatgttcggcacgttcttatgaagaagtgcaagacgacctacggttgtgcacacgcccatatcgcaattcgggaagttgacggaattcttgatattaccattgtccaggtaatccatcagctctttgactgccatcacggcacaattatcctcggattcttctgtggatgcgcccagatgtggggttgcgatgacgttcggcatctgcattacgtttgcattcgggaaatcggtgatatagcgttttacacgaccggaagccagcgcctctgccatatcgtcgtcatttaccagaaggtcacgcgcaaagtttaagataaccacgccgtccttcatctgtcccaggctgtctttgttgatcatctggcgggtgctgtcaagcagcggtacatgaacggtgatgtaatcgcattcctgatagatcgtatcaacagatgtgatgtgctttacgtctctggaaagcatccacgctgctttgacagaaataaacgggtcatagccgtatacttccatgccaagcgctgcagctgcgtttgcaacctctgcgccgatggcgcccagtccgataacaccaagctttttgccgcggatctcatgaccggcaaatttctttttcgccttctccatatctttggagatattttcattgtccttctgctccttgcaccagtcgatgccgccgactacgtctctggctcccagcaacatgccagccagcaccagctctttgacaccgtttgcattggcgcccggtgtattgaatacgacaacaccagcctccgcacacttgtcaagcggaatgttgttgacgcccgctccggcacgtgcaacggcacgcagtcccttcggaagttccagatcatgcatggcagcgctgcggaccagaatgccctctgcctccgccaggttgtcagtcatctcataattttcggtcagtaaaccggttcccagcttggaaatcggattcaggcaatggatttttctcattttttaactctcttttctttcaaaatttcaaatcttcccatacgcgggctgtttttgttttaaaaagtccactgctgcagcagaaaggaacggattccccctccctttcgccgcagcaatggcataaattttaaaattgattaatttgtatgttttttctcaaattcgcgcatgaaagcaactaatttctcaacgccctcgatcggcattgcattatagatgctagcacgcataccgccgacggtacggtgaccttttaagttcacaaagcctgcctctttggcttccttgacaaacagggcatccagatctgcatcgccggtgacgaacggtacgttcatcagggaacggtcctttttctcaacggtacccttgaagagcttgctctcatcgaggaaatcgtaaaggatcttcgccttcttctcgttgcgctccttcatggcacttaaaccacccattttcttgagccatttaaataccttgccgcacatatagatggtgtatgtaggcggtgtgttgtacagagagtcattgtctgcgtatgttttgtagcgcagcatggttggtgttcccggaagaacctcctcagtgatcagatcctcgcggatgatgacgatcgccataccagccggacctacgttcttctggacaccgccccagagaataccaaacttactcacatccagcggctctgacaggaaacaggaggagatgtctgctaccagtgtcttgcccttggtgttcggaagctcgtggtatacggttccgtaaatagtgttatttaagcagatatacacgtaatctgcgtcctcatccactggaaggtccgaacaatccgggatgtaggaaaaggtcttgtcagcgctggatgcaatcgcgttggcggtaccaaacatctttgcctcctgatatgctttctttgcccactgtccggtgatgatgtaatcccccaccttatttttgaacaggttcatcggaaccatggcgaactgcatattgccgccgccctgtacgaataatactttgtaattgtccggaatctgcatcaattcgcgcagatccttctctgcatcatcaatgatggcctggaaatccttggagcggtggctcatctccatgacggacatgccgctgccctggtagtccagcatctctgccgctgcctctctcagtacctcctccggaagtactgccggacctgccgaaaagttatagactctgctcataataaatctcctcctgtcttacacaaaaatgtgataattgcccccattttacaactattcgatgcgtaagtcaatctcatcaaacgcttcctcgatcggttttccagccggaaccatcgggaataccttgtcatcgctgccgatctggcactcgatcataaccgggatatttaagctgatcgcctcgcgcagcaccggctccacatcctctttcttcgtgatacggtatgctttcgcgcccatgccctctgccaccttgacgaaatccatctgatcgtaaagctccgtctgggaatagcgttttccatagaacagggtctgccactggcgcaccatacccagaacatggttgttaaatacaacctcgataaccggaatattgtagcgagttgccgtcgcaatctcgttcatgttcatacggaaacagccgtctccggcaatattgataaccgtcttatccttacagcccatcttcgcaccaatcgctgcacccagaccgtagcccatggtgcccagaccgccggaggtcagaagctgtctcggacgtttgtatttataatactgtgccgcccacatctgatgctgtccgacatcggtacagatgatcgcatcgccgccggttaccttgtagatctcttccatgatatacggaccggtcagaacttccttattgtagcggagcgggtacatatctttcagacgctcaatgtgactcagccactcgtcatggttcatcggatccagacgcgcgtttaacttacgcagaataatcttgacatcgccaataatgctcgcatcggtctggatatttttgttgatctccgccggatcgatatctatgtgtaaaatctttgcattggttgcaaaatggttcggatcgcccacaacacggtcactgaaacgcgcgcctacaacgatcagcagatcgcactctgccacaccgaggttggatgtcttggttccgtgcataccgatcataccggtataaaggacatcggttccgtcaaatgcacctttacccatcaggctgtcacccaccggtgcctgaattttatgtgcaaatgcacttaattcattggcagcatctgacgccactgcaccgccgccgacaaaaataaacggttttctcgccgccttgatcatctcgatcgccttttccatgtcttcctcacggatcagctctgtctcgcgctcgatcggctgcggttccttcggctcgtactcgcaggccgctgccgtcacatccttggtgatatccaccagaaccggacccggacggccactcttagcaatcacgaacgcacgacggatcacatctgccagcttcgtgacatcctttacgataaaattatatttcgtgatcggcatggtaacacccagaatgtcgatctcctggaagctgtcttttccaagaagccctgtcgttacattacaggtgatggctaccatcggaatggaatccaggttagccgttgcaatacccgtaaccaggtttgtagctcccggaccagatgtcgccatacacacaccgaccttaccggttgctctcgcgtagccgtctgccgcgtgggacgctccctgttcatgagaggtcaaaatatgggtgattttatccttgtgtttataaagtgcatcataaatgttgaggatcgcgccgcccggataaccgaacaccgtgtctaccccctgctctttcaagcattcaatgacaatctctgctcctgtcaatgtcttcatctgtctaacctgctttccttccttaaaccattttaaatgcatatcaagcagtactttccgtctcaaaagcacctgtctgaagcccgcaatgattacttctgtgtcttcggaacctccaggattgcgccccggtttccgctcgttacaagcgctgcgtaacgtgccaggtatccggtcgtaaccttcggttctctcggctgccatttctttcttctctctgccagctcctcgtcggatacgagtacgttcagggagttattgttgatatcgatggaaataatatcgccttcctcaaccagcgcgatcggtccgccgactgccgcctccggagaaacgtgtccgatggatgcacctctggatgcgccggagaaacgtccgtctgtgatcagagctacgctggaaccaagtcccatacctgcgatggcagaagtcgggttcagcatctcacgcatgcccggaccgcccttcggtccctcgtaacggatgacaacaacatcgccagccacgatcttgccgcccttgatcgctgcaatcgcgtcttcctcacagtcaaatacacgcgctggtccctgatgtaccagcatctccggtgcaacggcagaacgttttacaacgcctgtatccggtgccaggtttcctttcaggatcgcaataccgccagtctggctgtacggattgtcgatcggtcggataacctccggattcttgttgacacagcccttgatattctcgccaacggtcttgccggttacggtcatgcagtccagattcagaaggttcttcttggacagctcattcataaccgcatacacgccgcctgcctcgttcagatcctccatataggtcggacctgccggtgccagatggcacaggttcggggtgcgcttgctcatctcattgaccagctccatgttcaggtctacgcctgcctcatgtgcaatcgccggaagatgcagcatactgttggtagaacatccgagtgccatatccacggtcagtgcatttaaaaatgccttttctgtcataatatctctcggacggatgtttttctcatacatctccataaccttcataccagcgtgttttgccagtttgattcgctcggagtaaactgccgggatcgtaccgttgccctgaaggcccatgccgagtacctctgttaagcagttcatgctgttggcggtgtacataccggaacaggaaccgcaggtcgggcagaccttacattcgaattctttcacatcttcttccgtcatggtgcctgctgcgtaggaaccaactgcctcgaacatgctggaaagacttctcttctgtccctttacatgaccggctaacatcggaccgccgctgacaaatacagtcggtacattgacgcgggctgctgccatcagaagtcccggtacgtttttatcacagtttggaaccataaccagcgcatcgaactgatgtgccagcgccatacattcggtggaatctgcgatcagatcacgggtaaccagagaatatttcatgccgacatgtcccatagcgataccatcacagactgcgatcgccggaaatacaaccggtgtgccgccagccatcgctacacccagcttcacggcatttacaatcttgtccaggttcatgtgtcccggaacaatctcattataagaacttacgataccgacgagaggtttgttcatctcctcttccgtcataccgagtgcattaaacaaagaacggtgaggtgcctgctgcatcccttttcttactgcatcacttttcatcttttcgtctccttctatctctttcgacgacctccgcccctggtgacaggggcggtttttacgtttatctttgattttatcgcatttatgaaatttttgcaatctttctatttaattctctcacagatcagcctgcccatctcaacggttccaacctgcttgcagccatccgccatgatatccacggtacggtagccctcggtcagtacctgctgtacggcatcctcgatggcttttgcttccttatccagatcgaaggaatagcggagcatcatcgctgcggaaagaatagttgcgatcgggtttgcgatgtccttgcccgcgatgtccggtgcggaaccgtggctcggctcgtagagaccaaatttgccctcgtttaagctggccgaagacagcataccgatggagccggtaatcatgcttgcctcgtcagaaaggatatcgccaaacatgttctcagtcaggatcacgtcgaactgtcccggattcatgacaagctgcatcgcgcagttatcaaccagcatatgggtcagggtaacttccggataatctttagcaacttcctcgactacctttctccacaggcgggaggaatccagtacgtttgccttatcgacgctaataacgctcttgcggcgcttcatcgcgatatcgaatgccttgattgcgatccggcggatctcattttcattgtaggtcagggtatctaccgcggtcgtcacgccatcaatctccttcgtgtaacggtcaccgaagtacagaccgccggtcagctcacgcatgataaccatatcgaagccgtcgccgatgatctctttctttaacgggcaggcatctgccagctctttgtagaggtatgccgggcggatattcgcgaacagtcccagacctttacggatggcaagaagaccggcctccggacgcaggttcggagctacatcgtaccagcgggaatttcccacgttgccgccgactgcaccgagcaggacggaatcactctttttcgcggtctccagtgcctcatcggtcagcggtacgccgtactcgtcgatggaacagccgcccatcaggatttttgtataattaaatgtatgaccgtagacagcgcccaccttgtccagcacgccgcatgcctctctcacaatctccggtccgattccgtcgcccggaatcacagtaatattgcaattcataataaaatacctcccttgtttcaaacggttactttttatcatatcggattccgtcctattttgcaatcttctgacgaaggaaaaccggtattccccatatagtaatttggaatttattctataacctggggttatctgtaaaataaaaaagaatgtgccttggcacattctcgcgccgagcgcggtcgcttgcgacatgtttctgcttcgcgcgagtgcgcatcattggcacgttagtgcctttttgtgtaatagggaattccaaggaatttcctgttacacaaaaaaaggaccgccgcccccatcgggagctgcgatcctctcactttcttaccgttcttcttagacttccggtttctcaacctgaacgattgcatccttacgcatcgggatgcggcagttcttgttgcttccgaactctacgattacagtatcatcggtcatatcgataatcacgccgtagaagccgctggatgtcagaacgctgtcgcctactgctacggttgccatcagttctgcctgttttttcttttccttggactgtggacggattgccataaaatagaagatggcaatgataaatacaaggtaaacgatcattccgcttgtgctgctcatgtggtatatttcctcctttagttcgattcacccatcatgcctgcaagtttctttgctttatactcagcataacagtgatgttcgatcgcgtcgcgaatctcttccatcattttattataaaaatacaaattatgcaagacgcataatctcatccccagcatttccttcgccttaaacaggtggcggatatatgcgcgggagtaagaacggcatgccgggcagccgcagccttcctcgattgggcgcggatccagctcatatttgctgttcaggagatttaatttgccatggttcgtgtatacatggctgtggcgtccattccgggacgggtacacacagtcaaagaaatcgacgccccggtctaccgcttccaggatgtttgccggtgtgccaacgcccataagataagtcggcttgtcctccggcaggtgcggaacgactgcatccagaatccgatacatttcctcatggctctcgccaactgccagacctccgaccgcatagccatcgaggttcattttgctgatttccttcgcgtgttcgatacggatatcctcgtaaatcgcaccctgattgataccaaacaggagctgttcccggttgaccgtatccggcagtgcattgaggcgtgccatctcatccttgcagcgcgccagccagcgcgtcgtgcgctccactgatttctgtacatagtcccgatcggcaagactcggcgggcactcatcaaatgccatcgcgatcgtcgaacctaagttggactgaatctgcatactttcctccggtcccatgaaaatcttgtgaccatcgatgtgggagttaaaataaacgccctcttctttaatcttccgcagtcccgccagggaaaacacctgaaatccgccggaatccgtgaggatcgggcgatcccagttcataaatttgtgcagaccgccaaactgtcggatcagcttgtcgccggtacggacatggaggtggtaggtattggaaagttccacctgcgtgccgatcgtgcggagatcatcggtcgaaaccgcgcccttgatcgccgccaccgtgccgacattcatgaaaacaggcgtctggatggttccgtggaccgttttcatttccgcgcgttttgcgcggccatctttgtataaaatcttgtattccatcttttttcctatactttttacttctctgcctttgccttcttgccagccggtttggcattcttctccatgcgctttttattcagcacataccagacagagccggacaggcatacggacgaatacgtaccgcagatcagacctaccatcagcggaagagcaaactcacggatggaagatacacccaggatgtaaagaatcaggaccatgacgaaggtcgtcagcgtcgtgttgatgcttcgcgtcagggtctggctgatactggtgttgacgatcgtctcagcggactctttattgcccagaagcttcatattctcacggatacggtcgaagataacgatcgtcgcgttgattgagtaaccgacaatcgtcagcatgcaggcgatgaacgtcgaaccaaccgaccagcgcagcatcgcatagcaggtcaagacaaccagtacatcgtgcatcagggcaagaaccgcgcccgccgcgaacgtgatattgctgaaacggaaccagatgtagatcaacatgcagatcgtcgcaatcgtaaccgccacaatcgcatcgcgcttcatctcctggctgactgcaccggagatactatcggctgtgatcttctctttatccacaccaaactgatccgccagcgcctggtttaactcttcgcgctcgtccatgttcagggtacgtgtcttgatgataacctcgttgcttccggctaccttctgggtctgtgtgccagcttcgccggtaatcttttctaccaccggaaccacctgggaggaaatatcttccagagacatatcctcgttaaaggtaacgtttgtagaagtaccgcctctgaactccatgctgtagttgagcggcacacccatcgaagactgattgtgaaccatgctaccgacgcctgccagaatgatcacgagcgacagagcaaagtaaagcttgcggaatttcaggaacggacgcgtcttcatatccttgcggcatccgtagaatttcgcatcctcaaagcccatctcatagaagcagttcagggcaaatttggttacaaacagcgccgtgaacatagaaagcacgataccgattgccagcgtcgccgcaaagcccttgacggtaccggaacctctccagaacagaaccgctgccgcaatcagggtggttacgtttccgtcgatgatcgcggaaagtgccttggcgaaacctgccttgatcgcattcttgacggatgttcccagaccgatctcctctttgatacgggtgaaaatgataacgttcgcatccaccgccataccaatcgacaggatgataccagccacgcccggaagcgtcagagtcacctcaaatgcaactaacaggatcaggatcagaccgacatacaggcacagagccagagatgcagccagacccggaagcagatatacggcaatcataaatacaatgacaatggcaaatccgatcagacctgcctttaagctggtggagatcgcctcctggcccagcttcgcgccaactacgttggaacgcagctcttccagctccagggacagggaaccgatacggatcgtggacgcaagattatttgcctcttcataatccgccatgccgtcgatctggcactgtccgcctgtgatcgcctcacggacggtcggagcagaaataatctggttatcataaatgatataaattggttttccgacgccattcgtggtcgcctcagcaaatgcctgtttaccttcctcggtaaaggtcagagaaacgacatacgccttggaaccggtcgccttatcctcggtcatgccggctttcgcgctggcaacctgtttaccatcaaggatctgatttccttcagagtccacgaaaatcagggaacccggttttcctaactcttccagaatcgcgttggcatccgatacacccggaatatctacgttgatacggttattaccctcctggtaaacctccgcctcggtactgtaattctgtacacgctgctggagcttgtagatcgtatccgccatatcctcggaagacggattttcttctttcgcctgataggtaatgctgacaccgccagccaggtcaagacccagcttgatctgattcatcgtcgaatagccgaaatagccgaatacgccgatggcaatcagaaggagcagcatccccaggaagctttttccttttttgttcttcattcctctctctccttgttctctactcgtcagagccgtctgcaagagcagcttttatcatgatcgcgcactcgatacgttttttctgcatctcgcacccgatatcatacgcatccgtgatggaaccgtggaagttgtaggaattggccgcacagccgccgctgcagtaaaatctggcaaaacaatcccggcatttgtccttcgcataaacattgcagagcttgaactcatcgcggactgccgtgttggtcacgcccgtatctacattgccgagaaggaaatcttcatttcctacaaactgatggcacggatagaggtcgccccacggggtaactgccagatactcagttcctgaaccgcatccggacagacgttttgccacgcacggtccctgtgtcagatcgagcataaagtggaagaacgtgaagccgcgtccctctttgtgtctcttgacatactctgctgccagacggtcatattcctcgagaatctgcggaagatccgcctctttgatcgcgtagggctcttcatccggtgctacgaccggctcaaccgacattttcttgaatccaagatcggcaaaatgcagaacatctttgccaaaatccaggttgttgtgtgtgaaggtaccacgcacgaaataatcgcggtctccgcgcttttctgcaaatttctggaacttcggcacgatcaggtcgtagcttccggttccgttgcggaatgggcgcatcttgtcgttgacctcttttcgtccatccagactgagcacgacgtttgccatctcgcggttgcagaattccataatttcatcgtttaacagaacgccgttggtggtcagtgtgaaacggaatttcttgttgtgcgcctcttcctgggaacgtccgtactcgactaactgtttaaccacctgccagttcatcagcggctcaccgccgaagaaatcgacttccaggttccggcggtttccagaattggcaatcaggaaatccagcgctttcttgccgacctcaaaggtcatcagcgctctgcgtccatgatactcgccctcttctgcaaagcagtactgacaggcaaggttgcagtcatgcgcgatatgcaggcagagtgccttgacaaccgtctggcgcttcttgaaatccataacgaagtttttgtaaatgtcagcggtaaagagttcttcctgatcgatgagctcctgaatgtcctcaaacgcctctccgatctcttcctggctgtatttctcttttaatgctgccgccgtctcgtctttcagggactgggcaatctgaaacggcttctcgctgtccggaatccgctccgataaaaaggaaatcacatcgtacagaagcggatcgaccgaatggacggagccactgttgacatccagtacgatataatatccattatttatatactgatgaatcactgtctttctccttctataagacataggcaggcagacaacccggaacatatgcagtcctctcctcggaccgcgctccgtcttgtctgcctccctgtgtcaactctgcgttttctcagactccagctctcccactcatgaaaagctctgatttatcagaaaacgcctcatttgttttgtactgccaattagcggttctggttctcgcagctctggttacctacagtacaggatgtcttacatgcagactggcaggatgtctggcactcgccgcagccgcctttcttcatgctgttcttcagtgtgcttgcgctcagtgtctttacgtgtttcatctctatgtcctccttcatttttttagtatataaagtcctacagattatatcatatgttgcccgcttgtgcaagcgtttcaatttaacgtgtttctcacagattccggctttttgggaactgttcacgggtaggcacttttggaaccgaaagtgccgtaagaaaacgtggtggcagcaggaatttgccgtattgagatgcgaagccacggcaaattccgttactgggcacgtatgcgtgaacagtaacgcttgtttataacagtgtttcattctgcaagcatatttgtccttctttgttcatatgaataaaaaaagaatgcacacaggtattttatcatggaaaaatcagctatccagattctgctccgttcttccctcttctcctacgcggcaaccgctgtctttctgcttctgctcgcgtttgggatgtaccgttttcagtggggtgaaaaggaaatcacgctaggagtgcgcggcatctacattctcgcctgctttctggcaggactcgtcgccggaaagaaagcaaaaaggcgccggttcctctggggattctgtgccggcgccctttattttcttatttttctagccctgtcttttgcgatccgacagtccctcaaggagactgcctcatccctgctgctttccttcgccctctgcgccggaagcggcaccatcggcggtatgtttagctaacgccgcctccgacgggcttaacaggtacaaatgaatcttatcgatccggttcttatccacacattcaacgacgaggcggacgttttccaccacaacctcttctttttcctgtggaagatggttcaaaagtccgatcaccagtccgccgatggaatcatattcgtctgactggagctccaaattcaggcgttcatccagatcgtcgagtttgaccgaaccatctaccatgtattcccgcggggcgatgcgctgaatggatttttcctcgtctccatcgtactcgtcccggatatctccgacaatctcctccagcatatcttccagcgtgataagaccgaccgtcgaaccgtactcgtcgagcacgatcacgatgctgatcgctgctttccgcatctcgcgcatcagctcagcaaccttcttaaactcatatgtatagagaggtttccgcagatatttccggacagaaaagccctcttccccgccttttaagaaaatatccttgatgttcagaacaccgatgacattgtccgtcgtctcctcatagaccgggtaacgcgtgtatttctcactgcggaatacctccatcagctcgtcatacgtcgcatccacgtccacaaacgtcatgttgaccttcggaagcatgacatcacgcgccacggcgtccccgaaatcaaacacattgttgatcatcttcttctcttcggactcgatgacgccctcttcgtggctgacctccacgatcgttcgcagctcatcctccgtgatggactcgccctttgccttcacatccacgcgaagcagcttcaacactaaaaatgatagctggttgaccacaaaaatgaccggtgtcagcaccgtcatgatataataaatgattttagcgaaccgaaatgcaatccgctcagcctgtatagtcgcaaccgtcttcggcgtgatctcgccgaaaatcaggattaaaagcgtcagaatgcccgtcgcaatccctacgatcttgttaccccagatgtgggtggcaagaaccgtcgcaagagaagacgcatacaggtttaccacattgttgccgatcagaatcgcactcagcattttgctcggatcctctatgatcttcaatacatactctgcctgcttatcgccattctccgccagcgtccgcacccggatcttgttgaccgtcgtcagcgccgtctccgtcgaagaaaagaaagccgacatcaaaagcagaagtatcaaaatcaatagctgtatcccatcaccagaactcaaaaaactcaactcctatctccccatgtaggggattactcttttttaaggttgattctaccgtatttcataggttctgtcaataaatacaggcttgcatttccatacttctgccgtctccgggagtttgaccgttgaataatagaaaaataccttgcaggccgcatagaacctgctttttttttgtgtcaaaaaaattcggagtctttttatattgcaaaaagctatattaataacgagggaaaaagtacatctgttaatgtgcgtaaactgggaacacttaaagaactccttattaaacatggacctcatactctctgctccaccatgcctgatatcccgtattttcggtcactatttccttatcattaaagcatatttcagtctctgccggaatctcaacaaagcttgggcgtgacatataaatctttatgttatccatttgaaatatcattttaagaacattcggaccacattcttccattgcactttattttactttaccctataatgtttataaaaacaatccaattcttacagtcataaaagatacaaaccagcgttactgttcacggataggcacttttggaaccgaaagtgccgtaaggaaacgcggtggcagcaggaatatcataaaggagataagcaaatgaatttatccctcggaatcgacatcggcagttccagcaccaaggcggcggcgctggatgagcatggcactctgcttggtacgcttcaggttcacgcggatgacccgcgcacctcggcttacggtgttctcgggcgtttcctggatcagcagggcgcttcgtttgacgatgttgaaaaaatcgtcctgaccgggctcggttcgacgtatttccatgaaaatatcttcggcatcccgaccatccatgccctggagctggatgccatcggacacggcggcctatacctgtccgggcttgacgaagcgctggtggtcagccttggaaccggctctgcctttatccgcgcttccaggacaaacggcttccgtcatctgggcggaagcggcgtcggcggtgggacacttgccggcatggcggagcgctttctcggcgtcaccgacatttttgccctctcagagatggcgctgcgcggcaataaggccatggcagatctccgcatcgccgacgtgcaggaggaagatgtcccgggacttgccgccgacttaaccgctgccaattttgggcgaatcaaaagcggcgcctcggatgctgacctggctgccgctcttttcaatatgatttatgaaaatgtgggtgtgatggcgtccctggctctcagccaggacaccacccggaatgtcgtcctgaccggttctctcgccagccttgcacctgctgcaaagacctttgacattttcaatcagatgcacgatgtctttggaatcgactatatcattccgcctcatccgtctttcgccacggcagtcggagcgcttttatgtgagcctctgccggagaactaagatcacggacggctcccagcagatcggaggctgcgatcagggcgcttcctgcgaagataaaaaagtctcccagattaaagacgaccttttccaggtatttacaccggatgctgaaataatctaccacataaccgcgtttgaggcggtcatacaggttacttaaaccacccgccgtgatgagggcaaaaccgatccgatcggcttttctgccttcgtcccggcacaataaccatgtcagaatgcccgctgccgccgaggtaaagacaaccggcaccatgcggaccagttctttcttttctttttttactccaaaacagaaaccgtcgttgtgattgcggtacaggcggatctttccatggcttttttccatgtcgcgcggaaaatcttccggtttctgggcttctatgttttccttgcagaaataatcgatgccgaacagggcagctatcatatacaggtattttttcataagggcacctcctcatataaatgtcattatctaacttatatttattataacaagtttttccgacagagtatagggaagctttcgtattttaccgcatatcttatcttaaattctaaaaaatctctatggaaaacgctatgaattgctcttctcttccagacaaccaaaccgccgattttatcgaacgtttttttccttttacctataaccagattttggaaaatgattccggctgctatgattttgtcaatcatgagtatgtgatctggcaccggtctctggcggaggcgctgccgctctcagtccagcagtatggctatgactcgatcccgaatctttataccatattagatacatccagcctggacagcgcaggaatttcccggacggcagaacagcccttcctgggaaacaaggggcgcgggacgctgattggaattgtggatacggggatcgattatacaaatcccttgttacgcgatccggatggaagcacgcgcatcgccgccatctgggatcagacggttccgggcacggggcttagcacgccggatccgatcgatgcgctgcactacggaagtgtctaccagcgttcccacatcaacgaggcgctgcgctcggaagatccgcattccatcgtccccacctcggatcctctccgccacggcacgcagatggcgctggtcgccgccggttccgaagatgccgatgcttttttctccggggcggcgccggaatcggaactggtcgttgtacgcttgaaaccagccagaacctatcttcgcgatttttttctgatccgcgaggatgccatcgcctttcaggaggacgacatcatgctcggaatcaagtttcttctttatattgccaggcaggagaaaaagccccttgtgatcctgctgggtcttggcaccaataccggaagccacagcggcacttcgccgcttggtctatatctgaacagcctgtcgcgcgccagcgggcagattctggtcgccgccggaggcaatgaaaccgggcgcgggcaccattttcgcagtgtatttcctgcttccacctcctatgaggatgtggaactgcgggtcggtcccggcgaacggggatttacgctggaactgtgggcgcgtgaatcggagctttacagtgtcggatttttatccccctccggcgacgaaacgggacgcatccggctctccggcgacgaagaacgccggattccctttcttctggaaggaacgaccattcacctcaactataccagctccgagctggcgaccggaagcgaactgatcctgatgcgctttgatgcccccgccgccggaatctggaaaatccgcgtctaccatacgctctcgattcagggtgaatatcatatgtggctgccggtgcacggctttatctcggatgaaaccttctttctgcgcccggatccggacacaaccatcaccgatccgggcaatacagcagccatcatcaccaccgccgcctacagccaccagacgggcgggatctatctgcattccagccgcggttttacccgcaccagaactatcaagcccgaccttgccgcccccggcgtccggctcccgcttcccgattatcaggaggtaaccggaacctcatttgccgccgccatgaccgccggagccgccgcgatcctgctctcctggtctgcctatacgccatcagccccgcggatcaacacctcgattgccaaggcatttctgatccgcggggctgaccgccgaaattccatcgaatatcccagccgggagtgggggtatgggacgttaaacctatataactcttttttatccatgagaagttaattaacttctgctgttttctcttcacacacaaattgcttttccggatccttacatcgctaactttcaccacatacatgacaccgttcaccgatcatgttcctgaaaagctattatccccgcatctctatccgcggaccgccattcttctccagatacgggcgcgtaatcacaacggatccgatattcggatctttcgggatctcatacatgatatccatcataaaatcctctaaaatggcacgcagcgcacgggcacccgtatctttttccagcgcccgctcggcgatccactccagtgcatcgtcctcaaacaccagtttgacctcatccagcgccagcaggcgctcatactgcttgaggatcgcatttttcggttctttcagaatccgcatcagcaattcctttgtcagcccctgcaggctcacaagcaccggcagacgtccgagaaactctggaatcatgccaaaattccgcagatcttccgttgtcacctggctcaaaatatccggatcattgtcaaattcatccttcaaatgggagttgaagcccatcgtggaacgctttttcaggcgctccttgatgatatcatccaatcccggaaacgcgccgccacagataaacaggatgttgttcgtatccacagtcgccatcggcgtgagtgcattcttctggtttgagccgaccggcacctctacctggctgccttccagaagttttaaaagctcctgctgtaccgactcaccgctgacatcgcggctcatcgtatttttctttttcgcaattttatcgatctcatcgatgaaaatgatgccttgctcagctttctccacatcatttccagccgctgccagaagcttggagactacgctttctatatcatctccgatatatccagcttccgtgagcgccgtcgcatccgcgatcgccagcggcacatccaaaagcttcgccagcgtcttgaccaggtacgtttttccgcttccggtcggtcccagcatcaggatgttggatttctcaatctccggctcgccgccctgcatctgcattccctgtgccgccgcgttttccgccttttcttccgtattttcatttgcccggagctcgtcctgctgccggagaatcacgcgcttataatggttgtagactgccactgaaactgcccgtttcgcccgctcctgcccgatcacatacgcatccagctgcgccttgatctggtgcggtgccggaacatccttcatcgtcagaagtttctccgcgtcttttgccttgctctttttcttgatcttattcttctctggaatttctgtattcggcatctgcatgcccgcaaaatcattgagattcatgttcataaacggcatattttgaagcttggaaaagtccatgcccgacttggaaatcgagtcaaatgctttctgcatacactcatggcagaaattcatcccgcccggcatcgtgatcatctctcccgccttactctccgggcggcggcagacgtagcagattttctcgtaatcatccgaatgatctgtactggttttatttgtatctgtttcgtttatattggttgtcgtatctatattctggttatcactcatatttttatatttcctccaatctgaaagcaccttttcattttatcatagcttgcgaaaaacgtaaatcataacagcagccgtcatttcattttaaaaataaaaaaatttcctatgaaacaaaaagacagatgaatcaccgccctctctgattacaagaggatctaccggcggttcacctgccttcttttctatatcttcctgattttattcatttccgcttcgcaacagttccgtatcttcaccgttacgggcaaatatccattccagtccacttcgctgatgggatattttctatcttcccagttttctctgcggacttgcctgtgattcactccggctctcgttctggctatcctggctctgcggcatatcgctcttggagcccagtgtaatctgtacgtttctctcgacatatttgccattttccagactctgtaccgtcatggtaacggtggaacctgccttatagtaagtcagcattttcttgagatcatcaccattctttaccttctcaccgtcaaacttggtgataatatcgcgctcccgcagatccgacctggatgccgcgccgcccgcaacaatcttgtatacatagataccttccggcatgccatacgcctgcgccatctggctgtcgatattctgaagctggattcccagatagccctgctcattctcatcgacagctaccttcgtcgtcttcgtcatcaggtcgctgataatatcctttgcctgtgaaatcgggatcgcatagccgatgccctcaacactggtgtccgaatacttcgccgcattgatgccgataacttcaccgttcatatttaaaagtgcgccgccgctgttgcctgggttgatcgccgcatcgacctgcagaagtgtccgctctacgtcgttgatggttatctttttatttaaagcgctgacataaccgacggtaaccgactgcccctgtcccagtgcgttaccgattgccacaacaccctgtcccagcttcagggaatcagaatcgcccagatcggctgccttaatctgttttctcgtttcttccggtatatctgaaagctgtacggcaatgactgccagatccgaatcggaatcagtacctttgaccgctgccttaacgctctggttatcaataaaggtaaccgaaagttcctcggaatcttcaacgacatggttattggtaataatcagaagttccgtgtcattctgtccggcaatgattcctgaaccgctgctcggcacctcgtactgctgctgaccaaacagccagttgttctgtgtataaatcatcttgttgttgatcgctacaacggacggcatcgctttctctacaatcgaagaaacatcgttgccaatggaggcctgcgttttagtgcccgcatctgcctgtgtctcctgggaaacctgaccgatcgtttcctgtgcggtctcacccggaagaagccggtttgaaagtgcattcacgccaaccatggttccgcctgccacacagccaaacaaaatgcccgacatcacaagtgccgcaattttcttaccagtattcttagagccatgtccccggccactccgttcttccggaatatagctgcgttccggctgcttctctgcattctctttcgggtctgctccggctgctgcctccggttctccatcgagactgccccggtaacgggaatcatgataaccgccataatcggaagtttcttcttttttagcagtatcgttattcttttcctcataagcgctgtccgaataagcgccctccgtataatctacatcctgatcgtgtctctcatttctttcattctcgtcatacatatattcatacctcctgttctcaggaatcacagccgcgtactgtccattttgcgaaccttcccgcagcggattgttcatactcttatattctgtctcaggctttctgccctctctctgtttacatgagatagtctatcagttatttgtgatgtaattgtgaaaataaaatcataaatctgtgaagcttaaaaacatctctcggttttcacttgtcagtctttctctcctcttgtatacttaatgaatgaaacgaattttacattttatatgaaaggactgttacatccatgatgaatacacaggcagttgtccatatccgcaaaggcgaggctcgttccctgaaagccggcggtatgtggatctatgataatgaaattgaacgaattgagggcgaatttgaaaatggcgatatccttcgtgtcgaagattttgacggttatccgctcggatgtggttttatcaacacccgctccaagcttaccgtgcggatgctttcccgcaaaaaggatactgtcatcgacgatgcttttatcgaaatgcgcgtccgcaatgcctgggaataccgccgtcagacagttgataccagcagctgccgcctgattttcggcgaagcagatttccttccgggcatcgtgatcgacaaattttccgatgtgctggtcgttgaatccctggcgctcggtatcgaccgtctgaaaccgctgattctggaaaaactcgtcaaggtgcttgaggaagacggcattcatatccgcggtatttacgagcgcagcgacgctaaggtccgcttacaggaggacatggagcgctataagggctttatcggggaaccatttgatacaaaagtagagatcgttgaaaatggtgtccgctatctggtagatgtcaaggacgggcagaaaactggctttttcctcgaccagaaatacaaccgtctggcaatccagcgtctctgcccgggcaaacgcgttctggactgttttacccacaccggctcctttgccttaaatgcagccgtctctggcgccaaagaggtcatcggcgtggatgcgtccgaacttgccgtcgcacaggcgcgtgaaaatgcagagttaaacggtgtttccggcactaccacctttcagtgcgcggatgtctttgacctgcttccggaattagaggcaaaaggtgagcaatttgacgtcgtgattctcgatccgcctgccttcacaaaatcccgcagctcggtcaaaaatgccatcaagggctaccgcgagatcaatattcgcggtctgcgtctggtaaaggacggcggctacttcgccacctgctcctgctcccatttcatgacgccggaactcttcacaaaggcgattcaggaggcagcccgcagcgcccaccgccgcctgcgccagatcgaataccgcacccaggcagccgaccatccgattctgtgggcgggggatgagacgtcctattatctgaagttctacattttccaggttgtggatgagaagtaaaattacagaatgtttgtaagactataaccaagcaatatgaactgctattataaatcatgaatatgcaaatcctctcagagcaatctgaggggatttgtttcgttttatcattgtctgttctgataaaatatgatatacttcgtacatgggaaaaaccagagagccaggcggcttaccctctgttatcggagggttgctagatttcagcaaagcttgtttatcaaagactggaacgaggcacaaatctaaccctccagacgaaagaaaggagggcattgccaatgtatgttacatactctgatttgattcagattggaatattcatttgcgcccttgttggattgtgttatacaattttcaagggaaaacgaaaatagccgccattactgcaataatgacggctgttaataaaacagttgtttaatttattcaggtaagccgctcctctggcttttccttttttctatccctaatataacatatcttttcatccaatgcaagcgaaaccccctttatagaaatacgaactcataagggattaccgctgcagcaccatacaccaaaccggtgccgacaccatcgaaagcagcgtcgtaaataccacgcacttcgtcgcaaagacttcatccccgccatatttcgcggcaagaatcgccgtcgtgcttgctgccggcatcgctgccagcaccacagaaatccccatcaccagtgtgtcgatatggaacaggaggcagccgatccacacaagcgccggaatcaggatcaggcgcacggcggcatagtagcagctgagtggcgtgatcatcgtcttcatatctgcctccgccagaacggttccgacaaaaatcatggagactgccgtgtttgccttgtttaagctatgtaccgtatctcccaggaatcccggaatctgcatctgtaaaagcatcagcacaaagccgatgaatacggagacaatacacggatgcgtgcatatctttttaatcagagtcttccgatccggcgccttcgtaaaatacgtcattcccagcgaccacatcgcagttctctgcggaatcaggtaaaaagaggcgtagaaaagccccatcgagccgaagatgccctccgccaccggatttcccagaatcccggcattggacgccatcgtcgcgtatttgaggaccttcttcttttcctctcctacacccgggtacagtaccatatttaagatataacaagtcacctgaaccatacacgagacgagcagcgcctgtgcgctgctctttaagatatccatgctcagttctacttcaaatgactcgatgatactgcagggaagtgtcacaaagatgaccagatccgcaatgaccctttttccctcatccgtgataattcccttcttctttaagaatgcacccagaatcatcagggaaaataacattccctgcatccggtacaaaccatctaaattcaaagcatttcctccgtttcacactctctcatcactcaatgatgattcccgcatccgtcttacttcccggtgcactgcttccattcggggaaccgctgccggaaggtttttctctgccattctccgtgccggtgccagaatttccgcccggaaatgccggcgaagaaccgccagactctgcctcactgctctcccgcgcattttcctttgatgcatgcgtaccgtccggacggctttcctgctcagaaacgtcattctcctgtgtttccgaagcattaccggtctctttctccgactcgtcgctgccgctcccggctttctggctttcgtccgcgccgctctcctgcgtcggatccaggatggaaattgtcgtcgcctcggtcgtcttcggcaatgccttcgtttctgcctgtttcgtgccatgaacgcctgtatctgatacaattttctgactgatcgtccggaccgtctcagtcggcgtgtattcctcatcgccaaacaggaaatgatgcagctcgatgacattgctctccagcgtctgcgggatgacgcaggcgcccttgcgtcccatcttcttttccctcagctccgacggaaaaccggtcgtctcggtcagatggtaacgcgtaatatttcgtcctatcttcaacagatcattgatctcgatgctggtcgccacctgtggaaataccgtctgcacaatattgttgatcgtcgcccaatctgcttttttcatcttctcaaacgcgagggaaataacctttctctgtcgttcggtacgggcatagtccgtatccatcagacggagacgcccatatgcaaccgcctgcacaccgtccagatggttcatgcccgctgatttaagctgggtcgaagcgacgccggtcgccttgaccgtctcagaaatgaacgcattgatataataaaactctgatttcgtgatctccacgtcaatgccgcccagaatgttgatcgcatctgcaacggctttccagttaaaggtcgcataatcgtcaatatcgatatccaggttcctattgagcgccttgacaacctgctccggtccgccctgcatataagcagcgttgattttgttgtaggtattcttgtcgctgatatttaaatatgaatcccggtacaccgaaaccagacgtatctcaccggttccctgatcgatgttgcagagaatattgacatccgagttgttgccctttccgaccgatgagttacggctatccacgccgaaaaccgcgatcgtccaataaccgctcatctgctcctgcttctcctccgaaatctcgacgtttttgatctcatccgggttccacggaagccgctgcatcagatccagacggctgctgatatacgaatatcccgcaaagcagagaatcccgatcagcatcacgctctccagaagaataaaccatatcttccgcttctttttccggcgcgctttcaatttaaccgggtcggcgtaaatatccgaccggttcatggtccgggttttctcctgattccggctctcccggctgctgccaggctgcgtctgtcccctctttgccgctttctgaccacttcggcttctatctccgctccggtgggatccgtcctcccggcgttccgtaaatgaatccgtgatcagtgtcagaccatcgtcttccatctccgacggttttgcccgtcggctccggcggtgtcctgacctatctctttcttcttcatatcccatgtggttttcctcatcaatacgcgtttttatttataaagcccttaaaaaccgtcaaaaacatgattttaaaatcaaatcccagcgtccagttctcgatgtaatacagatcatgctcaatccgcttcgtgatcgaggtatcgccccggtaaccattgacctgtgcccatccggtcattcccggacgcacctggtgtttgatcatataacgcggaatctcttccttgaatttttcaacgaaaaacgggcgttccgggcgcggtccaaccaggctcatatcgcccttcagaacattaaacagctgcggaagctcgtcaatgctcgtcttccggataaatcttccaatcggagtcacacgcgggtctcccggcgtcgtccactggcttttctcctttgccgccgactgtaccgccatcgagcggaacttatacatcttaaacggcttattgtgaagtcccacccgctcctgacagaaaatgaccggtcccggcgaagtcgcctttataagaatcgccgtcaccagcatcaccggtgaaaacaggatgagcgccatcatgccgccgaccagatccatcgtccgcttcatcgttgcgttgagcagattcgtgagcggcacatggcggatgtggatcaccggaagtccctgcagatcctccataaacggacgggtcgggataaagttataataatccgggataaatttcgtatgcacacccgatttttcacagcctgccacgattttttccagttttccatactcctggatgctcagggtgatcgcgatctcatccagcgtattgagcgccagaatcgtatccagatcgtcaattttgccgatcacgcgcactcccttatattctttgccccactcctcatggtcatccagaataccgcggattttatagccccactccgggttgacattcacacggtcaataaatccttccgctgcccggctgtaaccgaccagaagcagatgcttctggttatatcccttcgaccgcatcgaccgaagcgctatccgcaggatattccgcatcagaatctcagcaaagagattgatgccaaaaaacaaaaataccatcggacgggagaagttgtggaaatactcatttttaccgcccaggtaaagcatcagtgagatcaccaaaagaccgatgatgttcgccttaaaaatattggctaactccacccgtcttccctgaacccgtttgggcgtgtaaagatgaaaaaatgcgtataaaatcaaataaaacggtacaataagaacgccagccgccagatagacgactgccattgcgctcttattatgccctgttacattaaaccacgacgttccattgacgataaaccacgcaagtgcgtaggcgcatgcaatgacacatgcgtccagcactacgtggaaatggttcagccgtttctggttatcttttatcatagtatatcacctgaattcagattaagctcccggacctgccggaccgccggggcctgctgcatcgctgtttccggaattccccggatcctgaatctctgtgaccgggcttttcacaccggaattatctgatgcacccggagaagtcttttcactggatgccgctgtctctgccgctgtcgtggttgtagatcccggttttgcaacggaagacttcgtctccgatgtgctgcctggtccggataaagaatcatccgcctcggttgtcttatccgtatgatttttcttgccgggagtcgtcgttgttcctggtcccttactgctgttgctcttcgactcttcttcctcccagtcaatccagtcttcatccggatcaaagatctcgtccaatccgatcgagctctcgctctcgcccttcttggtctcatccccgctctcgtcatccgactcgtccgaagcactcgtcgatgacttcttagcggcatccttcgccgctgcctgcgcggcaatacggctcgcccgtttcttgataaacgtctgggcgctgacaccctgatcgaccggaacatgaccaatcagcttcgcattcgtcgtaagccccgttacctgcgcgatatggctgctgtactccttaacattagacggaacctgataatcttcctcatcaaacaggaacttatgaagctcttttacgttgtactccagtgtctgcgggataacgcagtcaccgatctttccaacatcctgctcacctctggctgccgggaatcccgcggtctcaccaatatggaacttcgcgatattgcgtgccagcggaatcaaatccgtaatatcaacattggttgcaagctgcggcatgatcgtctgaatcagacagttgagtgtcgcccagtctgcattttttgccttatcaaaggctttctgaagaataattctctgacgctcggtacgcgcatagtccgtatctgaataacggatacgtccgtatgcaactgcctggataccatccagatgtacattgcccgcatgggtcagctgatgagaaccgataccagtctcctttacggtctccgtgatgaaggcattgatccaggagaactctgcatcactcagctcgacatctacaccgcccagaatgttgatggcatccgcaaccgctttccagttgaacgtcgcatactgggtaatgttaagacccaggttcttattcagcgccttaactgcctgctccggaccgccctgtgcgtaagcggcgttgatcttattataagagtttttatcgttgatattcagataactgtcccggaataccgatacaaggcggatctcacccgtctccagattgatattggcaatcatgttgacatccgcgttcgtaccttttccgacattcatctgcccgtgctcacttcgcgaatcgacaccgaagcacgccacggtcatgtagcccttcatatcatcgatctgttcctgggacagattgacgttcttaacctggtcctcgttgaaatcaatcttctgcatagaaccgaaggttctgtgatacatataccagaacgcaccgcccagaatcattaatataatcacgacaatctccgccgcaatgatcatatgctttctgtggcgcgccgatttacggtaatggctgccgcggcgtcccgaactcttttttccacttccagcgctcttaggaccgctgtagccggaacgtactgaactgctgcccgcctcaccttttctctggctattttcgactgtactgctgactcttctgcggctggtgccggaagcagaactgccgcgcgaagaataccctgcctgactggcacggctgcttctgccctcgcggcgcgccctcatgcgctccagctcatcatcctcataattcataagctacctcatctttcacttgcttgctgccgctcagacattgtctgataagcagcctttctccgtgttgcatctgctaaaccatgaccgttcacacatcgcgcaaactctaagttactgtccacacatacgcgcccagtaacaactctaaccttttcctcacgatttatcagatgctgcttttttctcgatctgtctcacagcaaattcatagacatagagaaatgtcccggctaaaagttccagctctatcgccagataatttttaagccgttccgggcggtacgccacttttttacacttctttgccgtccgtatgccttctttcagaccttccagataatcttttccaaacccgagtttcctgaaaaatgaatatttcacgaaaatccccgctgcgatcggaatcgcatttatgataagctgtaagcacggcatatttttataattcagatacacattgttgcgtgccgccagcttaaccttgaatgaattgtacttggaaccgctggttccgcttccgacgtgccataccagcgccgccgggcagtatatattgtcataccccgcaatccgggctctataacccacatcaatatcttccagataggcaaaatgcatctcatcgaaatagcctatctcctcaaatacctctctccggtagatcgctgcgcccgcgcacgctgagaatacccggcttgaacggcggtaatgcgtaagatcccgtcccacgccgcgctggtacgcccagccaagcagggaatacatatcgcctgcatcatccagcctgtccggatggtacatctggatcatccggctgctgacggaaaagatgcgctccgactgaccgatcgcacgcaccatctccgccacgaaatactcgtccacccggacgtcattatttaaaagcagcacatacggtgtgtctgccgccttgattccgacgttgactgcgccggaaaatcccgtgttttccggcaggaaaatcgtatcgatctgatgttccttcagccattccacgcttccgtccgtcgaaccgttgtccaccaccagcgtccggaaattcggatacgtctgtgcattcagtgaacggatgcattcgtccataaactttaacccattataattgggaataataattgtcgttgtaatctccatcccgggttatacctccagatgatacggttctccgattttctcttttttcagatccctgagggcgaaattggacttccgcagcgtcaggttcggattgtagtaaggatctccatctttaaggatctccggccagcgctccgagaaaatcttgatctccctgttaaaacgtgccaccttctccggcgtatcctccagtcctcttgacttcgactcataatgatacagcaatgcgtacggattgtaaaccactaaatgatttgatgcccgcactttcatgcaataatcgatatcgttaaatgcgaccgccagcttctccgtaaagccgccgacctcatcaaagagcgctttctttgtcatcaggcacgccgccgtcacagcgctgtaatcctgtgtactcatcgcacggtggaaatagctgttttccgccttatgaagcccgataaacgtatgccctgcgatgccgccgaaaccaaccacgacgcccgcatgctggatcgtatcatcctgatagagcagtctcgcgccaactgcgccgacgtcctcccgctggcacagtcccagcatctcctcgatgaaattctccgcaatcagctcggtatcattatttaaaaacagcagatattcgccctttgcgaaggtcacgccgaagttgttgatcgccgaatagttaaactcgcgctcccaggttaccacatgaacattggaaaattccttctgaatcttttcatagtattcaaaggtttccttctccgtgctgttgttctctacaatgataaactcaacattgcggtacgttgcccgcgtctcaatcgcccgcaggcatagatccagatccgtatggtgatccttgttcggaatgatgatcgataccagcggttccccctgaattttatatacagagtgataaatgccgtagtccacacctttttccacgcgctccgcctcgataccgacgcgtttataatgatccatgatcgcgcgcgcacccgcatcaaatgcgtacagcttgctccccgggttgctcgctgtcgaatccttgtggcagcgccagtgatacagcaccttcgggatatggcggatctccttcgccttctccgtacaacggaaaatgaagtcataatcctgcgctccgtcgtattcctgacggaagccgcccacctgcgctgccagatcgtggctgactacaaacagatggcagatatagttgacgctgcagagcagatcgatattgaaatccggcttaaaatgcggatcaaacaaagcgccgccgtccatatccagcttatcctcatccgaatagaagcagtcgcatcccggatgttcttgtaacagtttcgcacactcatagagagcattcggtgtcagcttatcgtcatggtctgccagcacgatataatcgccggtcgccatatccattgctgcattcgtattgccggaaatgcccttattttcgcctaaaattacgtatttaaagcggctgtccttcttcgcatactgctccagcacccgctcgcagctttgtcctgccggactgccgtccgccacgcagacctcccagtttgcgtatgtctgttccgcgatcgaatccagcatttctcgcaggaatcgctccggtgtcttaaatgccggaatcacgatcgagaatttaaccggcgcgtcaaacacctttttcctctgctcctccagctcctccgccgtcggcttcgtcagtgaataccactcgccgtaatcgtagtcattgtcaattccctgcagtttgtgcttggattttaccagtagggctttcagaccattttccttccagaaatccagacagacccgcacagtctccatgttcatcagatcgcggatcttctgcatccgcttgtgcgccacactgctgcgcttgcggatcagttcttcattatatttaatgcggattttgcgtccctcgccttttgcgatcagataataatcttttccgcgctcatacgggaactggatatcaaatccaagctctttttctaccgttcgcccaaaataaatctggctgacgtcgtcgcggcgggtcgccacatactgaaaccggatcggctgatgtgccccatcttcaacctgataggtgatctccgtctccggcgtctttccgatcgcccagccattgagctgaatcgaattttcacgaatccgaactacatcgacattacatttcatgctgtttgcccccaactttttttaccggtgtatcaaaattcagccgctcttcctccactaccagcggacgcttcatgactctcgaattgatcgataaaatatactctcccaccagaccgatgaaaaagatctgaaccgaccctaaaaagcacattccaatcagaaccggcgccataccagccggaaaatcataccagtgaagcagtttcatcaccagatatacaatcgccacgatcatactgatcgccgcgcagatacttccaaagatcgtcgccagacgcagaccgaccttcgtataggaggtcacactgagcatcgcagcatcgtagagccggtaaaaattgttgtgtgtcttgcctgcgcggcgctgcggctggatatatgggatctccttgcgcttataaccaagctccgccacgattccgcgcagaaacggcgtcggatcgtcaagctcccgcagaatctcaataaaatcgcggtcatacagacccgaaccggtaaaatgctcaatctgctcgacatcggagagtttctttatcatcttgtaatagcagctcctcagcgcatacatgatcgggttttccttgcttcccgtcttgatgccgatgacaatcttgtagccattttcccactcatggacatatttcgggatcatatcgaccggatcctgaaaatctgccaccatgctgatcacgcagtcgccggtacactgtaacattccataatacggggaattgaactgtccaaagtttttggcattaaaaattgccttgatccgtggattctcgctgcagatcttccgaagaatcgggcgcgtctggtccgtcgaatcattgtcgataaagacaagctcatagtcatattccggcaaatcgcgctccagcgtctccacaaccgcctcgctgatcggacctacattctcttcctcgttgtagcagggaattaatatactgatttttttcatacttttctgattcctattaatttgctttttgtttgaactcttctgtttcgttccaccaaatttcgaacacaaaaaaaagagaaagccgcttcggctatactgcctttattttaaacgtctttctctcttttgacaacctacaattttcttaacgatttttggctgcttcgctatttacttggcataaactgataaaatatgtccaaatatttaccattctctcccgtcactctgcacagagggcagaaaaatcatttctgaaaagctagaattctcttcattccttcttcaaaatatacctgtggcttccagccaaccacccgctccatcttgcggatatccgggatcagattgacgattccctctgcattcggcgggcggacgccaaattccatgctgccctgcctgccgcacagctcatagaccgtctcgacaaacccgcgcagcggtcctgtctcatccatcggaccgcccagattgtagacacatccgtgatccgtgagatttcccgcatattctgccagatccgccagggcgcgccccgcatcgtcaatatacatgaagttccagagctgcgtgcaggcggtcatcgtcatcttctcccctgcccggaagacccggacacaggaggaaagaagcgaccacgggtgatcgcccggtccatacgtgctgaaaatccgtgcatgcccgtaatccagtcccagttcccggcagagcacttccgcccgctgccggactgccagtttcgcgcgtccatacggggaggtcggctcgcagaccgtctcctcgtctgtcagctcgctcttgacgccatactccgcctgcgaacctgtaaagagaaaccgccggcacccgaggtctttcgccacgcggacggcattcagcgcgtcctgtacgctctcctcctggactgcctcatttttccgtgaatcactccctgcaccgcgccagcccatatggagaaacacatcgcatccgcccggaatccgttccggcagtttcgagagattccccagatcctcctccaaaatcgtgagtccctgcggaaattttccattttcccgcagcagatccgctttcgtcgaatgttcccgcagtacggcgtatacctgatgtccgcgatgtaacagctcgcgcaccgcccccagacctacaaagctggtggcaccagtgacaactatcttcattctatcgtttcctttactattttttaatacgcggaatcagcatgatacggtccatctcctcgtccggcaggaatggggacagatcctccagcggcggcgatacaagcgttccgtccggcagtctcttcgccgcggactttggctcaaagttctgatccagcgttacaaatacctcgcagatcaccgggccgtccatcgccagcgtttcttctactttctcgcccagctccttgtttccatgaatcgatacatatgggaatccatacgcccacgccagcttttccatactcgggaatccaagatcgccgctgtccacgccgataccgatgagcggctcgccgaagaaattcttctgggtctggcggatggaatggtaaccgccgttattgataatgaaaatcttgatcggcatccggtggctgacaactgtctcaagctcctgtaaattcatctgaatactgccgtctccggtgatcaggataatatcctggctgtgatctgccacgcacgcgccgatcgatgccggaagtccgtagcccatcgaagcgatgccggagttcgagataaatctctgtccctttttcacaatatttgcgtgtccacacacaacgtttgcagatccattccccacaaccacgatctggttctcatttaaacggcggctcatctcatacgcaaatgcatatacgtttgcctctgtctccgtgccgccgttcatgtgcttcggcagaaccaccggataatcatgcttccagccctggcagatacgcagccactctgcctgcgcgtccttgtactcctgcgtcatcgaagccgcgccgtccgcttttccttcctccgaaagaacctcgtccatcacggtcagaagatccttcacatccgcgtgaaccggcatgtccacatgcagggtcggctttttcagctcttcggcatcgatatcattcacaatcacatacgcctcgcgcgcccaggtagtaaaacggtaaccgacctgacggaaactcagacggcttccgagcgacagcaccagatcactgttctggatcgcgaagttgcccgggcgatcgccgacgttaccgccttttccgatgtacagcgggtgttcgtcatagatacagtcgatgctgtccgcgccagtcacaaccgggattcccagcttttcaaccacgcgcatgaaaacatcgtgcgccgcgccgatacggataccatttccggcattgattaccggacgtttggaggtgcggactttctcgatgatcgcacgcgccgtctccttcgtcacacgcgccggaagctttgcacgaaattcaccttttccggcagtatcctccgggatctctgacgcgctctctgccgcccagccggttccgcccgcctcataatcctccggatcaaagccgatcagatcgtctgtctcgatcattgccgcctgcacattcagcggaatatccagccaggtaggacccggacgaccgttgtaagccagatacagggctttttccacacagaagcggatacgcatcggatcgatcaccatctcacagtattttgtcatattggcaactgatttggtgatatcatactcctgatcgcccatcgcgcgcaggtgaagtcccgtgctgcgcgccgtcgtgtcataacgcacctgtccggaaatgacaaacatcgggattgaatccagaaatccgcctgcaacgccgttcatcgcattgatgccgccaggtcccgtcgtcacgcacactgccgcaatcttgttgtggatgcgggcatacgcctccgccgccatcgcacatgcctgttcatgatgattgtagaggcagtgaagcccttcctgatgccccagcgcgtcatccaaatgcatcgcaccgccgcctgtgatcataaacacatccgtgatgccggatgcgagaagcttttctgctatataattagaaagtttctgtttcattttgatttcctcctgaaaataccttgtcaagtgttcatattatatcacacatatttctcttttcatagccagcacggcgttttcccttcttctgaaacgttcttttgttactgcgaacagttacggtcttttttctcaactcatatttttcttatgttgtcttgtgtttttcctatttcttttctataataaaggtcggcatccggttcacatcggtatgcctgaatcgttacggttcagtttactttatgtaactgcatttttatcatacagaggaacgtcttatgaatcgattagcacaggaaaaaaaggtctgcgcgctgattccggcgcggcttaattcggttcgttttccgggaaaggcattgaaacagattgacgggattccaatggttgtgcaggttctcgcggcggcgcgggacagcggtgtatttgatgccgtttacgctgcgaccgacagccctgagattgctgctgtttgccagacatatggatttgaggcggttttcacctcccattcccatcagaatccgacctcccgcattcaggaggcggtgacgattctggaagattccaagtctgcttcttcgcggaaatttgatttttatgcgatgatcggcggggatgaaccgcttctgacaccggagattctgcaaaattttatggagcaggcgcttactgttattacctcaaaagagaatgtacagcgtccatttctcatcaatgccatggcaaatatcccgaacgatgccgagacagccgatccatccaacataaaagtagtctgccgcccggacggcacagggctttacatttcccgtgcgccaattccattccgcaaggggacgcttgacgaaccttcccggaaatttgtgagtatcgggctttatacgcgggaatcgctcgatttcttctgtcagagcagaccgggcattctggaacagatcgagggcgtggatttgctgcgtttcctcgaatatgggaaaacgatcctatttcttcccatctgcggatatacgctttccgtagacacccccgccgaccttgaaacagtacaggcgattttacacaggaggactagcaccctatgaataagaaaacataccgcggcgtgatcttcgacctcgacggcacgctgctcgatacatccgaaggcgtctttgcgagcgtgcgccacacggtagaagcacttggaaaacctgccctcgacgaggcgacactccgcacctttatcggaccgcccgtcaagctgtcgctcatccgcctctatggactggacgaggacgccgcgaaccacgcaaccgagattttccgcacccagtacaaggatcacgacctgctgaaagccgagccatacgccggtatcaaagacctgatccgcgcactccgcgcacagggctgcaagatcggggttgccaccctgaaacgtgaagattatgcgctgactctgctggaacattaccatttcacagaactctgtgactccatctgtggcagcgattttgccagcaaaatgacgaaggctgacgttctgcacaagtgcttaaaagctttggagttgtctccatccgaggcagttcttatcggtgatacctcttccgacggaaaaggtgccaaagaggcagctgtcgattttatggcagttacctacggcttcggaccagataccgcggaggcatggcaggaatatgcgccggtttatacggcaaaggatacgcatgatatcggggcgtttctgggagtcaatttttaaaattacaaacataacaaggggacaaacatcatgaaacaagtcaaattactcgactgcactctccgcgacggcggctacgtcaacgactgggagttcggtcacgacaatattgttactatttttgaacgtctgatcagcgcgggcgtggacattctggaagttggttttctggatgaccgccgcaccttcgaccgcaaccgcacgatcatgccgacaacccagtgtgccgatcagattttcggcaagctggacaagggaaatacaatgatcgtcgccatgatcgactacggaacctgcgatatttctaatttaagcccgtgttctgagtcctacatcgacggcatccgcgtcattttcaaaaaacatgtgatgcatgaggcgatccaattctgccacgaagtcaaaaaactgggctacaaagtgtttgtacaggcggtttcgatcaccagctactccgaccgtgagcttctggatctggttgaccttgtcaacgatctggaaccgtatgcgatgtcccttgtagacacctacggtctgctgcatcaggataacctgctgcactatttccagctcttaaactataacttaaaaccatcaatcgcgatcggctatcactcccacaataacttccagctcgcatactccaacagcatggaagtcttacgcgaaccggcggaccgcaccgttttagttgatgcctccctgtacggcatgggaaaaagtgccggaaatcttccgatcgaactcatttccatgtacatgaacaccacattcggacgcaatttcaatgtcagccagatgctcgaggcgatcgacatcagcatcatgccatttttccgcaagagcccctggggatataacctgttcttctatatttccgcctccaacaactgccatccgaactacgtccgtttcctgatggataaacacaccctgtcgcttaaatccatcaatacgattctggatgcgattgagccagagaaaaaactgctctacgacaaagattacattgaaacgctgtaccgcaggtatcagagcacagaatgcaatgacgaagccgatattcaggcattgagtgcttcctggagcgatcgcccgcttctgctgctcggtccgggaaagaatctggaactggaaaaagaggcaattctttcctatattaaggtgcacaatccgatcacaatctccgtcaactttatcccggagggaattccaatcgattatgcgttcttaagcaattccagacgatatgtccagctcaacaaccgcctgctcgagcacgccgacgcccagggacgcccggtgcgcgtcatcgcgacctcgaacgtgacgaatgtcaaagatacacattttgattacaccttaaactataattccctgatcgaccagaatgcagagatcatcgataattcctttgtcatgctgctgaacgtcctgaccaaaacaagcgtccaccacgccgcctgcgcgggattcgacggatatacggtcgatggagacaactactataattccgcgatggactaccggatcgcgcgggaaaaatcacagagtattaaccagtatgtgatagatacgctggagaggctggcaggaacgctgacgctggagttcctgacggattcgaaatacgtaaaataaaaaattatattttcatatagaaaaaggggtgttccagctggttcacccctttttccgttactgttcacgcatcgtgcccagtaacggaatttgccgtggcttcgcatttaaatacggcaaattcctgctaccaccacgttttcttacggcactttcggttccaaaagtgcctacccgtgtacagtaacctttttccacatctctccaccctttccagcaacgcacactatctttttacgcataatccccgtataataagccccgtaatgcagcgatggattttcgcattttcaaaaaggagagattataccatgcgtaagcaaactaaaactttagctgttttatccgctgcggctttgttcgcggctgctgcacctataatgacaaatacgggaacttacagagttctggcggctcagagcggctggacagaggaagatggtcgtctttattactacgatgaggacggctataaagagacaaacacatggaaaaagcggaatggcgactggttttatctcgatgaggaaggcgagattgctaccaatcagagagtcgatgactatttcgtcaacgatgaggggcacatggcaaagaaccaatgggtttcggctgaaaatgagatcagctatgacagcccggattctccggacggcggctcctggctctattttggcaaggacggcaagattgtaactgccaaatggatgagcatcaacggaaaaacctactatttcgacgaggacggactgatgcagaccgggcttctggagctggacggacagacctactacctcggcgaggaggatgacggcgccagaaaaaccggatggattctgctggaaaccatcacgaaagacaccgacgatgaagatgtctggtgctattttgacaccgaaggacgcatgatcgtaaaccagatggaccgcaaaatcgacaatggctactacaccttcatcgacggccagatgcagacaggctggatcaatgtcgcggaagctggctttgtaagctccagcacaccttcaaacgaagcagcaacaacggacaactctgccacagacactgtcagcttaaacgatttccgctattacgatccggaaaatggcggacgccgggcaagcggctggtacaccattgaaggggcaccgggcatcagcgaagaagaagagccattttccttcttctttaaaaacggaactgcttactttgccgagaaggatcttgctattttcaccatcaattccgagcgctactgcttcaacgagcgcggtgaaatgcagaccgggcttcagagcctgaaacaggcggatggcagcttcgcctcctactacttcggcgacgacggcgtgatgcgtaccggcaagcagactatttacaatgatgatttagaagaaaaccagatctggtatttccagaccaaaggttccctcaaaggacagggctaccatggagagcgcgataaccaggtttatgtaaacggtcttttaaagaaggcggatccggaactccgctatgagccggtttccatcggtgaaaaacgctacctggtaaacaccagcggcaccatccagaaagcaacctcttcctcctcttccgcttcccgtccggaactcggaaaagggttcaaggatatcaaagacagcaatgatactgcctggacagttgacacatctggaatcatccagtaaaatataatattgcatccgttcaaataccgcaggacacttttgtgacaccgcggtattttttctgaaagatgtctttttttatcgttttaaaaatttttttggaaatttttaaatttttttctaaaaaccagttataatgttcccgattaaaacgtattataataaaggggatgttttcatttttctcccaatgactcaactcttacttctacggaggcaactctatgcgtggtttaaatgtttattgctgtccaaactgtggacattatggattctttcagctcgttgccaatgcggtgtgtccgcattgctcaatcgccatgactcctcttcccattccgtatcaggatttcatggacttagactatccacaacggcagatcctgatttccagacacatgattaatgcggcaagccctttggattctaaagccaaacaggcgaacaaggctaaggcaccagggcagacaaagccatccggccggagcaaatcaccggatgatgcaaaatcgtcggatcaaaatgcagcacctgataacaccaaattgatgacagatcattctgcagcaccgggtaaaacaaaatcatcttccacttcctcgaatctccatccggatatctcaaaagattccgacaaggaaactctctatcaggaagtattggcgctaagagagaaaaacgagcagctggagcagacgatctcctggatgcatgatttaatctggaaattgacgcgccaactgcatattacatagagtacataaaaaatgccgcatgattcattctggtttaataacataccttctgaatcatgcggctttgatattcgatttagtatttaatttttgatttgattgttcacttgctccatctggtataaatgagcctcttctctcccatcttatccagtttctccgcttatcccgccttctccgtcttacagagtatgtagtggtcaatcatccggtttaagctttgattcatctgatccagagttttaaataactccttaagctcacgctttaattcttcattttcctgttccaaaacgaccaattttttagcttcatccataaactctcctccttttgactgcctgttcttccattcagatgaccacactgcataacgcagctctgccaggcgatcctatcgttttttcgtttcatattatttataaaccgattttaagaaaaataaaagagtctatcgatcgcaaatttcgacacgggttactgttcacacattactttaaattctaaatcgacaaagttcgtcatttcggcttttccgccgaatctgcccggatttgccgtctatttgagctattctgcctgttctgctttctctcttgtgagtgtaagcccaatcgccagcatcgcccacataatcggcgtcgcgatcgggaggttgatattaacaactgcctgtgctccatagcagagcaccgccagaacaggcgccagaatccaggcgcactccttccattttctgcacattctcacgcaggcgccgcccagaaacgcaagataggatgcaagcgcaaacggtcccattgtgacgaggtactggaaatattcgttgtgggcgctctcatagaaaaccccataccgatccagtgcatcctgtctgaaatcccaagtcagaattccatatgtgtctggtccaaaaccaaacaactgatgcaggaacggcagttcgcgataggattgccatccaattctccagcaatatccccggttcgtcccccagtcatcatcaaaaacaagatactgggacaacgtactgtaccgttccgcatgtcctcccaaatttgcatcatagaggacaaatgccactgccaggcatccaagaatcaaaacggcacaccagccacgccaaatccatcgtcccggtttgctctctggattcgtctgttccatcttccgtttccaaacccagagaacccccgccagaatccagaataaaacgacaactccctccagataacgatagcgcaccaacacgccaaacacaccgcccagaccgatgacctgatcggcatatactttattgaccgtatctactgccttaatcacggtcacaaacatagccaccagaataccataatctgcgatgccccgccatgtcgtaaataaaaacagcggcatcactgcaaacagcattccaagtgataaatatgcattatcactctgtccggtaatcaatgcaaaaaaagccagcgccgaaaccagataataccagatacggcgtcccacttttctctcacttacaaaacagccgcaggcaaccgccatcgtaagcgccacaaacgccgtatacgtgttgatatttcccaatgtagatacaaacaagtttccctgttcattgctcacgccctttttccatcccaataaatccatctggaaataatctgtgattccaaacaggcagaccagaacagacgacgccagaaacacatccaggtaccattttctcatccgaccatacttgctgatcacaatcgttcccagcacatacagcgtaatcaaaaaaaatccgctgaatcgtccctcattgccccagaacgactcatacacatagtccgacagcaccgtcgatatcaatgccagcccccagaaaactgccaacgccttataggcaaatggctgcttttttaattcagacggtcgaaacgcgccgaaaaagcgccgcacatgcgccccgccaaaccgctttaaatccgcgcactcaaatactatcgctgcgatcaggcatgacgccagcatcgcaaccgtgctaagccagtaaaactgatatttcgataccagaatatcataataataattatggaaatatagcggaaatgccccaaacaccacacacagatacaccgacacaatccatgaaaaaacctttcggacttttccttcccatgcctgctctgccaaaatggatgcagccggagctccctgctctcttgcaatctctgtctgttccatcacattcttctccttttcttattcgtaaaaccagagaaacggcttgtatcagtatagcatttcgttttgtggatagcaaggaaggaaatcttaaatttcccctattatctcgttactgttcacgcatacgtgcccagtaacggaatttgccgtggcttcgcatttaaatacggcaaattcctgctgc

SEQ ID NO: 11016 - DNA, 29021 bp, Unknown
  gut microbiota DNA sequence
ttattatccacagttatcgagtaggtgttatcaatgccgataacaaaatgataacattagctcgtataggcaggataatatggatatatcaaataatcaaaagaacgagaaacattacagagaataattcctaaacaaaaagcgttagtctttgtagagtttgaataacggactaaaatgccgaaagcctgtatttatgtgggcttccggcatttgttttatcaaatggctctagtttggctctatttgtgggcggagtaatgtataatcattgcagagcagatgcagacagctatagctgagaacagccggacggcacttgaccagaatgaatatgaaagaagatatgctgaccttaccgaaaagtacaataccatcaaagcagattatgacaagatttcagaacagattgaaagcaaaaaggctcagagggaattattcaagggattcatccgggcattggaaaagtagggtgctttggtagaggaattcgatgagggactttggagcagccttgtgcaggaagtggtggtaaagtcaaaggatgatatactattcatctttaagaacggatttaagataaagacgagataaattaaatcctgatttgacacatattatagtagaagaaaaaattcagaaagttgattataaaaggtcagattcgtcagtaaccatcgggcttgacgggtttgaccttttatattgcagaaatatgacataaaatggatatgcgaatttgccgatataaggtataatagaattgattagaaaaaggggaaaatatgcaatgaatgtagaattggaaaaatttttacataaaacaccagaagatgcttattggataaataagcagggtaataggtgttgtcaatcggttcatggaaaaagctatgtaagatataatgaagcaaaaaagcaggctgatagtaaggctattgataaagaaataataataaaatacactttggactacttgaataaagtaggaattaaaactacaaaaaatcctaaatgcgaaaatcctaaatgtatagattatgataagattcaacagaagtttcagttaaatgatcgcagcgatttagtctggatgaaatttacaagagatggatatttgggtgttgtagcagtaagcgatgatgtgaattttgatatgccagaagattggagtgtgtatgataaaaaacatatagtgtacaattcatataaaaagcgcaatgaagaagaatgggttcataattcagcgggaatccttgttcataaacttggaaaggaatgggatgaatcatttgtgctgatttttcctttaaaagggattcctgatggttataccagatccgatgtggaaacagcaattggaaatatgttgatagaaaaagatgttccgattttggatttttactctcatatgtactaaaggaggacgataatatggagattaaaaaattggcaaatgaaatggttgatacactgagagaaagtgtgtggaataaaattgaccaagaggtgaccgatgaaagatggaacaatataggatttgcagcacaagcaatggttgagtcggaagtgccagagcaacaaattttgaatatgcttataaaatattgggatttgcaaccaagtgaagcaaaagatattttacgatttgcaaagaaaaatagttttagagaatgatctaaatatgatgggaatatcgtattttaagtcgagaactactgctggaagcaggccagttgattttccattcaaagtattcgtcctctgaaatttctccgctttttagctgttctttctgtaaacaccattcacgcagaaattcatttaccagaccataatcaatccacataccgacagggccatgagcaggccattcgtcactattattatagtgaacagacttatcatcagaagcgttgcacatgccgggattgcggacaagctggaacagatgaaaggtattgcggttgtcctcgtcaagccagaaaaagtctgcataatgtccgcatgaaatcactctgtaaagaacgagacagcttgtatgagaagcaaacgatttgaaagggcagaaaaagaaaatcgagagaacgttggaacggtaagaatttggggcatggcggcggctgtgtcccttatttcttgtggtaaaattgctaatggtatgctaaaatcaaggagcaaagataaaaacgcaacgtaagagaaaattccttacagagccggtaggtagcccggccgcaccatctggtgtaagtaaccctccctccttagggtcgtccgttctttgttcatacaatcatttaaggaggaattgtcatggacaaagtatcaggtagattgacagtattttttgaagaaccattctggataggtgtgtttgaacacatatcggagaagaaattgtctgtatgcaaggttacatttggtgcggaaccgaaagattacgagatatatgattttgttctgaaaaattactatcgattgaaatttagtccggctgtggcaactgatgtaaaagaagctagtcgcaatccgaaacgggtacagagggaagtgcgaaaacaggtacagaataccgggataggcacaaagtcgcaacaggctttgaaattacagcaggagcagttgaaaactgaacgtaagactgtgagccgggaaaaacgggaagtagagaaacagcggcagtttgaactgaaacagcagaaaaggaaagagaagcataggggtaggtaatgcctgccccggctttttgttaaaatacacattgttactctttagtgagtttagaatattcattttacagaagttgtcgattgtaaaagtgatactggtaatgatttaatagaatgcagtttatgttgtgtaacggaagcaatgatatatttctttagcggatataaatacgtggtgctagcacaatattggattgtagataaaagaggctgatgatgacaaaagatgaatttgatgcattattgatgtgctgcaggaatgatgaggatattctcgattttgcacgaaagtttataattcatggaatcccctatgtttttaatggtcgtgaagatgaattttttgaatttagaaatagaattggaaaacatttttccattgactattatcaagtatatattgtaggttcaggaaaattgggatttagttatttaaaaggaacagaatttaattatgattctgatatagatgtagcgattgttagcgaggaactgtacgatagatatttgaaatatattcggaaatttcagtatgatttagaacgttctagagaaagattagtagaacgggagtataagaattatattaaatttttgaagtatatggcaaaaggctggatgagaccggatttattaccaatcaaaattgaaggaattgatttaaaaacaaactggtttgatttttttaatacaatttcatatgataaaagtgaagttggaaattataaagtgagcgcaggtgtttataaaagctataattatttagaatattatgcgataaatagtttgaaagaatacatacaaatattaaaggtagaaaaggagaccggaaatgagtaaacagatcacaacttcccctagtaatagaaaaatatcagctttatataaagatataaaaagagagaatcttattttgcaacccgattttcaaagaagattcgtgtggaataataagcataaagaaaaatttattgacacaatattggaagggtatcccgtaccagaaatatatgttgcacaaagagggatagatatagaaactattgaatcagaagaagttgtggttgatggacaacaaagattacatacaattgttgagtatatagatgaaccagaggaatcaaaggtctttgggaatattgtaaaaaagtatagaaatcttagcaaagatgaaaaagaagactttcttaactatactttattgattcgagatttaggagatatctctcctgaaaatataaaggaggtctttaaaagaataaactcgacgcaatatgcactgaattcaattgaattacataatgcgatatatgacggagagtttattgcaacagcgaaagaaattttagaagaagtagatgttactaaattaccgttttttagtgattctaaaataagtagaatggatgatttattattcattttgcttattatgtcgactgttcaagagggagggtattttgttggagacaaatatattgaaaaatatgttgctacgtataatgagaattatccagataaaaacaatgtaaagaagaagatagttgatgtattctctttcataaatgaattatctttgttgaacgattcgttgtggatgagaaaatcctgttattttacaatgtttattgagatttttaaagaatttgaaaaaatagagaagaaaagaaaaatattaagagagtatttacaagaagtggagagtaaagtagaagcaaataaaagcagtaatgctgatactaatcaatatgcaaaattttattcatatatttataccggaacaaatagtagaaaagcgcgggtggaaagaggcaattttttgaggaaagaaataatagaaccagttatggaaaattgaattttagatggctctattttggctctaaaaatttggactggcacaaatacgagagcattttttgaagaatatggataataaatcctttaaaaagcagagaaaagcagccagttcaaattatccgccgaggagtttgaataaacaaaaatgtttagtaaatccagcgtttatgcgggtttgcggcacttttaaaagtcttttgataacaaattgataacagttgcatgagagccattattcttgtaacccggtggttttagggttagagaataattgacaggtggttgtgcaacaaataaatccatattataaacgaagcccttagctgtgggtataaaactcatagctaagggcttttgtcgtgcttatttatctggtttgagtttgtcttgaaacatttcgaccgtaaatggtaaaccacacatctctagaactacacctccaagtttgagataatgttggaaaagttgtacaatacacttttcccatttttcacactaggaggttaattatgaacaccaaacttgccacagcacagatccgtgtaaaaaactgggctgctattattcaggagcgcaacgaatctggtctgtctgtcaaagattattgtgcacagcatcagctttcatgagactcttattattactggctccgcaaagtgaaagaggccctgcttgtagaaagcggctttgttgaagtaacgcagccaaagcagttccctgtgcagaggtctgtaacagctgatccaaatgaaatgttaacgctcaaattcttctgtggttccagtaaccggaagatcaaagggctggcctgggaggaagacggcttcctgcttatttataagcggctggaggtgggaacttttcaatggccccgatcggaagcggaagcccggaacatcacttcggagcagtatcatctgctcatgagcggatactccatagatccatctgtccataagatcgatccaaaacatccagtgtgacttttgtacaaaacagagaagttttctgtttgattcgaaagcctgtatggggataaaaagttctgttttttatccgcttaacatgaattgtggacagtcttctctgccacatgaaaagtaagccggatccacctgttttcaggcagcctggaaggtattctctacagaaagaactgcttttggagcaggagttttccaccgtcaaaataccgaaaagatatcggtctgatttttgtgttttttcgcttcttctgttatactggatccataaaagcgaaggaaactgatcgtccgtatggcacttgcgttatcaaaagaacagctggcaaaactgaataaaaaagatatcctgcagctcttgcttgaaagcatggagcaggaaaaagaattacgtagccagctggctgttcttacggatgagttgaaacggacaaaccagcagatgcaggtgatccttgaaaaatggaaccttgcgcaggcaactcgctttggacgtttttctgaaaaaatgacatatgataccggagcctgccagcagttggaactagccatcatgtacgcggaatgtttcaatgaagcagaagcatgttttttacggcaaatcttgctaataaccccaggtttcgcctataataggattcagtatgaataatagaaagaagggggttaagcaatgcaggcatatacatatatttctaagggaaagtttgaattagtggaaaaaccaaaaccggtgcttatgcacgaacgggatgcgattgtaaaggtaacactggccagcatctgttccagtgatctgcatatcaaacacggaagtgtgccgcgggcggtccctggaattacagtcggtcatgagatggtaggaattgtggaagaagttgggtcagcggtgacccatgtgaagccgggggacagagtcactgtaaacgtagagaccttctgtggtgaatgctttttctgtaaaaatggatatgtaaataactgtacggacgagaatggcggctgggccctgggatgccgtatcgacggcgggcaggccgaatatgtgcgggttccatttgcagatcagggattaaataagattccggatggagtgacggaccggcaggcactgtttgtgggagatgtgctggcgaccggctattgggcggcgagaatctctgagatcacggaggaagatacggttttgatcatcggtgccggtccgacgggtatttgtacccttctatgcgtaatgttaaagaaaccgaaacgaattattgtctgcgagaaagatgaaaaccgcgtccgctttataaaggagcactatccggatgtatacaccgttttaccggaggaatgtctggaatatgttcagaaaaacagtgatcatggcggagccgatgtagtccttgaggtggcaggagccccctctactttccggttagcctgggaatgtgcaaggcctaatgcaatcgtcacagtggtagcgctctatgacgaagcccagacgctgccgcttccggatatgtatggcaagaatcttacctttaaaaccggcggtgtagatggatgcgactgtgaggagacgcttcgcctcattgcagagggcaagatcgatacggaaccgcttattactcatacctatccgcttagccggatcgaagacgcatacgagctttttgagaacaagaaagatggagtgattaaggtagcggtggagtgctagttggataaagaaaggtaagagatacatgcagaacatcagatgggcagttcttggaaccggagtgattgcaaatgaaatggccgtggccttaaagaaaaacgggcgaaacatcgatgcggtgggaaacagaacccatgagaaagcggttgcatttgcagaaaaatatgggataaaaaaggtatatgataattataatgacatgtttacagacccggatattgatgtaatctatatcacaactccccataatacccatattaattttatgcgcagggcaattgagaatggaaagcacattctggtcgaaaaatctatcaccttaaacagccgggaactggatgaggcaattgctctggcggataaaaagggtgttgtcataggtgaggccatgacgatttatcatatgccgatttataaaaagcttaaagagattcttgagtcagggaaacttggaaaggtgaatctgatcactatgaattttggaagcttcaaagaatatgatatgaacaaccgcttttttaataaaaacctggcaggaggtgccatgctggatatcggggtgtacgcgctttcctttattcggtggtttatggattccaagccggatcagcttttatctcaggtaaaaccggcacctaccggagtggatgaacaggcaggattgctgctgatgaatcaggaaggccagatggcatctgtcatgttgtcgctgcattccaagcagccgaaaagaggcatggtatcctgtgaaaagggatatatagaaatcatggaatatccgagagcctgggaagcgagaatcacctatacagattccggagaaacggaagtgattcagaccggtgagcatgcagatgcgctggtctatgagctggcggatatggagaaagccatccgtggggatgcagaatgcatgcatttggattatacaaaagatgtgatggatatgatgacggaattcagaaaagaatggggatttcagtatccggaggagatgtaaattatggtacgaaaacacatctttttttcaggtgatgtccagggcgtcggcttccgctaccgctccttttatatcgcccagtcccttggcctggccggctgggtggagaacctgtgggacggaagagtggagatggaagtgcagggaagcgaagcttccattcgggaaatgttagctaggattcagcaacagagatggatcaacgtggcggatatggagatcacagagattccctgtgaagaagaacggggatttaagataagataaaaacgaggggaatgttactatgtttatcaatttttccaatcatccaagcaaactttgggcagaggaagagagaaatgcggctcttcagtatggcacgattgaggatctggcctttccgcaggttccggaaggcgcagtctaatcactggctaagccagtggtcatgatttgcattaccagagctaattccgttttttgatgtataaaaatacagaagaatgacataaaatatgtaaattttcacttggattttacgcattctatggtacactaatatggtatatcaaaaaatgggaggaagactcaaaaatgagcaaaaaagaagaaaaagggctaaagtcctttaacaagggattccaagtgccagatacctacattatcatctttttagtagtcgttatcgcagcacttctgacatttcttgtaccaaagggattttacgaaacacaggatatttcatatatgatcaatggtgttgagaaaacccgtacagtaatcaaggacggaagtttccagtatctgacagatgatgcaggaaatgtagtaacagaaggagtagcactctttagcggagatggtggaacaggattcttcaactatatgtataacggaatcgtaaatagttctgcaatcgagattatcgcattccttatggtagtaggtggtgcatttggtatcatgatccgtacaggtgcgattgaatctggattgatcggattgatccgtaaggccaagggagcagaaaaactactgattccgatacttttcgtactgttttctcttggtggagcagttttcggaatgggagaagaagcgcttccgtttactatgattctttgtccgttgtttgtagcagttggatatgattcagttatcgcagttcttgttacttatgttgccacacagattggcttcggttcatcttggatgaatccgttctctgtaggcattgcacagggtattgcaggtattgacgtattctccggtgcaggattccgtatggtaatgtgggtcgtatttacagcactcggctgtggaatgactatgttctatgcatcaaagattaaaaagaatccgacaatctcaatcgcatataagacggattcatatttccgtgagcagaatgaaacaacaggaattgacgaaggacattcatttggtcttggacacattttagtccttctgacactggctgttacagtagtatgggtagtttggggagttatgactcagggatactacatgccggagattgcaacacagttctttattatgggaattgtttccggtgtgtttggagttatctttaaactgaatgatatgaaactgaatgatattgcaacatctttcaaagatggagcaaaagacctgatcggtgctgcccttgtcgttgctatggcacagggaatcatgcaggttcttggtggttctgatccgacaacacctacagttattaatacaattatgtataatatttcaaatgcattgtctggagtttccggagcagttgcagccgtacttatgtatctgttccagtccgtatttaacttcttcgttgtatccggaacaggacaggctgccatcacaatgccgatcatggctccgctgtcagacctgttaggtgtttcgcgtcagacagctgtagttgcattccagcttggtgatgcatttacaaacctgattgttcctacatccggatgcttgattggatctcttgcaattgcaaagattgagtggtctaactggattaaattcatgtggaaattccttggtgtcttaatgattggtgcaatcattacagttcttgttgcagttggaattggattctaaaatatgtattttatctcagtcgagaagattcccacctcttttggtggcgagtaatagcaaatttgtctcagtgggagtgatttgtgatgaaattaattcagaatattgatgtttatgctccacagcatctggggaaaaaagatgtacttataatcaatgataagattgttaagattaaagatgcgggttctatatccgcagacggatttctttctgagacagaaaggatcaatggagaggggctacttttaactccgggattcattgatagtcatgttcatgtactcggaggcggtggcgaaggcggattcgccaatcgtactccggaagcaaccatggaaggacttacgaagtttggagtgacaaccgttgttggctgccttggaacagatggaatcggtcgtgatatgtgtgcactggttgcaaagacaaaaggattgaatgagcagggaatgtctgcatactgttataccggaagttatcagattccggtccgcacgttgactgacagtattgtgaaagatattatgatgattcaggaaatcattggaacgggagaaatcgcgatctctgatcatcgttcttcacagccgactttcgaggaatttgcacgtgtcattgcggatacaaggcttggtggtgttctttccgggaaagctggcattgtaaatgttcatctgggcgatagtccgagatgcttagatctgattgaacgagtagtcgatgagacagagataccggcaactcaaatactgccaacacatatcaatcgaaatgagatgctttttggcaagtcgattgagtatgcactgaaaggcggagcagtagactttactggaaatgaagatattgactattgggaaactatctgtgatgaggtacgtgtatgtaatggtatcaaacggatgttagatgcaggagtaaatcctgaccgcataacaatttcttctgacgggcagggaagccttccgatgtacagtagtgatggaaaattccttggaatgggcgttggacagtccagctgccttctgaaggaagtaaaggaatgtgtatttaaaacagaaattcctttagaaatagcaatttctacaattacatcgaatccagcagatattctttgtcttaagggaaaaggtaaggttgaagaaggctatgatgcggatctttgtattctcgaccaggaacttcagcttgttgaagtgattgcaaaagggaatacagtttataaaaaataaaggatatcagatgtgagaagcatcagtcacttagttggctggtgcttttttgcgtgcttatacagttgataaaatgataacctttcataaaaagagatgccgtctgctggtagaattaaaaagaaaaaaagttgttgacatacaccacaaatataataacaattctaaatgtttgaattataattattctatatgatagaagaaggagataaataataaatggatgattcctttcactacttgggagagttattcttttatctatttaagcgaccggcttaaggcaaagttgacggtatatcggacgttttgtccgaaatcatagcctgatcccttcttttatatacgacagtatgcctgagatacctttagccagccgataatagctgaaatggattttttcttttatagggtctgctttctgtatgattgcaaccttcagggcatgcgtttctgatttcatggatatatgtgccagaaatgccatgcacagggtaatataaaaatttagggcattgattgcagtgagcttccttacacggaagttttcaaactgaaacatctgcttttttagaggtttctgggctttgtgcttgcaaaatgcttgcagtaagtaaaatttcttataatttgaaaataccaagatgaaaatatcaatgaaaatatcaaggaaagaaatcccttgacatttcccaccaacatgcctaaaataataaacagattgcatacatgaaatcaatcaaaccaaacaaaccaaaagctatgatcgtgttttataagatactgtttccggtcagagagaagaggtcagcggctgtgagcctttttccgttcagacagatatccgaatttcccacgggagctgcattgctgaaatttagagtaggcattgccgtctggtgtacgttacataccggaaagtgtctgtggcagacgaaaaaatgacctgccgacaggaagctgggtggtaccgcggtatagatatgatcgtccctttgcacgttttgtgcgaagggatttttttatgtcatgtcgcaagcgaccgcgcgagacgcccgaatgtgccagagaacatcctttatgcacaaattcgtgtccacaagttaaagcaatatcaagataaaaagcaacaaaagtaatagaaggagagaaatcatgcaggatttaaaagaactgaatgaagtgatcactgcgatcaaagaggaaatccgccagggtgcggatgctctgacgacttccaagagtgtctatgagtttaagaagacctttctggataataagcagggcagaattggtctgctgatgaaagaaatgcgcaatgttgccaatgaccagaaagcggaatttggtaagactatcaacggcgccaaggagtgggcaaacaatttctttgacgagctggatcagaaattaaaagagaaagagcagcagcagcgctatgaatcggagaagattgatatcacgatgccgccggttaaaatccgttacggtaatctgcatccagttacgacggtccgcaatcagctgacggatatcttcacctctatgggatttgaggtatatgagggaaccgagatcgagaccgattattataactttacagctttaaatacaccgcaggatcatccggcgcgcgatatgcaggatacattctatctgtctccggaattcttgctccgtacccagacatcggctggacaagttcatgtcatggaagcgaaaaaaccgccgatcaaggttgtttccccgggtaaagtattccgttctgacgatgatgcgacccattctccgatgttcagccagatggaaggtctggttgttgatgagggcatcaccctgtgtgatttaaagggtatgctggatatgtttgttcagagaattttcggtgagcagacaaaaacgagacttcgtccgtcctatttcccgttcacggagccgtctgttgaggtcgatgtaagctgcttccagtgcggcggcaagggctgccgtctgtgcaaggaaacaggctggatcgaggtcctcggcgctggtgtggtaaataagaaggtactggaaaactgcggcattgattccaataaatacagtggattcgcattcggattgggtctggagcgtatcgcaatgctgaaatacggcatcaacaacatcaagatgctttttgagtctgatctgcgtgtgctggatcagatcgatgactgatcaggacaggaggattagaaatgcttgtaccgttaagctggttaaaagattatgtagatattaatatttccgcagatgagctggagaagaagctttttgactgtggatttgaggtagaagaaaaatggcaggttggcaaggatatcagcggcatcgtcgttggttatgttgactcctgtgagccgattccggaaacacatcttcatgtgtgccaggtcaatataggtggtccggaactcttacagatctgctgtggcgctgacaatgtaaaagctggcggaaaattcccagttgccatgattggcgcgaaagtatatgcaactgcaaaagatcatgtgacgatcgagggcgtggccaccattaaaaagggtaaattgagaggttatgagtcccagggtatgctgtgttccggtaccgagcttggcttaaacgaggatctgtatccgggtgctggttacaacggattgctggttctgccggaggatgcggaaattggttcggatgtcaaagagctgaccggcttaaatgactggatcttcgatgtttctatcacggcaaaccgtccggactgccagagtattttcggtctggcaagagaggttgctgccgcactgggcgagccgctcaagacaccggcactggattacactgagacagaagttgagaaagaaggcttcaacgtaacggtagaggcacaggatctttgcccgcgttacattgcacactatgtatatgacgtaaaactgggtcagtccccggcatggatgagacgacgtctggctttggtaggaaataattccatttccaatattgttgatattacaaactatatcatgcgtgagttaggtcagccgcttcatgcgtttgactgcgattatctggagggcaatgcgatcaacgtaagacgcgcggccgagggcgagaagatcgtgacgctggatgagaaagaatttaccttaaatccgaacaatctggttatctgcgacggcaaaaagccggtagcacttgccggaatcatgggtggtttaaattctgaggtccgtgataccacgacggaagtgatgttcgaggcagctaaatttgcccgtgacaacatccgcagaagctcccgtgcattaggacagggatccgacgcgagccagcgatattctaagggcgtcgatgagtacacaaccgagatggcgatgaaacgtgccctgcacctggttgaggagctgggagctggtaagatttccaagacccataaaaatgtaaataccggaaactccttagagccgaccaccttcaagacaagtgttaagaaggtaaacgctgttctgggtattaccgttccggacgaggatattttacgcatcctggctggcttaaacttccagccggagatcaacggcgacgaactgaccatgcatttcccggcataccgcgaggatatggaagattatccggatgttgccgaggaagtgatccgtatgtacggctacgatcacatcacatcgaccttcctgccgagtgctaaggtgacgatcggtggaagcaacctgcgtcagagaacaattctgaaagtaaagagaacgctgtgcagtgttggcgcatttgagggaatccactattccttcttctccccgtcggatctggatgaaatgggatttgcagaggacgcgccagagcgcagggcgatccgcatcatgaatccgatcaacgaggatctgtccctgatgagaacaacactggcaccgcagatgattcatgcgatgggacgcaaccaaaagagaggcatcttcgagggacgtatcttcgagattggaaatgcatttattccgaagtccctgcctctgacggaatatccggaagagcgagagacgctgtgcatcggtgcatttggcaaggaagagtccttctttaccttaaagggaatggcagaggcagttgccgatgttttaaatattacttttaactatgaaaaagcagagaaaccgttcctgcatccgtatcagaccgcagcgatcttctgcgagggcgaggagattggttacctcggtaaggtaaaatatgagatcatgaaggaagaggcaatgcgcgaagatgcgtatgtgttggagatcagcatgaaagcgctggagaaatggtatggaaaagccaaagtatttgagccgcttccaaaattcccggaggaaaaacgtgatctggcgctggttatggacaaagacatcacctgcggacaggttgagggctgtatccgcgaggcttgtgcttacgtcaaggatgttagtctgttcgacgtatacgagggcagacagatcgcagccgataagaaatcgatggcatttaccgttctcttcactccgaaggaagaggcgttcaaggcagataccgttgacggatatgtcaagaaagtgctgaaacagctgaataagacgtatggaattgagctgagaagctgattttgaaggaaagaaaaggctgctgtccagagagagaaactttggacggcagtctttttgtgtaataggaaattccttggaattccctattacacaaaaaggcactaacgtgccaatgatgcgcactcgcgcgaagcagaaacatgtcgcaagcgaccgcgctcggcgcgagaatgtgccaaggcacattctttttcacgttcatattcacaaaaaatgtttgatgataagtttgattacgcttcattttctattcgtataatcacaatatcatttaatttcaaaaccatatttttctgcggaagcaccgacagatcatcgcgcagcaccagaaatatcttgatattctgctcttcttccatctcttcaatggtttttccggcataccgtttatcgacgaaaacctcggcaatttcctgaatatccgcgtccttcatgctggacaggctgctcttgcgctggtactgttcgacgaaaccggcgctgatgataccggttgggatcgcgacggcaccgactccgaggtaggcgatgcagatcgccatcacgcgcccaagcgttgtgaccgggtaaatatcgccgtaaccgacggtcagcagcgtggacatactccaccagatgccgctgaatgcattgcggaaaatgtccggctgagcgttgtgctcgacactatacatgcacatgctgctcgccagcatcagcaccatgacgatgaacacagaggaaatgatctggttccgtttttcatagagtacggtggtaatgatgttgaacgagtcgtatttcgcattgagccggaacagatggaaaatccgcgccacgcgcagcatacggaaaatgatgaagcccgacagaaaaaagaccgggatgatcgtcagcagatccaccactccatcaaaggaaatgagaaagcagaaccgggcgcgtcccggcgttttttctggatagagatagtcggcagtccagatgcgcagcgcgtattcaatacagaaaatcaggacactggcatgttccagcatggtaaacagaccaccgaaggatgctaattgatcgaatgtttctagaaacgtgacaatgatattgcagatgatcgtgaaggtgatgaaaatatcgaatgcacggctgatacggttgcttttgtcgccgatctggatgatgttaaatattttttctttcatagtggatatttttataataatttttgggtgaatgtgtttccctgttggtataaaagagggggttatctcagtcgagaagactcccacctcttcaggtggtgagtaatagcaaatttgtctcagtggaagccttgtctccgactgagataaacgctccgcgaggatgcgcagtgatcctgataggaatatgtcagcttcgctgaccaggatcacgtgccaagtctcacggacgttcgacttgaatatagttgcagatattattattgtatcattttcaggcatcccttgcaatctttctggtgtctgggtataatttccgtaggtaatttaaaaaggtaaaatgctttgtttagaacggccgcatttaaaatagagggtgccgtataatagcaagcatgatcacaaaggaggaatacgatgctgtttatttattatccaaaatgcagtacctgccagaaagcgaaaaaatggctggatgcacaggaaatttcatatacagagcgccatatcgtggaggaaaatccgacgtatgaggaattgaagaagtggcaggcgagaagcgggctgccgatcaagaaatttttcaatacgagcgggatgctatataaggaaatgcagttaaaggataagctgccgcagatgagcgaggacgaacagttgaagctgcttgccaccaatgggatgttggtaaaacgccctgtcattgtggatggagatactgttttaacgggatttcgggagaaggaatgggaagagaagctgcggtgatggactgggagcagaagtttcctttcttacgtgaaaaaggacacgtggtctcgctgattggcggaggcggaaagacgacgcttctgtatgcgctgtcggcatactgcacggcgaagggatggcgggtgctgacggcgacgacgacgcatattcggaagccggtaaacgtgccgtggattgcggtaaatgaggaagaaaataccgcgtgggagaatgccggaaaagagcgcgatcgtctctggcagcagggaacctacgtcgtagccggaaccccagccctacacgaaaaattgacaattctgccagaagcgattcgaagcgagtggatttcggatgcagatatcacatttctggaggcggatggcgcgaaatgtcttccgtgtaaattcccggcggcgcatgagccggtgatactgccgcagagcgatatcgtgctggcggtcgcggggctgagtgccctgtatcgtccgttgggggaggtgtgcttccgggcggagctggcgattgaggcgtggaacagggatgtgtgcgagtatggggacgcagcttatcccaaagaaggaaaaagactgctcaaagaagtgcccatttcgaaagatacgcctttgaccccagaacttctggcgtggcttcttggtagcgaaaacggtgccagaaaagatatatcggggcgtttgttttttgcggttctgaaccaggcggacacgtcagagcgccgggaggatggcagaaaggtactggatatcctgaaacatagctacggaattcagggaattttaacttccttttcaggaccagaacgaaatcaggagtgagagagatgagtgagaaaaaggatatcgtattttgtacgggcggcggctgtacggcaaagctgggagccggtgttttaagccgcattttggaaaaactaccgcgcggcgagaaggatccgaatcttttagtcggatatgacagccgggacgatgcggcagtgtatcaggtcacagaggatctggcgctggtgcagacggttgatttcttcccgccgatggtggacgatccgtatatttttggacaggttgcagcggcaaatgcgctgagcgacgtgtacgcgatgggcggtgaggtcaagacggcgctgaatctggtgtgttttccggaatcaatggatttgaatgttctgggacagattttacagggcggcgcggagaaggtggcagaagcaggcggcattctcgcgggcggtcactcgatcgcggacacgggcgtgaaatacggtttgtccgtgacgggactggtaaatccgaaaaagctgtacgccaatgatgccggacagccgggcgaccgcctgattttgacaaaggcattgggtgttgggctgatttgttcggcaaaccgcgtcggagaagtgacaaaagagcagatggacggggcggtacagtcgatgacgacgctcaataaaacagcggcggaaatcagccggaagtacacggttcacgcgtgcacagatgtgactgggttcggttttctgggacatctgcatgaaatgatggggcgcgggttgtcgtgcgagattgatgtgaaccatattccggtgcttccgggcgcacgtgagtcggcagatgcgtttttatacacggcggcaggacagagaaaccgcaaccatgtcggggcggcggtgcagtttgaaaatgtaccgttttcaatggaagaggtcttgtttgacccgcagacctccggcggacttctgatggcagctgccccggatgaggcggagaaactggaacaggagctacagaacgccgggcttccggcgcggatcgtgggaacgatcacggaaccgggagaggttgaaatttttgtacgaggataggaggaaacagaaatgaagaaagtagatgcaagaggagacgcatgcccgattccggtcgtaaaggcaaaacacgcgatagaggaactttcgggtgccggacaggtggaagtgctggtggataatgagattgcagttcagaatctgacgaaaatggcagagcagaagggctatcagagcagtgcaaagaagctggcggatcaggaatatcaggttatctttacggtgggtgaacagacagaagaggaaaaagcacaggcaggagccggatgcgaagcctgtattccggacagccgtaccgataccgtggttgtgattgccaatgataagatgggcgagggcagtgaggaacttggaaagacgcttttgaaggcatttacatttgccctgacccagcaggacaacttgccgaaaaccattcttttctataacggcggagccagtctgacctgtgaaggatctccgatgctggaggatctgaagacactggaggcagaaggtgtggagatcctgacctgcggcacctgcctgaatttctatggtctgaccgggaagctggcagtcggcggtgtaaccaacatgtatgtcatcgctgaaaaaatgctgggcgctggaaatgtggtaaaaccatgatttatatggacaatgcggcgacttcgcttcaaaagccgctgcaggtggaacaggcagtccttgaggcgcttcgcaccgcaggaaatccggggcgcggcgcgcatgaggcaaccttacatgcttcaagactggtgtacggggcgcgtgcggcagcagcagaattgttcgatgcggaagatgcgtcgcggattgcctttacggcaaacgcaacggaggcgctgaacatagccatttccgggctgattcgtccgggcgatcacgtgatcacgacggtctgtgagcataattcggtgctgcgccctctttaccgtctgcgtgatcagggagcgacgcttagttttgtgggtgtggatgcgcgtggaaatctaaaatatgaagagttggaagcatttctgcgcccagagacgcgtgcggtggtaattaccggcgcgtccaacgtgacaggaaatgtgacggatctttcctatatttcttcgtttgttaaacggaatggactgcttctgattgtggatgcgtcgcagactgcaggggaagaactgttttccgtgcagaagctcggaatcgacgtgctctgttttaccgggcataaggcgcttctgggaccacagggaaccggcgggctgtatgtgaagccgggactttcggtggaatcgcttctggttggcggcagcggtattcacagttatgatgaacaccatccgaaggaaatgccaacggcactcgaagccgggacgctcaatgtccatggtctggcgggtctggccgcaggcatccgttaccggatggatcaggggatcgagaaattgcagaaacgggagagggatttaacacgccgtttttacgaacaggtgaaggaaattccgggcatcattgtgtatggagatccggcggcaaaatgtcatgcgccgatcgtctccctcaaccttgccggggaagattcggcacgtgtggcggatgcactctgggaagaatacggcatctgcgtccgcgcgggggcacactgtgcgccgctcatgcaccgggcgcttggaacggtcggtcagggagtggtgcggttcagtttttcgcattttaatacggaagaggagattgagagggcagcagaagcagttcgggcactggcagaggaagcgtaggggagaaattggtagtatgagagaaaaacatccatttatcgtactgtcctttcagacaactgtggcggcgatggaatgggaaaaacgatgtatggaaacgggcattccgggacgtttaattccacttccgagggagatttctgccggctgtggtcttgcgtggcggatgcgtccggaagagtgggagcagtggagcggacggatagatacttctgtttatgataaggtgtcgtgtgtgtggcagtaaaaagaattactctaaaagcagaaaacaaaatcaaaagaattatttgaagaagaagctgcataaacaggtaatggaaataatagtaacaaaagtgagataggagaaggcatcctcatgaaacgagatgatttaattattgtgcgcggcggcggtgacctggcaactgggacgattcaccggctctgggcggcagggcttcgggtgctggtgctggagattgaaaatccggcggcgatccggcgacaggtagctctgtgtgaggcggtttatacaaaaacaactgaggtcgaggggcttcgtgctgtccggattgatcgatatgaggaggcagaagcggtctggcaggaaaatagcgtgccgattttgattgatccgaaaggtgtgtcgattggagcgctgaaaccggctgttgtgatcgatgcgattctggcaaagcgaaatcttggaacccgccgggatatggcaccgctcacgattgcacttggtccgggctttacggcaggtgaggatgtggatgttgtggtggagacaaagcgcggtcaccggctggggcgaattatccgcgagggtgcggcgatcccgaatacagggattccgggcgtgatcggtggatacggtgcagagcgggtgattcacgcacaggcagcgggtattttcaaaaatgtgcgtgtgatcggtgatatcgtcgaagccggggacacgatcgcggagatttggcaggaggacggaacgaaacttctggttcagacacagatcacgggcattctgcgaggtcttttgcgggatggttatctggtgacggaacatttcaaggtagcagatgttgatccgagaaaagaggaactttccaactgttttctgatctcggacaaggcgagatgtatcgcgggaagtgtactggagttggtgtgtgcccagttatggaagtaaaagagagactatagcaatagttcctttgagaaaaattctaagaaatttcatcctaatcattgacgtatagcaaaaaaataacgtaaaactttctggataagctcctttggcaggcagctttgataaacatcaggatctggttttggaagatgatccctatgattgttagaatcttcatgtcataggaaacttcgtcctatgacacaaaaatgctccgcggaaaagcacagcgaactataaagacgctgtgccttccggggtttcttccccttcatttgcttcctccatggtgacaatcggctggatggcctcatcggtatagcggatgcgcaggacagcctggggccagttaagcttgattagggctgttttctgccgttcttttccggctttttcgattaggtcgagcagttcacgcagaacttcctttgtcagatagccgccgcgccagtgaaacgtcagtgtttttccttttttggccgcctgtaaggagcgcttgtatacatcctcctgtttggtaaaggagagcttcttttctttataatagaaatggttgctgtccgtgcaggcaggcgccggggcgatgagcggttcgtggtcgcggaagatcgccttgtcgtcgagattgaagtaatcgtagcggatttcctcccctgtctggctgcatttgccgagactgttgtcgaaggtagcgtccagatggtagtacgtttttccgatcttgacgatgttccaggtatggcggtatttgatgcccttttcagggttattgccgcagagcgcgatcatgcaccagatgccgagcgtatcacaaagaattttgaccgatttggcgatgccctcgcagacgccgacgccctgtcccagaggtccgatgatctcatgggagtagggcttttttaatttgtcatagtgaacgtgttcgcagataaaatcgtggatatagcgttctttttccagttcagtcagcttcattgccgggcgggcaagtttttcgacgcgggcgtccatcgctttctgatgttcgcggatcttgcccttgtcaaagaggtattccggtatcaggatcaggttcggggaatctgggtaatacttatatttaaagccggaagcccagaaaatctccgggtgatcgagccgcagttcaaaaaatacattgcttaaatcctttccctccaggcgcggaatctgaaattcgtcggagagattggtaagcccctgctgcatggcgcggtaggcggcttgctggttcttgttcatgtgattatagtaaaatggttccattttgatattcctttgtaactctttatattttagtgtgattcagccgctttctcaatctgcccggattccgggtcaaaccagacgcgatcgccctcatcgattccggtatcatagagtgcctgatccgcggtgcgtatcgtatattctggatgctctgagaggtttgcattttcagttgtgtccagcagacggacacagaccatcgtttcctgtccgtccgggcgttcttcacagccaaaatcggcttcgtatatttctaaaacccggcaaagacgcgggaatgtttgattgttgttcattgtgtatatgcctcattccatgagaaaatttctgtttttatctttttaattttagcagaagatgataaggcaggcaagtagagaagaaagggaggaaataaattaaatgcgaagccacggcaaattccgttactgggcatgatgcgtgaacagtaacgatgggacggctgggaagaaaagcgggagggggggaaatttgaggggaaaattgctggcagatacttgtaattctaataaaaacaggtagaatagaagctgtctatgtccgcgggagacggacataaaagttacaatcacgggggttataagtaaatggcaaaaaagaaaaacagcttcagcggttcgctggggtttgtgctggcagcagccggaagtgccgtcggtgtaggaaatatctggcgttttccgtatttatgtgcgaaagacggaggcggactgttcctgctggtgtatctggtgctggtggtgacatttggatttgtacttctgacgacggatgtggcgatcggcagaagaacgaaggagaatgcgctgcgggcgtttggaacgctgcatccgaagtggaagtttgttggatacctgacgtttctggttccgatgttaattatgacgtattattcggtcatcggcggatggatcacgaaatatttctttgagtatttgacgacatccggcagggatgtggcggaggacggatattttacatcgtttatcacggaaaagaatgcgccgctgattttcacgggaatctttctggcgctcacaatctgggttgtatacagaggtgtggagaagggaattgagaaattttcctgttttatcatgccgggactgatcctgttagtcatcggaatcgcgattttttcactgacgctttcctacacggacgcggatgggacggtccggacgggaatacagggattcctcgtctacgtgcgcccggattttacgggactgacggtaaaaggatttctggaagtactgctggatgcgatgagccagctctttttctcactgagtgtgtcgatgggaattatggtaacatatggttcttatgtcaaagatgagatcgatttgaataaggcgaccaaccagattgaattttttgatacaggtgtggcgcttctgtccggcatgatgattattccggcggtctttgtatttttaggacgcgacggcatggcgtccggtccgagtctgacctttatttcgcttccaaaggtatttcaggcgatgggcggcgccggtcatatcgtgggacttgcatttttcctgatgcttggctttgcggcgctgacatcctgcgtttctgtcatggaaacgctggttgccaactgcatggaagtgtttggaaagacgagaaaacagatgtgtgtgatggtcggaatctattccctgctcacggcggttctcatttgtctgggctacaatgttctgtattttgagttgaagctgccgaacggttccaccggacagctgcttgatgtgatggattatatcagcaacagcttccttatgccgatcatttccttcttaaccagcatcctgattggatgggtggtcggaccgaagtggatcgtggaagaagtcgagaaaaatggggaacatttttcaagagcaggtatgtacagcttcttaatccggtatattgtgccggctgtcatgctggttcttttcctggtatcgaccgggtttattaatatgctgtaatgaaaaatggttttagccgattttcacggaaagtgcgagaattggttaaaaccttttttatagaaaaatgcgtcccattattcttcacggtcatccgactcgatctcataggtatatccggcattttcgatcgcctgaattgtatccttgatgccctgtccgcctgctttttttataggattcaataaaaacaggaatctgttcggaataaaacctattaaagatgtagaaaaataggaactattaaaaccgattttatcatttttaccggctagtgtcaacttataaaaatgtaaaagtttacaatcaaaactggacaatatatcgattttttgctatgataagctagttagaaaaaactaacttgcagggaacgtgaaaacgcagtaaattaggtgcataggtgtgaaagctaggcagcctgattggatagagtggagaaacaatgcagtatttgtggataaatccggtttctgccgggatgtgtgaggaagattcgctgaagcgttttttagaacggcatggtctgacgcgggtcgagtgccggggcgattggggacggatcgtccgggaaagatatgaagctagtctgcgggcgggcgtgacgcttgcggatgcgcgctgtccggaggcggttcggctgcttgaagagatacagaaggagccggaaaacgaatctggaattgaaaacctgaaagttgccccgatcgagccgattttacttcactgtgcgcgggaattaagcacgcgtccggatctggcggatggggagaagatcatcacgacgccatgccagagtcttgcggtgcttggaaattcgctgggacttgagaatacgcggtttatcgcatggaatcgtctggcaggcggtgaggtgcgcgtccgggcgatcgaagacagcccgattccgccggggtattttgcgggaatctgccggaaagatggacaggcggcgaaggtagagagtgtcagcagtccggagaaaatccgggcatatgtggagagcggaagctggaagcaggcggatctgctggaacttttgtattgtaaggatggatgccatcacggggatggcgtgcagacagagtgagagaaatctgcggttcatggaaaacgcttgaggaagcggaaaatgcatgaattgcggcaaaagaatgggaagaatgaaagaaacgaagaaattcaaggataattggcagaaatacttcggtccggcgctgggaatcggagcggtatttctgatctggtatttggtctgccgcatggagatggtcagtgcgtatgtgctgccgtccccggcgcgggtgtggacgagctttttaaaaatggtgaaaaccggggaactgtggcgggatatttcaatcagtttcctgcgtgtcatgaagggatttgcgattgcgttcctgtttgcctttgtgctgggaatgttccgggcgctgtttccgggcagcagcgtttactatgagtatattgtgcagtttttccgcaatgtcccgccgctcagcatgattccgctgctgattctctggtgcggaatcggagagacgacgaagacggtgattattgtgctggcgtcctttttcccgatgtacttaaatatcgtgaagggatttaccgggtgcgattcgaaacttctggaagtgggcgatatgttcggctactcgaagcgccgcaaatttttccgcatcattctgccctatgcgatggcagatattctggtcggaatgcggatcgggcttggctatagctggcgcgccattatcggtgcggagatggtggcggcgtccaccgggcttggacatatgattttatttgcgcagcagatgtcgcggaccgacaaggtgatcgtggggattctggcgatcggggcagtcggatatgtgacggaccgcctgtttggatggatgataggatttgtgctgaaaggatccggggaaaatggctggaattgaactgattgatattcataaaacatacctggtggataaccgggagattcccgttttaaacgggatcaacctgtcgcttccggcggggagaatcactgtgattctggggcagagcggatgcgggaaaacgacgcttctgcggctgaccggaggactggagacggcggacagcggagagattcgctgggagagcgcccacaagacggcatttgtctttcaggaaccgcgcctcatgccgtggttgaccgtctgggaaaatgtggtgttcgggctttcaaaaaaggagacagatccggggaaaatagaggcggttatccgcacggtcggattatctggatttgaaaaagcatatccggcacagctctccggcggaatgcagcagcgggcggcgatcgcgcgggcgctggcgtatgagccgacctttatcatgatggatgagccgtttgccgcacttgactattttacaagggaacagatgcagaaagagcttctgcgcgtccagcaggagcgcagtgcgagcattctgtttgtgacgcacagcatcgatgaggcactgattctgggaagccagattgcggtcattgaaaagggcatggtcaaggcgctctatgaggtcaaggcgccgcaggaagagaggaatcttttggaggatgagatgataaccctgaaaagggatattataaataatttataactgttcagtgccttcacagtcacgcgcaaaaatccattaaaaattgcctacggcaatgggatttttgcctgctggcccatgttttc

SEQ ID NO: 11017 - DNA, 123077 bp, Unknown
  gut microbiota DNA sequence
agtcagcgcagtaaatgcgcagacctactgaacagttacaataatttacattttatttagaggaggaacgattatgatgaaacgatggatggcaatgggaatggcactctgccttaccgcagcttccctggcaggctgctcaggtacaaaagatgcggctgagagcacgcaggcagaggcagaaaccagcgcagaggaggagacagcgaaagaatctgatctggataagctgacctttacgtatgtaacttctccgctcaatgtgccgacgatcatcgagaaaaatcagggtatttttgaaaaaacatttggcgatatggggattgaggttgattatgcggagctgacctccggggcagatcagacacaggcgctggcttctggcgatgtgcaggttttgtatgcggttggcggtacttcggtgattctgtctgcagcaaatggagcggatatcaaggtattaaatatgtacagccgttctccgaaggcattctgtatgtattctaaggatgagtccctgacgacgccggaaagtctgagaggaaagacaatcgcaggaccgaccggaaccaacctgcatgagcttctcgtttcctatctggcaacggctggcatgacgatcgacgacgttaactatgtcaatatgtcgatcccggatgcaaaagcaggtctggacggcggcagtgtagacgtggctctggttgctggcgcaactgcttacaatgcagggcagcagggttaccacctggtagccgacggcgaaggcctgattaaggcgatcattgcagtggcagtgacacagaaattctatgacgagcacccggagatcatcgagaagctggaagaagcacagaccgagattgctgatttcatggaagaaaaatcggatgagacgatgcagatcgtagccgatgagctggatctggacaccgatgcagtcagaagcatgtacgatctctatgatttctctaccgagatcacagatgatgacaaagaaggcttccagaagaccgctgatttcatgtatgaatccggcatgatcgacgaggcatttgatgtaaaacagttatttattgaaaaataatcagtgaacatttgagaggataaacgattgaaaagcagctcccggagtgtggattccgggggctgcttttacgattgcatatgcaattatgaaaatacggaatgtttacgctaatacctttttaatcgcttctaacagctcatcatacgtctcataagccggaatctgcggatattctgccttgatctcctccgtcgtgcggaagaggaagcccgccttgcttgcctcaatcatggcgaggtcgttgtggctgtcgccgctggcgatcgtctcgaagccgcaggactggagtgctttgacggttgtatatttggatttctcacagcgcatcttaaaatcggtaatctcaccattttcgctgacaaccagagagttgcagaagatggtcggatagccaagtttcttcatcagaggtccggcaaactgggagaaggtatcgctgatgatgattacctgagtgatttcttttaatttgtctaaaaactcccttgcgcccggaagcggatcaattttagagatcgtttcctgaatttccttgagtcccagtccgtgctcgcgcaggatgtttaaacggtaattcatcagtttgttataatccggctcatcgcgggtggtgcgttttaactccgggattccggtttcttcagcaaatgcgatccagatttccggcactaatacaccttctagatctaaacatacaatatccatgtctcctcctgtctgatacaacgcctgtcagcgctgtgttcggttgaaaaatttgctttctattatagacgaaatgcaggggaaataccagagaaatttgagaaaagatgaaagaatagaaaaaagtgcgttactgggcacgtatgcgtgaacagtaacaaaagtgccaattattcgcggtgagaaagattcagaagtgaagagttggcatcatatagcagcagagtggttatcaatagaattaaaaaataccaaaaaagggagtctcttttcgtgagcgagagactccctttttggcacctatagtcgggttataatttgattttgatgaaatcattagcaatgcgccggtttattcatttcagatcttttatcgttttctgtcttcgaagcagtcgatttcgaaaacagtactttaccggaatgaaccacaataatgacacccagaaccatcagcagaaccgcgatgataagctgcagtccttctaccataaagacagcggttccggcattgtaagcctttaccagtgcgatgcagcgctcaacgagtgcggtgaaggtaacgcacagcataacaaccagtggaaccagcagcgtgcggttttcacggccggtgacgcgtaagaagacgcacagggtgatgagaaccagggcgcttaacagctggttggcgctgccaaacagcggccagatgttggaatagccaatctgggttaaaatgtagccgcataccaaggtgataaccgttgcaaaatatttgttgcagagaagctttctccatccttcggcgtgttccatgttatcgacactgaacagctcctggaaggacatacgtccgatacgtgcaacggaatccaggcttgtcagggcaagtgcggagacgcacatcgtcataaagcactgggcagcgtaaactgggattccgaacatctccaggaatccggcaacaccggaggagaagatagcaaacggagtaccggctgcaggcgtgccatcagcggaagcggcagcaccggcaacgcacagagccaggacagccagtaaactttccaaaagcatagcgccgaagccaactttcggcatatccttttcattggtgattgccttggaggaagtacccgaggaaaccaggctgtggaaaccggatacggcgccgcaggcaacggttacaaacaaaatcgggaacaggtcaccggatttctcattgtggaaaccagtgtaaggcgccaggttcattgccggatgtgcgacaagcagtccaacgacggcaccgataatcataccggcaaacataaaggttgtcatcaggtcacgcggttccatcaaaagccacataggaagaacggctgcgaggaaaatgtaagcgaataccatgtaggaccagttcgccttggtggtaatgagcgggcagttcatgccgatgacgaaagcagctaccgtgcagacaagtccgagcacggtctgtttccagccatggaactgagcttttttctgaatcagtccaaatacaacggcaaaggcaatgaacaggagggaaatgcttccggctgcgccattgacagttgctgcggcggataagctggtcacgccgtctaccgtctcatatgcattgaatgtaccggcaaccatgtcggcaaatgctgcgattacaattaaagtaaagagccagcagaacagaaggaacagttttttgccggttttgccgatgtactgttcaatcagaagtcccatcgatttgccttcatttttgacgctggcgtacagggcaccgaaatcggtaacagcgccgaagaagatgccgccgaggatgatccagagaaagaccggaacccatccaaagacagccgcctggatcgcaccggtgacaggaccggcgccggcgatggatgaaaactggtgggcaaatacaacccagccatcggtcggaacatagtcctgaccatcttcttttgtgacagccggtgtcttggcgtttggatcaatgccccatttatgggcgagccatctgccgtagagcagataaccagccgccagacaacaggctgcgataactacgataactaatgtgttcataaagatacctccattcccataggtcaaatggtttttagtgtcccggcagtttgccggagtttcgggagcggggaaacaaaaaagcctctgtcctcctgaaacttttaaaagttcaagaagacggaggcgtaagcatccgcggtaccacttcttttaccggctgtaaagccgatctctcagccatatccatcattctgaatatgttcctctctaacggtaggaatccgaaccggattactggtatcctacatgcgtttgtccggtcagctcacaggggataacttccatcggcgttactgtctttcatcgcccgacagctctctgaaaacgtggaaaattggaaatcgtgtcctgctcaatgctttttacaagtacgaattatagacttttttgaaggaaagtcaatcgaaaaaatagccggaagtttgtgacagaaattttacaaatccgtcattttgacaaaaaaatcacaaccaagaaatttaacaactgcttatctagaagtctgagttactgtttacgcatacgtgcccagtaacaagtcggaagcattcctgtgttaaaacttcgaaaaaactggacacacccttattttgctgtataataggtaattgtcggttctttttagggctgacaattactttttgtttaaattgggaagaaaaagggagagtttgaggtatggaaaaaatacgtccaatgttgtttacaacattgaagaagtattccggcgcacagctgatgtcagatgtgatagcgggtatcatcgtagcgatcatcgcgctgccgctttcgatcgcgctggcgctggcttcgggtgtaggtccggaacagggtatctacacggcgattgcagccggatttgtgatttcatttttagggggcagccaggtacagattgcaggtccaacggcagcatttgcaacgatcgtggcaggtattgtggcgaagagcggcgtggaagggctggcagttgcgacgatcatggcaggtatcattctggttatcatgggattctgccattttggttcactgattaagtttattccgtttacaatcacgaccggctttacctccggtatcgcggtgacgatcgtcatcggtcagttgaaggatttctttggcgtaacctatccggcaggcatggagacgatcgagacgatgcagaagctgaaagcgttcgcggctggattcggaagtgtcaatctgcacgcgatcatcgtcggcgtggtgtgtctggcgattctgatcgtgatgccgatgatcacggaaaaaattccgggatcgctggtagcggttattgcaggtattttaatggtaaaattcctgccgctgcatgtgaatacgatcggcgacctttacacggtcagcaacaagcttccggcgttccgtctgccggtgtttagctacgatgtgattcagggttccctgtcggatgcgtttacgattgcagttctggcggcgattgagtctctgctttcctgcgtggtagcggacggcatgatcggcggaaaacaccgttccaacacggagctggtggcacagggcgcgggtaatattatttccgccctgtttggcggtattccggcgacgggcgcgatcgcgcgtaccgcagccaatgtcaaaaatggcggccgtaccccggttgcaggcatggttcatgcggttgtcctgcttctgattctggtagttctgatgccgtgtgcaagctggatcccgatgccgaccatcgcggcaatcttgtttatggttgcctacaatatgtgtcagtggagaaccttcgtccgtctgaccaagacggctccgaagagtgatattgcggttctggtgatgaccttcttcttaaccgttatcttcgatctggttgtagcgatcgagatcggtatgctgttatcctgcctgctgtttatgaagcggatgagcgatgagacgggcgtcagaagctggctctatgtcgaagaagtagaggagcagaagcgcaaagagcaggaagtaagaaaagcgaaaaaagccggaaaagagctttcagtggaagaggcacagctcttagcggcagctgcagaagatgaagaagcagccatgaaagaacaggcacgtttgcgggagattccgagagaactggctgtttatgagattacgggaccgctgttcttcggtgcagcagaccgcatcaaccagattgaaacccgcgaggagacgaaatgcctggttcttcgtatgcgtgccgttccggcggttgacagtacagcgatgaattcgatggttgccctctatgagcgctgccagaagaacggcgttacattgattttgtcccatgtcaacgagcagccgatgcacgtgatggagaaggcaggatttgtggatatgatcggacgcgctcatttctgcccgaatatcgaggcagcacttgatcatgcggacgaggtgctggggaaataattatggacatctatcggagaatggaagaagtatttaggcgcattccggacggctgcgtgacgacttacggtcaggtcgcgctcctgtgcggtgcgccgcgccattcccgccaggtgggatatgcactccgcaccaaccgcctgggcgatgtcccggcattcagggtgattaattccaagggctttctaagcggcgcggcggcattcgactatccgggacagcagaaaaaactgctggaacaggatggaatacgggtggactccaccgaggacggcgaccgcgtcgatttgaaacaatatggatggaaaccttcgattgacgaggcagaagaattgtatgcgttgtttcggaagttggggatctgagtgggaatcaaggaaaatgcatctgaatgagatgttggtaagctaaagaagtgaaatgagatggataagatggcagacgataggggctgcatcttatccatttttaatagacatttctgaccgtttattattaaattgcctccgcgatctgccgtgccacatagacaccgctggcagatgcatgggaaagggaatgggtaataccgctgccgtcaccgatgacgtagagtccatcatgacaggtcatcaggttgtgatccacttccacctccatgttgtagaattttacctccactccatagagaagagtgtcatcattcgccgtacccggtgccaccttatccagggcataaatcatctcgataataccgtccagaatccgttttgggagaaccaggctcagatcaccggcagccgcattgagggttggaaccgtaaaagattcattgattcgctgctgcgtgcttctttttccgcggatcaggtctccaaaacgctgcacaattacaccaccgcccagcatgttgctgagttttgcaatactctctccatattcattggaattcttgaagggctctgaaaaatgtttcgctaccagaagggcaaagttcgtgttatgggtctgctttgcaggatcctcgtagctgtgaccatttaccgttacgatgccgttggtattctcatttaccacagctcccttgggattcatacagaaggtgcgcacgtaatcctcgtatttttccgtacgatacacgatcttactctcatagagttcatctgtaagatccgaaaagatctcagccggcagttcaacccggacacccagatccacacggttggaattcgtatggatatccaggtccctgcataccttctgcatccacttactgccgcttcgtccggcggaaatgatacatttcgtaccctcaaaggctgtatcatcgctgtaaaccttgtaacccttctcggtcttcgccacggtttcgatggcacagtcaaaatagaaatctaccttatctttcagatgatcatagaggtgctccagaacaatataattaatatccgtacccagatggcggaccgaagcatccagaagatgcaggccgtgctgcatacaggttttcttgaattttgttcccgcagtggaatacagcttcgtgccctccccgccaaaacggagattgattccatccacatattccatcagttcaatggctgtcttttttccgatatactcatagagagtgccgccgaaatcattggtaatgttgtattttccatcagaaaatgcaccggctccgccgaatccactcatgatggagcagcatttgcagtgaatacaggacttgattttatcaccatcaatgggacatttacggtgctccagcggatgtcccacctcaaaaacagcgatctttaaatccggtttacgttccatcagctcataggcagaaaagataccgccgggaccggcgccgataattaacacatcatacatattgaaattctccttgttttcctaaaatttgattccctctttctgtattatagcataaattcgaaaaaataggcagcgcgtcatgcgctgccccgaaacagtatcccccatgtcgtcatggcatcttccgttatcatatcatcacctcagaataaagctttttttatggctgtaaccatcagcctgattccctttgtaaaattaccggaggtgttttcgagcctgatgacctctccggtgattcttggcaaagggctggcgttgggacttgtatctaccttttttccgtttgtaagctacacactgggactccgccagatggaggcaggaaaagcctcggttttggcgtttgctgagccgatggtggcagctgtggctgggattgtggtatttggagaaatgctgcgggttgaaaatgtgctgggcattcttttgatttttacggcattggtggtgttgaacagccggaacgtaaaacggtaaaatcaggggctaatcgataatggaactgtgacgaaaacacggatcacaaatcttaaacggatatccaaccggcagcatccgtccgcagcgctggcagcgggcgatatagctttttttgcccttggacaaatactgcatgatcgtgccttcagtgcggctgcgttcctgttcgagccagtcctcgtcgatgatcttgtcaaaacggtgggagaactggtagtagaggtcgagcttgcggtaatatgtttcgtatttctgcagccccagcttggagccggcgcctttgtccgggtgtttcaggcgcttgtccgccgggtaatccttgcagtagcgcagccattgcaggacaacctgatgatccttgatatcgatcggacagctgatcatacggtagagaatccgtttgtcatcgaatccgtagatatcgtctctgtagcgttctgcctgcgcataaaggcttaaaatctcatcgacgctgaccttttcaaacggaggcgtcggctcaacggatttccagactttgatgataacgtccagcggctcgtccagatcgaggagaatctgtgggaaaccgaggctgactttttcgattggttcttcctcctgagtaagctgttcccggatataatcaagggattcctgccccatcgcgttgacgtagccggtgtcaaagagtccgaagcgtccggcgcgcccggcgatctgcttgacctccggtacggtcagaccgcgccgggtggtaccgtcaaatttctgggtctggacgaatacgatacgccggacaggtaggttgagtcccatgccgatcgcgtcggtggcgacgaccaccttggttttgccgctggtaaaaagctgcatctggcgtcggcggatctccggcggcaggcttccatatataacacttgccttgataccttcttcttccagacggcccgccacatccagcacagattttttggaaaatacgacgagtgcatcgccgggaagaacactttccgggaaggaaaatggcgtgtcctcacagatgagcgcagttttgcgctgataccggcagatggcaaggctgtcgccgcacagatggatcaggtgtgtgacagcagattcagcggcgggactcatgcagacatggatttcgtgagctttcagtcccagaatcgcctttgtccagcaatgcccgcggtctggatcggcggtcagctgcgcctcatcaatcacggcaatatcgtattcctcggagaaatctgccatctcgatcgtcgaagctgtgatccggctgtcatcgtcggcgatacactcctgaccggtcagcatggtgctgggaacgccgcagtcgtgcattttttcatatacctcaagcgccagaaggcgcagcggaccgaggtaagtgccctttttcgctgtttttaagcgttccagcgcgtgaaatgttttgccgctgttggtcggtccgatgtggagaatgaaacggcggttcatcgccatagtctccggaaattccagctctgggcgggatgggacgagatccatgattttatactggatgacgtagcgcttatagatctggtaaagctccagaagtgtctgcgtgcagagctgaccatccaattctgtttccagataattcagaaaatccacggaaatatcatcgcgctgggcgggcagaaacattgcctcatccaggcggatgagctgtggcagcaggctggtttcaatgagctttgtgacagcatcgttgtgcgaacggtacgcaaaataagccagatttttgatctggcggtgccattcctccagcgagaggctggtgacctgtgtcggtttggtgcgtttcagtgttttaaacagccggttggtccgctcgctcagatcgcgggggcgggaactggtctttctttttttcttgcttgccgcctgatactggcggatatatgtctgaagaagctggtttggctcgatcatttgaaagtctcctctttatgtaaatatcctgtccgataaatcttctggtttaaagcttcatttgatataggaatgtttctattatcgcagaagttgcatggatgtgcaagaacgggaaatcagattgcagaaaaatataaaaatatttgatataataagaacacttagttaaaacagaaaggtcaacatctatatggcatcaaactataaaacgggcgccagcctgaatttaactcccttcgaaatgcagcttctaagccgcagccccctgtttcgaggcgcgggcgaatccggaatcggggagatgctgtcctgtctgggggcggaggaacgcagttatgaaaaagaagaaatgatttatcgcgcggggaatacggtcacatctctgggtgtggtgatgcacggaagtgtgatgattgtcaacgatgatctgtggggcaaccgcagcattctagaccgggtagaaccgggacagatttttgcggagacatatgcgtgcgtgccgggggaaaagctgctggtcgatgtgtttgcagcggaggtgacggaagtgctgtttttaaatgttggaaaaatgctgtcgcagtgtcccaattcttgcggacatcacacgcagcttatccgcaacctgcttgcaatctcggcgcagaaaaacttgcagctgtcccgccggatcttcaatacatcgtcgaaatccatccggggacggcttctgtcgtacctctccgatcaggcggtaaaaaatgagagcgagagatttgatatcccattcaaccgccagcagctcgccgactatctgggcgtggaccgatcggcgctgtcggcagagctggggaaaatgcagcgggaagggcttctggaatttagaaaaaatcactttcatttatatgaagaggttagaagcttgtagattacaaacaaaaataccctgtcaggagcattaaaatccgaccgacagggtatttttagtgaaaatccctatgggtgtaacaagaccggctgtccattccctatactttcctgcaccggctgtttcagcatatccagaaatgcctgtgccgccggcgtcagcgggcgcatcgggttttgcaagacgaggatctggcgcttcgggataggaatatttaggtgaagctggaacacgcggtagttgagcaggtagttccgggcaaattccgagggaacaaagccgattcccagattgtgggagacggtcggggcgatcaggtcgttggaagaaacttcgatgctcgggtgcagatccagcccctgttcctcaaagagattgtcccaaaaaagccgcgtcgtcgtgccggactccatgctgacaagtgggtgcatacagagctcttcaagggagagtgtgcggttctgcagctcggaaaaacggtttccggcgatgacgatgtcctggaactcggaaaccggcatcacgtgaaccagatccagctccttcatgatctcgtggatcggagaaatgatgacggcaaagtcattttccccggcctttaaggaagaagcggtgatcggcgcagagttggaatgaatctgcacggtcacattcggaaaacgctgctggaattgttcaatataaggaagcagaaagaagcgcattgtcagctcgctcgcaccgatcgaaaccttgccgctctgactgttcgtgtattcttttaaaagctcttccgctcgtcccatctgctggcagggacggttgatctggcggaacaggatccgcccttcatcggtcagggtcacgcctttttgggagcggttgaaaagtttgcactgaagcatatcttctaaattatgaatgtattttgttacggttggctgcgtgaggcagagattcaaagccgcctgggtaatattctggcatcgagccacctcatagaaaaccttgtagtagtcgaaactgatgtccatgtatgtagttgaaatcctttctgtatgtcggactgtttctgcctgattgaaacagtgtttatctgattttatatctgtacgtgtatttaccaaatatagtcacactttatcgtatttttccagaaatgtccagccacaataacgattaccaataactatcaccattcattttatctatggatataggaaaaaaatataattttaccatttgtatttctgggagtaagatcgggaacagacgggaagaatgtggagacacaggagaaaacgttactggacacgtatgcgtgaacagtaactagaacacgtggcggcatcgggaaatgaaagaacaatagccggggcagccgcgggagaacaacccggagagaggaagtgacagtatgggagatctgggtgcgaccctgatcaaggaattgaactgtgagacagcctttacaattggcgggatcggcatatcagaatccgttgtggttacatggatcatgatggcagtggtgctcgtggtttcactgattgtgacgcacggtctgaaagttgaacatcccggacgcggacagctccttctggagaacgctgttacgtggctgcagggcattggcgagggaatcctcggagaggaaggaaaaggctatgcgccgtatctgacatccgtgctgatgtatctgggcgtggcgaacctgcttggtatactgggattcaagccgccaaccaaggatttgaacgtcacggcagcactggcgctgatgagtattgtgctgattgagacagcagggattcgggtcaaaggtttaaaaggatggttaaagagctttacagagccgatcgccatcgtgacaccgatcaatatcatggaggtatttatcaaaccgttgtcgctgtgtatgcgactgttcggaaacgtgctgggcgcgttcgtcatcatgaaattgattgaatacatccttccggtagggcttccggtattgttcagcgcttactttgatatctttgacggtctgattcaggcgtatgtatttgtcttcctgacagggctttttatcaaggaatcaatcgagtaatagaagagaaatagaaaattacaaaaaggagactttattatgggtacaatcattgcaatcggagcaggtctggcagttcttgcaggcgcaggagccggaattggtatcggaatcgccacatctaaggcgactgaggcagtcgcaagacagccggaggcagagggaaaaatcacaaagattctattgttaggtgcggcacttgccgaggcaactgctatttatggtttcgttattgcccttttgattattattcttttaagctgatacgatagaaaacgaaaggtggggcaaggctatgttacggttggacatcaacctggtttttacgatcatcaaccttttaatctggtatgcaattatccgtattttcctctttaagccgatcaacaaagtgatcgataaacggaatgcagccattcaggaaaagtatgatgaggcaaaaaaaatgcaggaagaagcgcaggcggagaaagagaaatacgcagcctgccaggatgaaatagaagcagagaaaaacaaggtgctggatgcggcgcgtgcgagtgcacgtgaggaaggacgccagctgattgaaaacgcccagaaagaggcagataaagtcgtccgtaaggcgggcgaggatgcacgccgggagaaggacaagatgctcgaacaggcgaagcatgaaattttgtcgctggttctggacgcggcggctggttcgatgaacaagaagtcggatgacagcgctctttatgatgagtttttgaagaaagcgggtacgacggagaatgaagaaacttgatgtctatttacaagaaataaagaggcagaagatttctgtcgatgatctgcagcatgcggctgagatactggctgcgacaccgcagcttccggcagagcttgaaaatccggatttgacccgtgagaagcgggaagatctggttcgtagcctgtttccgctggcagtccggggaatcatcgaggtgctggcacaggatcagacaatgaaaatgatgccggatctgattaaggaagcggagacgtttgaaaagccggataaatatctgcgctgtgtgctggaatatgtcaaagagccggatgaaaaacaggcagccggaatccggaaatttctctcggagaaatatccgggacgggaactccggattgtgaaggaagaaaagccggagcttggaagtggttttatcctccgggtcggaagtgaggaatatgactggagcacggagggaagaaaacgggcactggcagataaattaaagaatctggtaaaagagccggattcgggtgatttccttacccagaagggaatcatcgggattctgaaaggaaatctggatggaatcgacatttcagcccgtgagatcggtacggtcagccgggtgggcgacggcatcgcctatgtggatggaatcgaccacgcaatgtatggcgagatcgtggcgtttgacggtgatgtgagaggcatggtacaggatatccggtcgaaggagatcggctgcatcctctttggacatgcgaacaccatcggagaaggaagccgcgcgatgcggaccggcaagatggcaggtatcccggttggcgagggatttttagggcgtgttgtagatgcgctgggcaatccgatcgataataaaggtgagattgaggctgccggataccgtccggtggagtccccggcgccgggtatcatcgaacgtcagtcggttgataccccgatggagaccggtatcctctcgatcgattcgatgttcccgatcggacgcggacagcgtgagctgatcattggcgaccgccagaccggtaagacctcgatcgcggtggatacgatgctgaaccaaaagggaaaagacgtgatctgcatctatgtggcgatcggtcagaaggcttcaacggtatcgagactggttcatacactggaaaaacacggggcgatggagtacagcatcgtgctggcagcgacggcgagtgatccggcgtccttacagtatatcgcgccgtatgcaggaacggcgctggcagaatatttcatgcatcagggaaaagatgttctgattgtctatgacgatttatcgaaacacgcggttgcgtaccgtgcactgtctcttctgatggaacgttccccgggacgtgaggcatatccgggcgatgtattctatctgcattcccgtctgctggagcgctcggcgcggctttcggatgaactgggcggtggttcaatcacagcgctgccgattgtcgagacacaggcgggtgatgtgtcggcgtatatcccgaccaacgttatttccatcacagatggacagattttcctggaaagttcgctgttcttcgagggcatgcgcccggcggtcaatgtagggctttcggtatcgcgtgtcggcggcgcagcgcagaccaaggcgatgaagaaggcagccggaagcgtgcgtatcgacctggcgcagtaccgcgagatggaagtatttacacagttcagttccgatctggatccggcaaccaaggcacagcttgcctacggcagcggtctgatggagctgttaaaacagccgcttgagcatccgctctcgatggaagaacaggttgtgattctgtatgcggcgacgagccatctgctggtagatattccgaaggaaaagctgaagacattccagggcggtctttacgaatatatgagaagctcctacccgcaggtgggcgatgcactccgcacgacgaagacactcagcgaggatatccagcgcgagattgcgaaggcggtgggcgagtacaaggcaaaattcctgaaagcacagggaaatgcgctggaggcagccacagcggatgcaaaactggataagcagtaaggcggtgatggaagatggcaggactcagagagatccagaaccggatccggagtattcaggatacgcgcaagatcacgaacgcgatgtatctgatatcttcgacgaaattaaagaaagccagaaaagaactggcagagacggagccgtatttctatgcattgcaaaatgtcatccggcgtatccagaggcatctgccaaacatggaaagcccctattttgaaaaagaaggacaccagtcgaaaaaaacggggctgctggttatttccggcgataaagggctggcgggtgcttataaccataatatcatgaagatggcggatacatttttaaaggatccttcccgcgaggtacatctgtttgtcatcggtgagacggggcggcagttttttgcctcccagcacatcccgattgaagaaaatttccagtatacggcgcaggatccgacgtttaaccgggcaaggtggattgctggaatgcttctggaacgatatttgtcgggtgatttggatgagatccatgtcctgtatacaagaatggaaaatgtgatgcagagtgtggcgaaggataaaagggtgcttccgattaccaagccggatatgcacggaatggcgattccggtcgatgtgcggctggaggagttttccctccggccaacgccggaggaagcaatgaatgcgatcgttccgaactatgtagccggatttatctacggcgcgctggttgagtcgttctgcagcgagcagaatgcccgtatgatggcgatggatgcggcgacggataatgcggatgcacttttaaaagatttgaatacgatgtacaaccgggcgcggcaggcggcgatcacacaggagatcaccgaagtatgcggcggcgcggctgcacagagacgagaacgagaagaggagatgagagtgtgatgggagaacaggcggcagagacaaaaaagaccgaaaccagcctgccggaaggcaagattgtccaggtttccggtccggttgtcgatgtgaaatttgagagcggtccccttccggagatccgggacgcgctcacagtagaaaatcagggaaagacgtgtgtgatggaagctgccaagcacatgggaaataatatcgtccgctgcatcatgctgtcggcaagcgagggcttgagccgtgacatgaaggtaacaccgacgggagaaggcatttccgttccggttggcgaaaagacgcttggacgtttgtttaatgttttaggtgagacggtagatggaggagaaaagctggatggtgaggagcactggtgtattcaccgggatccgccgccatttgaggatcagagcccagtcgcggagattctggagacgggcatcaaggttattgatcttctggcgccgtattccaagggcggaaaagtcggtctgtttggcggcgcgggcgtcggaaaaacagtcctgattcaggagctgatccggaatattgcgatggagcagggcggttattctatctttacgggtgtcggtgagcgttcccgtgagggcaatgacctctggagtgagatgaaggcatccggtgttctggaaaagacagcgctcgtgtttggacagatgaacgagccgccgggagctcgtatgagagttgcagagaccggtcttacgatggcagaatatttccgtgacaaaatgcaccggaatgtgttactatttatcgataatattttccgttacgtacaggcaggttcggaggtttcagcgctgcttgggcgtatgccgtcggcggttggttatcagccaacgttagcgaatgagatgggcgagctgcaggagcggattgcctcgacgaaagatggttcggtcacttcaatccaggcagtctatgtaccggcggatgatttaaccgatccggcaccggcgactacctttacccatctggatgcgactacggttctttccagaaagatcgtagaacagggtatctacccggcggtcgatccgctggaatcctcgtcccgtattctggaaccggatgtggtcggagaagaacactatgagacggccagacgggtgcaggagattttgcagaaatacaaggaattgcaggatatcattgcaattctgggtatggacgagttgtctgaggaagataagctgaccgtcggccgcgcaagaaagatacagcgtttcttatcccagccgttccacgtggcggagaactttaccggtgtaccgggcaagtatgtgccgttaaaggataccgtcaagggctttaaggcaattctggatggtgagatggatgcgtacccggaggcagcattcttcaatgtcggaacgatcgaggatgtagtggcaaaggcgaaggctttagagaaacaggaggcgtaggaacggatggcagattttcatgtaaaaatcatatccagcaaccggacattctatgagggagtctgccactgtctgatccttccggcggtggacggtgagatggctgtcatggcgcaccatgagagcgagatcgtggcagtcaaagcgggagaaatgcgtttccaggtaacagaggacggtccgtgggaggcggcagtcgtcgggcagggcttctgtgagatcgccaacaaccgtgttatgttgctggcagatacgatcgagaaaccggaggagatcgaccggatccgggcgcaggaggcattagagcgtgcgaaagagcggctgcgccagaaacagagcatttccgagtattacagcacccgcgcggcgatggcgagagcgctggttcgtctgaaagagacggaaaaatttgtggactaggtgcgttagaggcggatttgagcctgatgtaattttgtggcagatgcggttcagaaagaaatgacagaaaatcagtaagaatggagaacagggcatgacattacttcagttaaaatacgtggtggaggtggcggcagccggaaccatcagcggggcggcaaaaaaactttatattgcacagccgagcctcacggcggcgatcaaggaactggagcatgagattggattttccctgtttacccgcacgaacaagggcgtggtgatttccccggacggggaagaatttctggggtatgcgagacaggtgatcgagcaggcaaacctgatcgaggagcgctattttggcgctgtgccgcagaaacgccagttctgtgtctccacccagcactattcctttgccgttgaggcgtttgtcgatctgatccgcgagtacggcggagaagagtacgatttccgtatccgcgagacgcagacgtatgagctgattgaggatgtggcgaagcttaggagcgaggttggcgtgctgtatctgaaccgttttaacgagacggtgatccgcaagacgctgcgggaacacgacctcaaatttacgcggctttttatggcaaaaccgcatgtatttatcggtgcggccaatccgcttgcaagccgcagttctattaccctgtcggatttggaaccttatccgcgtctgtcctatgagcagggcgagcacaattccttttatttctccgaggagatcctcagcacgctggacagccgcaaggacatcctggtgtccgaccgcgcgaccctgtttaatcttctgatcgggctgaatgggtatacgatctgcagcggtgtcatcaatgaggaactgaacggaccgaatatcgtggcgattccgcttgatgtggacgattatatggagatcggttacattacccacaatcgcgtgacaccgggacggtttgcgggactgtatattgaggcgttgaagcggagagtgggagtgccggttcccaaagtgtctacccgtgaaccaataaccagaattcctgtttccgacaggtgattttttggtttgactttttttaaaacaggaaatataataataccgaaacgagtagcaaacgagcgtaaatccagtttttgctgctcttttttttattattccataaagaatgtgccaaggtgcattttttattaaatttcataaaaatgccattaaaaagtgtgttgcaaaataaatgcttttgaaataaagtcttccggaatgggaaaacatgagtcaatccgagagtcttacagaaaatattcaaggaatgtgcataacctatatttgctgtcacagaaagatgtggggaaagaggaaaatttattgttgaaaccgttttatttgctgccatttttaatgtgacaaatcgcaatcttttgccgaagatagatttatatggaaataggaacgaaatcggaaagaggatgatagaatgcggcagaatagaggaatgatttcatgtcagcgtccataatcagcacttcctttttgtaagaaatgtggtatactcgatagaacatgaaaaccatattaaaaaggtgaaaagcagaatgaatcatatttcaattacaaccctggaagcgccggagctggatatctacgcccggctgagcgaggggcagttatttcattataatgaaccaaaggaaggtcttttcattgcggaaagcccgaaggtcatcgggcgggcgctcgacgcgggatatgagccggtttcttttctgatggaagaacgccatattgagacagaagggcgggagattctggaacgcccggagtgtgcgggagtgcctgtgtttacggcaccatttgatgtgctgacgcgcctgaccggctttaaactgacgcgcgggatgctgtgtgcggtgaaacggaagaaaatgccggggatcgaggaaatctgtgcaggtgccagacggatcgcgattcttgagaatgtagaaaatcctacgaatgtgggggcgattttccggtcagcggcggcgctctttatggatgcggtgcttttgacaccgggatgcagtgacccgctgtaccgccgcgcaagccgtgtcagtatgggaacagtgtttcaggtgccgtggacgtacattccgaagggcgactggacggagaacagtatggaaacgcttaagaagctgggattttgcacggcggcgatggcgctcagtgaccgttccgtgagtatcgcggatccggcgctttcgcaggaagaaaaattagcaatcattctcggaaccgagggtgacgggttggcggcatcgacgatcgcggcgtgcgattacaccgtgaaaatcccgatgtcacacggcgtggattcgctcaacgtggcagcagcgagtgcagtggcgttctggcagctgggcatgggaaataggaaataaagttctggctgtgtaaaaaaaatgtacattggttaaatgcgtttcaaatgccagaaatgagtgcggaaatggatggaaagaatcgtttggaggaaggagaaaatagaatgaagtgtccaaaatgcggacaggaagcagttggaaatttttgcagtaactgcggaactccgcttgtaaatgatacagtacgccgagaacaggaaacggtgggaagaaagccggaaaatagctatgacgacggtgattcagaacagcggaatccagctcggatggaatcggatgagaaaaaggcggaatccggctctggatcgaaacgaaacagtcaggaaaagcggagcagccagagtcaggacgcacagaagcgtgaggaagagcgccgcgacaatgaacgctgccaatcccaggcacaggaggatgcccgccgcgaccgtgaagcggcatcgcgcagacgacaggacgcgagacgttcttcttccagcgcgaaagaggataagcgggatgcaaaacagcagaagcagatggaaaaacgccttcatgctctggagtcggagcgggagcgctcagagcgtcagaaaaatcggatggagcgcagccaccagcgggaactggaacgccagtcccgggaggcagagcgcaccagacgggcggcggagcgcagtgaggcacatacgcagagtgactcaaatgacggtccgtccgtgctggatgtgacggcagccggagtaaccggcgtggttgtgctgatggcgcgcgtgatgcaggcagccagttttcttctgatggcgggaatcacctgggcgaatgcgaaggcatttcggtatggcggcgacgatctgggctatatcggaactatgattaccgaggaaaattatggtctgggactctatgtagggattggcgtatttctggtactgatgggcgcgatctggtgcttgtggattctgtcaggcaagcacgcgggtggtaaagtacggctgcaaaaatacgatacggggcgcggatttatcccgtttataatcatccttgttctggtattagtagccggtccggcagcgtacctgatgccgaagaatgcgggcagcttacagccgattgtagacggcggctatgcggcgctggaggcgatcaatgcgaaccacggatttctgctgttctgcagcatcggaggcgcgatcctttcgtttatccggaaaatgctgctggtataattttataattcatctaattgcccgaactgataccccatttcctcccattttgccagaagttcatcgagaatctgagcgttggtctgcgaagtgctgtgcagaaggacgatcgcgccggggtggatgcgcgtcagaagcttggaaaatgcttcttctttggatggctgctgatcctgcatccagtccacataggcgagactccagaaaaaggtcttgtagccgagctcctttgccatctgcaggttcgattcactgtatttgccctgcggcggacggtaatattttttcattgtctgcccggtgacggactggtagagtgtttccagggcagtcagctccttttcaaatgctgctttgtcggaaatgcgggacatatcgggatggtgatacgtgtggttggcgacggtgtgaccctctgcgatcatctgttttaccagttcaggactggtttcgagatagttgccgacgacgaaaaaggttgccgggacatggtgttttttcagtgcttccagaatggcaggtgtgcagccgttttcatatccggcgtcgaaggtcagatagatgacgggcttggaggtatcgcctacatagaaagcatcaaaattttttaaagtgtcggcggaggcattgccgaccggtgtctgccctggactgggaaatccaagtccccagtttccatctgcggaaaccggaatcgaaccggaatcaaaggcaggcgggagcgagccacaggcgataacaggcgctgaaaccgtgtgcccggatggacggcgcaggaaatgtgcggcagtctgcccggcgaagaaagcgatggcaaacagggcgggaaccagcagcggggaaatgatgtgccggaaacgtgatggaacaaaatgcatgggaaaatgaatgaacatgatgtgacctgaaagatatattttcataaatatatgaaagaagggggaacatcatgtttttattataatttgctgtccgtgaaatgcaccgaatcggaaaaaccaagcggtaccatataacaaattttatgtgctgacataacaaattaatgcttgtcatgccctttgtacctatgttattattataacgatgcttagatgagatgctccgaacccttgaacaaggggagctggatgaaaagcagaccatgaaattatgatgaaataaataagagaaacaaggaggatgttgaaggatgaagccttatagcgagatgacgaaagaagaacttctggaacttaagcgtgatctgagcgatcagtaccgggagtttcagggcaagaatctgacgctggatatgtcacgcggtaagccaagtgcagagcagcttgatttatcgatgggaatgatggacgtactgagcagcgacagtgatctgacctgcgaagatgggacagactgccgcaattacggcggtctggacggtatcagcgaggcgaaggagctgttagcggatatgatcgaggttccggctgacaatatcattatctatggaaactccagcctgaacgtaatgtacgacaccatctcccgttctgtgactcatggcgttatgggaaataccccgtggtgcaagcttgacaaggttaaattcctgtgtccggtaccgggatatgacagacatttctccattactgaatattttggcatcgagatgatcaacattccgatgaccgcagatggtccggatatggatctggtagagcagtatgtgaccaccgacccgaccgtaaagggaatctggtgcgttccgaagtactctaacccgaccggcaattcctactccgatcagacggtacgccgtctggcacgcatgcatccggcagctccggacttccgtatttactgggacaatgcttatggcatccaccatttatacgatgatgagcaggatcatgtgctggagattctggcagaatgtaagaaagccggcaacccggatatggtttacaaattctcttcaacctccaagattacgttcccgggttccggcattgcggcaatcgcaacctcccacaataacctggatgatatcaagaagcagttaaagattcagactatcggtcatgataaagtgaatcagctccgccacgtgcgtttcttcaaggatatccatggcatggtagagcacatgagaaagcacgccaacatcctgcgcccgaaattcgaggcagttgagaatattctcgaccgcgagttaggcggactggagatcggtacctggaccaaaccgcacggcggctacttcatttcctttgattcactgaacggctgtgcgaaggagatcgttgcgaagtgcaagaaagcaggcgttgtcatgaccggagccggtgcgacctatccatatggaaaagatccggaagaccgcaatatccgtattgcgccgtcttatccgccgctgcaggatctgatcacggcaaccgagctgtttgcactctgcgttaagctggtcagtgtcaacaagctgttagaggaaatgtaatagcaggagtaactgtaaatgcagaagacagttacgtttcaatcataaaactgccggatcagagtccggtgcgttacagaaagtacaggaattgtatggggatgtcgaaggaccgctgcccatacaattcttttttcggagaaaaagtgatgataaaggaaaagttatccctgatctgggggaagtttgtaaacagggagacgatatcgtatctgatattcggcgttctgacgacgctggtggactggatttcctatgcggttttccgccacaacggcatgaactaccgtatggcgacgatctgctgtcaggcggcggcgatcctgtttgcatatgtgacaaacaagatctgggtattccgaagctacaatttccgccctgtatatcttcttaaggaaatggcttcgtttttctcctgccgtattctcacatcggtgttcacgtatgtggcgatgatcgtgatggtagacggcatgggaatcaaacaggatatgatctgtaagattgtggtatcagcgatctcgctggtgctgaattatatttgcagtaaattatttattttcaaaaagaaagaatcctcgaaatagggctgtgtggggaaatgacagcggaaatggatgctgaagacagaccggaaaagccggaaagagtagagaaaacgccgcctgaacaggattctggatggagggaagatggagcaaagagaacgagacgaaagttccagtaaactggaagaagcactcagggagcttacgggagcggagacaacggggaaaatagaggagtatgagaacgagcgggaaggtgcggacgtggattcggagaccgcctgtacagatatgagacgcgctgaacgaatgccggcctggagacaggaagaagatgccagaaaatctaaactttcagagtccagagcagatgtcgttaatgagttgaatgatgatgactgggagcaggaagaattagatgaattagatgagtgggatgaaccagcgaaatcaccccgcggaatgggccgcctggctgcggttttccgtccgtcggatgatctcctggcggcatttttcctgccggtggtgattttgatcctgatttttgcataccgcggtattttcccttttgggcaggaaagcttcctgcggacggatatgtaccaccagtatgcgccatttttctcggaattccggcataagcttttaagtggcgagagcctgctttacagctgggatgtcggcatgggcgtaaactttgccgcgctctatgcgtactatctggcgagcccgttcaactggctgctgctgttatgcccgtcgtccctgattatcgaatttatgacctacatgatcgtgttcaagagcggtctggcgggtctttcgatggcgtggtatctgaaaaagcacacgggttcgcagaagtttggagcgtgctatttcggcgtattctatgcgctgtccggctatatggcggcgtatagctggaatatcatgtggctggactgcatcgtgctgctgccgctgatcctgcacggcctggagcggctggtgcgcgaaaaaaaagggcttttttactgcctgatgctgggactttcaatcctgtccaactactatatatcaattatgatatgtctcttcatggtgatttactatgtggcgctcttgtttctggagaaacggccgggatggaaagattgtctgcacagctttttcctgtttggtgtgtattcgcttctggcgggtgcgctggcggctgcggtgcttcttccggagattgcggcgctgcagagtacggcgtctggcgattttaattttccgaccacactggaaatctacttcccgatctttgacatgatcgcgcggcacatcggaaatgtacaggtggagacgggactcgaccattggccgaacctctactgcggcgtggcagtctacattttcatggggttgtattttttgaaccgccggattgcgatccgggaaaaggttgtgtacggtgtgctgctgctctttttctatgccagcttttcgttcaacgtgctgaattttatctggcatggcttccattacccgaacagcctgccgtgccgccagtcgtttatctatatcgtgctggtgctgacgatgtgtttccgggcgtatctatatctggatgaaatatccaaacggcagtttgccggggtgacatccgccgcgattggctacgtgattctggcagaaaagctggtgacggacgatgcgtttgagccagttgtctggtatgtggcagtggtgcttctgctgctgtatctgggcgtcttttatttctatcaaaataaagaacatttcgcgttcacggcggcgcttctggcgatggcgctggtaagtgtggaggcgcttgccaatatggcggcaacgagtattccgacgacgagccggactgattatgtggcagacaatcaggatgttgcagcggtgacagagccgctcaaaaagacggaattttaccggattgataaaacgaatgcgcgcacgaaaaatgatggcgcgtggatgcattttccatccgtatctctgttttcatcggtggcaaatgccggggtgacggatttcttcaaacagatgggctgcgaaggttcgacgaacgcatacagcatcgtgggaagtacgccgctggtggattcgttattttcaatcaaatatgcactctatgagggcaagcaggacaatccgcgcctgtcgctctatgcattttcaggtgacacgtacctctatgagaatccgtggacgctgccgctcggctttatccttccagatatagtggaaacgggctggaagcgcgatctttcttcgccagcggatgtccagaatgatttatcggatgtgctgggcgtgccggagtgcctgattttcacggacggggaggagcaggggaatcgtttttcctttacagcaccggaggatggggagtattatataagtgtcgcaaaccgtcagattgattcggttaaactggatgtcggcggggagagccgcagcattgatacgttgaaacgcgggtatctggtggaaaccggatatgtgaaggcaggcacattgattctgctggagagcaatgacagtgccggaagcatggacgcgagcgcgtaccgctttgacgaagccgggctgcgtgcgctctatgagcgcctcaaccagcatccatttgaactggaaacattgggcgaggaggcgatgaagggcacgatcgacgcgggcgagggcggaacgctgttcctcacgatcccgtatgacgagggctggacggtcacggtggatggaaaagaagctatcacgcgtccggtctggaaggcatttaccggcgtggaactgacggcgggaacccatacggtggaactcaggtattatccgcagggactgcatgagggactgctgatcagcggaggtgcgctgtttgtgctggtggtgattgtggcttctatgtatataaggaagaagaagcatgggaaaacttctgcaaaatgagaagaacggtggaaaaagagccggatggcgatttaaaactgagaaattgagatacaaaatttatagaaaagaggttaaaatcatgaaaaagctggaagaatatgtaagaagcattccggacttcccggagccgggtattattttccgcgatattactacgattttacaggatgcagacggactgcagcttgcgatcgacggaatccagaaatccttagagggcgtggattatgatatcgtggttggtccggagtcccgcgggtttattttcggtgtgccggttgcatatgcgatgcacaagggattcgtgccgatccgcaagaaaggcaaactgccgtgcaagacggtatctgtaagttacgatctggagtatggcagcgcggtgctggagatgcatgaggatgccattaaaccggggcagaaggtagtcattgttgacgacctgatcgcaaccggcggaacgaccgaggcgattatcaagctcatcgagaagctgggcggcgaggttgtaaaaatctgctgcgtgatggagctggcaggcttaaagggacgcgaaaaactgaacggatatgcggtagatgccctgattacctatgagggaaaataggtaacggttcacgggcaggcacttttggaaccgaaagtgccgtaagaaaacgtggtggcagcaggaatttgccgtattaaaatgcgaagccacggcaaattccgttactgggcacgtatgcgtgaacagtaacaaaatagtttgccgttgcattttttgtcaaatattcgtataatagggatattctatataatattttatttcatttgcgtgaaccgctttccggattccgaacggcaggcgtttcagttatctacggaagggtcaggaggcatatatgggaaatttggataaaataaaaaagctggatcaggaaattgaagcgccggcggattttacgagtccggaggtactgtataatgagttgattgccgccattcgcaagtaccatccgtcggatgacatcagcatgattgagaaagcgtaccagatcgcgtatgacgcacacaaggaccagaggcgtaaatcaggtgaaccgtatatcattcatccgctttgtgtggcgatcattctggcggatctggagctggataaagagactctggtggcgggtatcctgcacgatgtcgtggaagatacggtcatgacagaggaggagatcacggcgatctttggcgaggaggtagcgcttttagtagacggcgttaccaagctgacccagatctcgtggacgatcgataaagtagagattcaggcggaaaacctgcgtaagatgttcttagcgatggcgaaggacatccgggttattctgattaagctggcagaccgtctgcacaatatgcggacgcttcaatatatgaagccggaaaaacagaaagaaaaggcgcgtgaaacgatggatatctacgcgcctattgctgatcgtctcggtatttccaagatcaagaccgagctggatgatttgtctctcaaatatctccagccggaggtttacaaagaattgtccgaaaaactggcgctccgtaaggacaccagggaggcgtttatccataagattatggatgaagtcaagaaacatatggacgatgcgggcatcgaagccaaggtagacggccgtgtgaaacatttcttcagcatctataaaaagatggtaaaccaggacaagacgctggatcagatctatgatatttttgcggtccggattatcgtggagagcgtgaaagactgttatgcggcgctcggtgtcatccatgagatgtacaaaccgattccgggacgttttaaagattatattgccatgccgaaaccgaatatgtaccagtcgctgcatacgactctgattggcagcagtggacagccgtttgagattcagatccgcacctatgagatgcaccgtaccgctgagtatggtatcgcggcacactggaaatataaggagagcggcagcagcaaggcggcgatcgacagcgccgaggcaaagctttcctggctgcgtgagatcctggaatggcagcgggatatgtccgataataaagagttcttaagtctcttaaagagtgatctggacctctttacggatgatgtatactgctttaccccgacgggtgatgtcaagaacctgccgagcggttccacaccgatcgattttgcgtattcgatccacagtgcggtcggcaacaagatggttggtgcccgtgtcaacggaaaactggtcaacatcgattatgtcattaaaaatggtgaccgtgtcgagattattacctcccagaattccaagggaccgagccgcgactggctgaaactggttaagagtacacaggcgaagaataagatcaaccagtggttcaagagcgagctgaaagaggacaatatcctgcgcggccgtgcgcttctggataaatattgtaaggcgaaggacatcaattattcggagttaaataaaccggaatatatggaaaaggtcatgaagcgctatgcgtaccgtgactgggattccgttctggcatcgatcggacatggcgctctcaaagagggacaggtcatcaacaagatgctggatgagcgcaacaagaagttaaagaaagaagtaaccgacacgacgatcctcgataacatggcgtcggatggaaacaaggttccggtgatcgcagccgggaagtcgaagagtggtatcgttgtcaagggaatccacgatctggcggttcgtttttcgaagtgctgcagcccggttccgggcgatgagatcgtcggatttgtcacaaggggacgcggtatctcgatccaccggacggactgcatcaatgtgatgaatctgccgcaggaagagcgtgagcgcctgattgaagccgagtggcagcagccggaagcacagacgggcacggaaaaatactccaccgaaatcaagatctatgcgaacaaccgcatcggtatgtttgtggatatttccaaggtatttaccgagcgccagatcgatattacctcgatgaatgtgcggacaagcaagcagggcaaggcgacgatcgtcatgacgttcgatattcacggaattgaggaattaaataaattatctgataaactcagacagattgaaggagtattagatatagagagaactgccggataagcggttctctctatatttcacaggtacttacaccctgtgaaagtttcacatattattaggaggaaaagatggagataaaacggctgatcgtgggaatggtccagacgaactgttatattgcggtgcatccggagacgaaagaagctgtgattgtcgatccgggcgatgaggcggcgcggatcgaggatgcactggcgcagaccggagcgaaggcaaaggcgattctgctgactcatggacattttgaccatgtgacggcgatggaagagctgagacgggatctgggcgtgccggtctatgcctgtgagcaggagcaggcggtcttggcggatccggataagaacctgtccgtccagtttcagggcggcggtctgcatctgaaagcggatatgcttttgaaggatggagagacgttcgaggcagcgggctacacgttccagatgcttcatacaccgggacatacagaaggttcctgttgttattatgtaaaatcagagaaggtgctgttttcgggagataccttatttgaaggttcttacggacgcatcgatttcccgactggaagcggacgtcagatgattcattcggtggcagatatccttctgaacctgccggatgatacgaatgtatatccgggacatatgggatatacgacgatcgccgacgaaaaacagtacaatccgctggcgggatacagggggcgcgaagcatgatagcgattttgttaaatgacgcgtcctttgaacaggatatccgtgaactcctgatggcattttatccgggcgagacatttacgcacaaggaggaggaagccggggaggcggatctgattgtgcggggagtccgggacggaaactcgttttccctggatgtgacgccggtgaagaaagaagctgttcactttgctttgatttatccggatttttccaaccgttttgagacgaaaaatgagatcaaacagacgttataccgtcttttgagtgcccagaccggcagagagcttccgtggggaacgcttaccggtatccgtccgacgaagattgcgctcacgaagctgtatgatggatggacggacgagcagatcgagacctatatgcgcgagacgtattttaccagcaaggaaaagatcgatctgagcatcgacgtggcggagcgcgagagacgcctgctgtccacgatcgattatgagaatgggtatagcctgtatgtgggaatcccgttctgtccgacgacctgcctgtactgttcgtttacgtcgtttccgattgtgaaatgggaaaaacggatggacctctacaaagaggcgctttttaaggaaatggaatatgtggcggagcagatgaaggatcgcccgctttcgaccatctattttggaggcggcacaccgacctcgttaaatccgcaggatctggatgagatcctgacaaaggtggaagaattattcccggtggaacaggcagttgaatttaccgttgagtcgggacgtccggacagcatcacgcgcgaaaagctgcaggtgctccggaatcacggcatttcccgtatttccatcaatccgcagacgatgaagcaggcgacgcttgacctcatcggacgccgtcatacggtggaggatgtgaaggaaaaattcctgctggcgcgggagctgggatttgacaatatcaatatggacctgatcgtgggtctgccggaggagacgatcgacgatgtccgccagacaatggaggagatcaaggcactcagaccggacagcgtgacggtgcattcgctggcgatcaagcgcgcggcgcgcctgaatatctataaggagcgctacggaaatctgaagattgtcaatacacaggagatgattgacctgaccgcgcagtatgccgaggagatgggactgaaaccgtactatctctaccgccagaaaaatatggcgggcaattttgaaaatgtcggttatgcggttccgggcaaggaatgtctctataatatattgattatggaagaaaaacagacgatcgccgcctgcggtgcgggaacgaccaccaaggtttatttcccggcagaaaaccggattgagagggcggagaacgtcaaggaagttgagcagtatatcgaccggatcgatgagatgatcgggcggaaagagaagctgcttggcggaaaaaagtaaaaatttacagatactcacaaagactatagaaggagtttgacacatggctttaaagaaaaaaccagttacaggcatgaaggacattcttccgggcgagatggagatccgggattatgtgctgaatatcatcaaagatacctaccgcggatacggcttctcggcgatcgagactccgtgcgtggagcacattgagaacctgaccagcaagcagggcggcgacaatgagaagctgatcttcaagattttaaagagaggcgagaagctgaacgtcgaggcagcacagacagaggcagatgtcgtagacggtggtctccgctatgacttaactctgccgctcagccgttattatgcaaacaattctgctaatttatcagcgccgttcaaggcgctgcaggtcggaagcgtatggcgtgccgatcgtccgcagaagggacgtttccgtcagtttgtacagtgtgatatcgatattttaggtgatgcgacaaacctggctgagatcgaggagattctggcgcttaccaaggcgctgaagcgcatctgcccggacaaggcatacactgtccgcgtcaatgaccgtgcgatcttaaagggcatggcagattacagcggatttccggaaaatgagaccgataaggtatttatcattctcgataagatggataagatcggtctggacggtgtccgcgaagagctgcttgcagaaggttatgcgccagaggcggttgagaaatacaccggacttctggcagagattcagaacgatgcggcaggcgtccgcgcgctgggcgagaagctctccggcgtgatggatccggcaaaggcagagaatctggcaacgatcatggagacagttaaagcggttgcagacatcgaattcggtcttgaatttgacccgacgctggtgcgcggcatgggctactataccggaacgatttttgaggtttccatggaaggcttcggcggctccgttgcaggcggcggacgttacgacaagctgatcggcaaatttaccggcgtcgatacaccggcgtgcggattctccatcggttttgagcgtatcatcacgatcctgatggattccggtttcaaagtaccggaggcagccggcaagaaagcattcctgtatgagaaaggtttaagcggcgagcagttccgtgccgtcttaaagaaagcacaggaagagcgcgctaacggcacccgcgtggcagtcgcacagatgaacaagaacaagaaattccagaaggagcagctggcgaaggacggctacgaggagatcgtggaattttacaaagacagtttgaagtgattcagtttttgaatttttcagataaaactataataaacggaggaaatactatcatggcagaatctatggcaggactgaaacgttcccatcgctgtaccgagctgggaactgccaatatcggtgagaaagtaaccgttatgggctgggttcagaagagcagaaataaaggcggcattattttcgtggatctgcgggatcgttctggtatcctgcagctgatcttcgaggaagctgactgtggcgctgagagctttgcaaaggcagaaaagctgagaagcgagttcgttatcgccgtaaccggacgcgtagaggcacgttccggtgcagtaaatgaaaacttaaagacaggtgcgattgagatccgcgcggattacctccgcattttggcagagtctgagacaccgccgttcccgatcgaggagaactccaaaaccaaagaggatcttcgcctgaaataccgttacctggatctgagacgtccggatatccagagaaacctgatgacaagaagccgcgtggctatcctgacccgtgcattcttagcagaggaaggcttccttgagattgagactccgactctgattaaaagtactccggagggcgcgagagactatctggtaccgagccgtgtacatccgggcagcttctatgcactgccgcagtctccgcagctgttaaaacagcttctgatgtgttctggatatgaccgctacttccagctggcacgctgctatcgtgacgaggacttaagagccgatcgtcagcctgagtttacccagatcgatatggagctttccttcgttgacgttgaggacgttctggatgtcaatgagcgtctgttaaagaagctcttcaaggagatctgcaattacgatctgcagcttccgatccagcgtatgacctggcgcgaggcaatggatcgtttcggttccgataagccggatctgcgtttcggcatggagttgaaaaacgtatcggatgtagtaaaagactgcgagttcgttgtatttaagagtgcactggaaaatggcggctctgtccgcggtatcaacgcagaaggacagggcgctatgccgagaaagaagatcgatgcgctggttgagtacgcaaaaggctttggtgcaaaaggtcttgcatatctggcaatccatgaggacggtacctacaagtgctccttctccaagttcatgaagccggaagagctggatgcactggtggctgctatgggcggtaagccgggcgatctgcttctgttcgcagctgacaaggataaagttgtatttgatgtacttggaaacttacgtctggagatcgctagacagcttgacctcttaaagaaggatgatttcaagttcctgtgggtaaccgagttcccgctgcttgaatattcagaggaagaggatcgctacgtagctatgcaccatccatttaccatgccgatggaagaggatcttccgctgatcgatactgatccgggcaaggtacgtgcaaaagcatacgatatcgtcctgaacggtaccgagatgggcggcggttctgtccgtatccatcaggcagacatccaggagaagatgtttgaggttcttggattcacgaaggagaaagcacaggagcagttcggcttcctgttagacgcattcaaatacggagtaccgccgcacgctggtctggcttacggtatggaccgtatggttatgctgatggtcggcgcagacagcatccgcgacgtcatcgcattcccgaaggtaaaagatgcttcctgcctgatgatggaagcaccgtctcaggttgatccgaaacagcttgaagatctttccattggtgtggtcgagagcgatgaagcggagaagaccgaagaataaaatataagatatggaacagcctgggaagactgtgaaatagaaagcaaacagggctggatgagaaatgcagggaaatactggattttgtcggacagtcctgttttgcgtgtgagatgaaaaagttccatttgtccttggcaactgaatatataaattgcttgcattggggaactcaggaggatggaaaaggactctcttttctatatgtggcagaaactatgaatcttttgtgaacctatggaatctcccacccgaatctgctaaaatacagacagattgagaatgtaatcaggatatgacagcgtggaaaaaggttctgtcatacacggcagagtaaaataaatgaggtgaagattttatggataagattaaaatactggtcgtggacgatgaggcgaggatgcggaagctggtgaaggacttcctttcgattaaagggtatcaggtgctggaagccggggacggcgaggaggcggtggatctgtttttccagcagaaggacattgcgctgattcttctggatgtgatgatgccgaagatggacggctgggaggttgtgaagacgatccgcaagtattcgcaggtgccgatcatcatgctgacggcgagaggcgaggagagcgacgagctgcagggctttaatctgggcgtggatgagtatatttccaaaccgttcagtccgaagatcctggtcgcacgtgtggaggcgatcctgcgccgcagcaacggcggcagccaggatgtgatcgatgtgggcggcatccacattgataagacggcacatcaggtcagcgtggatggaaaaccggtggatttaagctacaaggaatttgagctgatgacgtattttgcagagaatcagggaattgcgctttcgagagaaaaaattctgaataatgtatggaattatgattatttcggcgatgcgcggacgatagatacgcatgtgaagaagcttcggagtaagctgggcgagaaaggcgagtacatcaagacgatctggggcatgggctacaaatttgaggtaagcgaatgaaacgttcggtccgatggaaatttacaatcatatttgccgggttgatgacggttgcaatcgcgcttatctggtgtatcaataactggtttctgtccggatattaccagaattataagattcatacgctggaaaagggatatcgggcgattgacgcgattatccaggatgaggtccggaatggcgagagttcgctggaggacgcacaggcggagctgaattcgggttggaaagagtaccagaagtcgaaagatggaagttctgatatggacagtgcggatggcggttcggctcagtctggtaaaaatggaaccggtgatagggctggcgatgagacacaggatgcgttgggtgaatatgcggaaggtgacacggtggtgctggaggatgactcggaggatgcatcggcggatgcatcggcggatgcactggatggggaggaagcttcgagcggcggtgtccggctggcaaatgtgatccgcgagctgcgtgaccggtcgaatatttccctgcttttatatgacagcgagagtgaccagacactcgtctcctcggcgcgggatgtggaagtcatgcgtgaccgggtgcggcgctatatcgtcggtcatgcgggggcgaagcgggatgtattgcgggaatatgacaactacatgattcagaagacgtttgacccgctcagcaagacgttttatctggaaagctggggatttttctcggataatgcgaccattttcatcatgacgatgccgatggagagcatccatgagagcgcggctatctcaaaccggtttctgatgtttgttggaatcgtggtaattctggcgggaagtattctgatttattttattacccggcacattacgatgccgatcaaacggctgtcggagctgtcggaaaagatgtcgaacctggattttgatgcccgctatgagacaagccgccgctcgacggaggaaattgatacgcttggaaacagcatgaatgtgctttcggagcgcctcaagacaacgatcggggaactgaaagaggcgaatgcacagcttaaaaaggatattgacgagaaagtgcagatcgatgagatgcggaaggagttcattgcgaatgtgtcgcatgagttaaagacgccgatcgcgctgattcagggctatgcggaaggactcgtcgagggcatggcggaggacaaggagaaccgcgattattactgcggcgttatcatggacgaggctgggaaaatgaatcggatggtgcgccagcttctgaccttgacggcgctggaatttgggggagaacggctgtctgtggagcggtttgacctgacggagctgattgccagtgtgatttcttcttccggtgtgctgcttaagcagaatgagctgactgtggattttgacgggaaggaaccagtctacgtcatgggcgatgaatttaaaatagaggaagtcatcaccaattatctgacgaacgcgattcatcatgtgggcggcggggagaagaagattcagatccggattgaccaccggcgcgatggaaaagaggtctgcgtggaagtgtttaacacgggaaatccgatcccggacgaagcacttccgaacctctggacgaagttttacaaggtagataaagcgagaacgcgggaatatggcggcagcggcatcgggctttcgatcgtcaaggcgatcatggagatgcaccataaggcgtgcggtgtgaagaaacatgagaacggtgtggagttctggtttacgctggacacggctggtgaaaaatgaaaataaaattttgccagagacagaatcttagaattatgaaatatgtttcagaatcgtgatttgcattatatatgagatgatataaaaaacacttgaaaatacagggaatttcggcagcctggggcaaaaatattttgtcccaatatggttgaaattccctgtatttttgcgtttttttgtccgaaattaaaatcttaaataaatataaaagatccgtcatttccttgacaacgaaaagaaaagaaaatataataacaacgtaacaagatttaataattatgtaacatttcgaccgatagataacaccacagcgattgggactcgattcttttgtttcagcaatatctgcgggaatcacaaaatctaattaaggagttttgaagcatgaatttaaatagaacaaagaaacttttcagtatggtatgcgtgtgctcaatgctgaccattggcagcgcgcaggcagcttttgcggggccgtctacaggttatgagagcgacatggtggcaaccgtggcagcagacctttcgatctatgcggatgaggatgaaaactcagaagtagtagcgatggctgaaaagggcgagtcctatgacgtagttggaaaggcagatgacagctggatcaaggtagcggccggtgagatggaaggctatttgaaggttcagagtagcgttatgctcagcaaggcagaggaagcagctgcagtcgcagatgcatttgtcgcagagcagagcaatctatcgactagagagcagttagtcaattatgcactgcagtttgtaggtggacgttataaatttggcggcagcgacccgcacacaggggttgactgttctggttttacgaaatatgtgatgcagcacggtgccggtgtgagcctgaaccgttcttcaacttcccagtccaagcagggtacagcaatcagcgctgaccagatgcagccgggcgacctgattttctacggaagcggaagaggtatcaaccatgtagcgatgtatatcggcgacggcaaagtggtacatgcttcaactgaaaggaccggcatcaagacttccccatggaactaccgcacaccggttaagattgtgaacgtgctgggttaagaatgaatttacgaaacatctgcattgaaccttttcatgaaaaaagggttggatgcagatgttttttgatttcataggaaattgcgtccgatgaaacaaaaaaatattactggcataaaaagtaagaattaccctgcatactttcgcagtaaaattccatactaagacctgtaacaagaaagtgacggttaagcggctgttcacaggaagccggaaccgacacgtagaaaacctgacagggcaggaatttaggaggaatgacttatgtcaagcaaaaacagttacagcaactatgataacagtactgagaaaaacagcaccaaaaatgcatccaagaacagctctaattatggttccaaccagagccagaaccgcatgcagaaccagagccagaaccgttccaagaatagctctaaaaaccagtatcaggacaagacagaggatgattacagcgattgtgactgatgagacaggcagataagagaaaaaatagtgaatgccgggaatgcggaatatccaccgtttcccggcatttgttcgttttctagccaatggaagaggctgccgcatctcctccgacacctgtccgccggacaaagcatatattaatattacatagagttaaaaaagaaatcgggttctgtcagaaaccgtttttgtataaaatgaggagggatgacggatgtatcagaccataccggtgcggtatctggacgcgtggctggagcaagggtacacgggacggctgattgaccttcggacgccggaagaatataatgagtctcacctctgcgaggcggaaaatattccatttttatggcttcaggataaccggcagacacttacaggtgaacgtccgcttctgttttactgtgcgcgggggagtgaaagtcttctggtgtgcggctggtatgaccggatgggatatgaggtttataatctgggcggcggttaccgcttttatcagggaaagtatcagtgcagccggagatagacacttttgccgcggcttttcattgacagatgcagaccagtcaactagaataaaaatggtgaagactgtaatgaaaataaaaggattctttgcatgaaatgatttggcaatgaatccacagagagataagaggaaaaaagattggaacgatatgaactgattgctccctgtcattttggactggaagcagtgttaaaaaaagaggtagtggatctgggctatgaggttaccgaggtggaaaatggccgcgtaacctttatcggcgatgcggaggcgatctgccgtgcgaatatttttctgcggacggcggagcgcgtccttttaaaagtgggaagcttcaaggcagtgacctttgacgagctgtttgaggcgacccgtgcgattccgtgggagaaatatcttccgaaggacggtaaatgctgggttaaaaaggcgtcgtctatttcgagtaagctgttcagcccgtcagatatccagagaattatgaaaaaggcgattgcccgtcatatgcaggaatattacgatctggaccggatgccggagacgggcaatgaatatccgctgcgcgtctttttctataaggatcaggtgacagtcggtatcgatacgagcggcgagtcgctgcacaagcgcggttaccgtcagatgacgagtaaggcgccgatcacggaaacactggcagcggcgctgattcttctgactccgtggaaagcggaccggattctggtcgatccgttctgcggaagcggtactttcccaatcgaggcggcgatgatcgcggcaaatatggcaccgggcatgaaccgttccttcctgtcggagagctggacaaacctgattccgaagaaatgctggtacgacgcgatcgatgaagcgaccgagatggtggatgataccgtaaaggtagacattcagggctacgatattgacggagaggtaatcaaggcggcgcgggaaaatgcggagagagccggagtggatcacatgattcatttccaggagcgcccggtggcgcagctgagccatccgaagaaatatggctttattatcacaaacccgccttacggcgagcgtatcgaggagaaaaagaaccttccagcgctctataagacgatcggtgaacggtttaaggcgctggattcctggtcgatgtacctgattaccgcgtatgaggacgcagagcgctatattggcaggaaagcggacaagaaccggaaaatctacaatggtatgatgaagacgtattattatcagtttatgggtccgaagccgccgagaagaaaaacgggggatcaggttgaagcgtaatgttttctatggggcgcttctggtgcttctgctgggatttctggtacgcgagaaccgtctgattcatattccgaagcaggtggaaaagacggaggagagcgccgagtggcagccggagtggtatgagcagatggccgaggagattaatgacagcccgatcacgctggaagtcgatggaacaatggtcgatccgcagcttggaagcttgagaatgtcgcaggacgggcagtttatgataccgtatgggatgctgccggacgcgctttcctgtgcggcgcttctttacgatggaaaccggcttgtgatggagcgcggcaatactcatgcggagatgacggtcggaagcccggaacttttgcttggggaggagagccagacgattgcagcacccccagagtgggaaaatggaatcctgtatgtgccgcttgaggcggtgacggaggtattttcctatgaagaaaattgggatgcagagaaccggaaaatggaactgaccgggtcagaggatccagccacgtttttgccggaatcctatgattaccggaaggcaggccgggcaccggcggttaaaaaccaggggagtctcggaacgtgctgggcgtttgcatcggtgatggcgctggaaagtcgtgtccggccggagtggaatgtcagcttttcggaggatcatatgtccctccggaacagcttccatttttcacagaatgccgggggcgagtatacgatgtcgatggcgtatctgctggcgtggcaggggccggtgctggaagaagaggatccatacggcgacggctattcgcctgacggtttaagccctgcttgtcatgtgcaggagatacaggtgttgccagagaaggattatgaggcggttaaacgggcggtttacctgtacggaggcgttcagagctccctgtatacagcgatggtcagtgaccgcgacgacatgcattattaccggaaagagacaggggcgtactggtataatggcgatgagaagccaaatcatgacgttgtgatcatcggctgggatgaccactattcgagagacaattttaaccagccgccggagggggatggcgcgtttatctgcgccaacagctggggcggcgaatttggggacgatgggtatttttacgtgtcctactatgatacaaatattgggatccacaacattctctattccggaatcgagtcggcagataattacgaccacatttaccaggcagatctgtgcggctgggtcgggcagctcggttacggaaaagaatcggcattttttgccaatatttatacggcagaggagaaagaagagctggaggcagtcggcttctatgcaaccggggaaaatacatcgtatcaggtatataccgtgacggacgccgagggcagctcccagttcgggcggcgcagaaaggtggcttccggggaggttgcgaacgccggatattatacggttttgctggataagacggtgacgctggaggcaggcgaacggtttgccgtgattgtcgagatcacgacgccgggagcgattcatccggtggcgatcgagtacagttcaccggataagggactgacggtcgatttaagcgacggtgaaggctatatcagttaccgcggttcctcctgggagcgcgtggagacggagcaaaactgcaatgtgtgtttgaaagcgtatacgaggaatgtggattcctggaattgattgctggtacggatgtgaaggtatggcggaagctgtttttgaagaacggtgattcggaatgtcgggatatgaaaagccatgctgtttgaggataaaggagcgaggaaaagtgagcgagaaaattatatttgcgacgggaaatgcgggaaagctgaaagagatccgtgagattttaaaggatttaaaccgtgagattgttacgatgcgcgaggctggatttgaaggcgagatcgaggaaaatggaaccaccttccgcgagaatgcagagatcaaggcgaaggcagtctgggagaagacgggcggcattgtgctggcagatgattctggactggtgatagattatttaaacggcgagccgggcgtttattcagcgcggtatttaggggacacagcgtatgaggaaaagaaccggattctgattgagcgcgtgaaggatgcaaaaggaaaagagcggagcgcccgttttatgtgcaatatcgcggcagtgttgccggatggcagagtgcttcacacagaagcggcgatggagggcgagattgcaaagaaagcggctggaaacggcggatttggatatgatccgattctctggctgccggagtacggcaaaacgtcagcagagctcacgatggaggagaaaaaccgtatcagccaccggggcaaggcgctggagcggatgaaggatgcgctgaaggaggcgcttggcgagtgatgaaaaagatattaattacaagcgacactcaccgtcgggatggtaatctgctggaagtcatccagaatgaagcaccgtttgacatgttcattcatctgggtgacgccgagggaagtgaggacatgattacgtcgtggtgtagggagcagaacccggactgcgaggtctatatggtgctgggaaataatgattttttctcccatctggaccgcgagaaggagatttcgattggaaaatatcgcgcatttctgacccacggtcatttttatagcgtatcggttgggacggagcgcctgatcgatgaggcacaggatcgcggcgtgcagattgcgatgtttggacatacccacaagccgtatctggagcggcgcggggatctgactgtgttgaatccgggcagtctttcgtttccgcgccaggagggcagacgcccgagctacatgctcatggatctggatgacgagggcgaggcgcattttacgacctgctatttgtagaggtctgttactgggcacatatgcgtgtcactgttcacgtatacgtgcccagtaactatgcgtgaatagaaaccgaaaaagcaaatatccgcatattgacgcattttcagtaaattgttataatgagagagattgtgaaaaaggtacttatcaatgattcaatcgacccaataaagatgccggggacggaggtttcgtttccgaggcaggagtatgacatgagactggaagctttaattcaaaatatgacggatcagatcaaagaggcgcagctaaaacttggttatgccagggagacgatgcgcctttattatccgctttcttccctgaatgcgatgctggagatacaggagacggatatccgggagctggcgaagaagatacggcatgagctggaggcgaagaaggagaaaatgggagatacccagattcggatccacgccgatcggatcgtctttacgatcccgccggattttgtggagtatgtccatgagcaggttccggaaccgccgtttttaaaagagctgatccagttgtttcgggaaaagcacgcctgcacaaaggaagagattaccgctgtgtttgaaaaattcggcgcgtatgagtgccggcagatgccggatggcatggattttgattatgtcatttattttacagacagcagcattgatgcatatgattactgtatccgtgaggagatggggcacacgatttaccaccgatttgcacgggctgattttgaggcattgatgacgattcaataaaaaggagattagacggatggaaaacgagacaaagcagacaaatacgaatgaacaggagccggatatcttcgcacagaagttaagagaggcagattccttatatgccattctttccggatgtacgaaagagccgtatgtatactgtgatccggaaacaatggatgatgccatcctgctgtttacggacgaagagggcgcaaaggcaggcgcacagaagctggcagagcagcagattccggtaggaatcgcgaaggtggacagaaagagccttctgcttttctataccagcctttacacgatgggtgtcaatgctatccaggtacacgtgggcgaggagcagaagatgattcagctgaccgagtttgtaagacgcaaagacccggaggagagcaagaatggaaaagtctgggtggagaacccggagctgcacctgacgatgctttactatatgcaggatttgcgccgtcagccaaatcaggagattacgccggaattaaacgatttacaggaggagatcggcgcgcacttcacgaagggtcgctatatcgtgccgcttccagaggaaggaaatggcattccgctggttaaattaaagagcggagatattttccagccgatctttacggatgtgatcgagttccagcgtttcaaccgtgagaagaaattccgcccggttgtcgtagatgcgctcaagctggctcaggtactcccggaggaggcaaagggcatcgttctcaatccgctgggcgttaatatgccgctgaccgtacagaaagtaaagaagcagccggaagcaccggtccagaagccggtatccgtagaggcacagatcgacgcagctatccgcgaggttcaggcagaggctggaagggagtaggaaaggaaagagtatatgtatcaggcagcagacgcaagatatgatggaatgacctacaaccgctgcggcagcagcggactcaggctcccggcagtttcgctgggattctggcataattttggcagcaccggcgtctatgagacaatgcggaagctgtgttttaccgcttttgacaatggcgtcacgcactttgacctagccaacaattatggaccagagccgggaagtgctgaggaaaatctgggacggattgtaaaggaaaatttcatgccatatcgagacgagctgatcatcagcacgaaagccggatacgagatgtggaacggcccttatggaaactggggcagccgtaaatacctgcttgcaagcctcgatcagagccttacacgcatgggacttccgtatgtagacattttctaccatcaccggatggatccggagacgccgcttgaggagacgatgggagcactcgatcaggcagttaagagcggaaaagctctctatgcaggactttccaactacaatggacaaaaaatgcaggaagccgctgcgatcctgcgcgatctgaaatgcccgttcgtcatcaatcagaaccgctacagcatctttgaccgcacgatcgaaaacaacggcttaaaagaagccgctgtcaaagaaaagaaaggtctgattgcattcagcccgcttgcacagggaaccttaactgaccgttatctgtacggcatcccagccgacagccgcgtcatgaccgacggcagatttctcaaaaaagaccagctcaccgaagaaaaaatcagccagatccgcgccctcaacgagatggccggacagagaggcgaaaaactctcccagatggcgctcaaatgggtcatgaaggatcctgtggtaaccagcgttctcatcggtgcgtccaaaccggagcagatattagataatctgaaaatgttggatggggcaccgttgagcgaggaagagctgcttaaaatcgatcaaatttgtggaataaaataaacagaaaacgcccagcggcgcaattatgcgtacccgctgggcgtttccgtccgtgttggcaaaccatatctatttaaccgccacaaccaccctattcggcaggcaaaccagcgattctccactctctgaaacggttccctgcttcacacagagcttgtccgggcagtctgcctcttcgatccgggcacatccatcttgaatcaccagatgattttgtcccccctgatacccgtcgatccaggtgtctatctcctcatccagccggtaggtggcgacggttgttccattgacactgacatcgacggtaaaagcatccttctggcgctgcaagcgcacaaccagaaaaccgatgagtatgacggcaagaagaaccagaatcaaaacaaaatcatttctatttttctttgatttcatcaataaatgcctccgctccatccgagtaaatcagttcataatcatccgtgataaaataagcataaatgccatccattgaattgatgagttccaggcccttatccagtcccatcgagaaacaggtcgtgctgagtacatcgccgtccaccgaacgcggggagacgatcgtcacggaaaccagtccgttctggtacggatagcctgttttcgggtttaacaggtgatggtaattgacaccgtttttctcaaaatggcgctcatagacgccggaggagacaacggacatgtcatcaatattcagatcggcaaaaaccgttgcatagtcggcaaacggtttctgcagcccgatgcggaacggctggtggtttgtgcgctcaccgacacagagtacgttgccgcccaggttgatgatggcgctttcgacgccggattcggtcagatagtctttcatgcggtcggcaatgtagcccttggcgatggagccgaggtcaatcgtcgtgtccggggagaggaaggttaaagtatttccgtcaagtttcacatttttccagttgacgcgttctgccgccgctgttatgtcatcctccgccgggatcacgtgctcgtcgctggtaaaattccagagagaactgagcggttcgatcgtcaggtcgtaggcaccatgggaaacctcactgtaatgcagtccttcagaaatcatcgccgccatatcgtcggagacggtaaaagtcgtctcgtcggcgctgcggtggtttaacttgtaaagctcgctgccctcgatcgtcttgctgaaacggttttcgtactcctggcacatgtccacacagtggtcaaggatcgcttcatcctgcgaatcatagagtgtgatgttgacaaatgtattcagcagaaacgcggaacggctgatcggctcccggcgggatttgctgaaaagaagcgccgcgccgcagccaaaaaatacgacggcaagaagtgtcagaagcgcggataaatccttttttttcataaagagctccattcttaaaaatatcgaaaattcggtttgaaactatgtttgcaaaaatgtctgcaactactctaacaaaggttgataggaaagtcaagattacggcccagaaactaaacgcatcggcagccagaacgttactgggcacgtatgcgtgaacagtaacgccagaactgtatcgtacggaatttttagttcagaaaattcctatctgtgaacagttacgcgctttacaaaactaaaaatttttactaatatattcatagaggtatacagaggaggaagaaatgcagaaaaaaggacgagcaggcacatccagagccggaaaaatcgctttatatggaatgatgacagcgctggcatttctgctgagctatgtcgagaccctgataccgctcaacttgggcgttccgggggtcaagctgggattggcgaatctggcgtcgatcgtgagcctgtatctgctgggagccggtgcggcagcggcgattgcattggtgcgtatcgtgctggtaggatttacgtttggaaacctgtcgatgatgctgtatagtctggcaggtgctgcggtcagccttcttctgatggtggtgttccgccggttggactggttcggcgtgaccggtgtcagcatcctgggtggtgcgggacacaacatcgggcagcttatcgtggcggcgctggtggtggaaaatgcgagcctgttctactatcttccggtgcttctggcagccggaacggcagcgggggcgctgattgggcttctcggaggaatcctggtaaaccgcttaaaatgtctggatttgacaaaatttatgtaaatggaagccacaagagtaagaggatgtacagtgactgttcatatgcaggcatttttggaaccgaaaatgccatgagataaggtggcgcaatggtatacgggcagctaaagttataatgataaaaggataagaatgaaacagcaaggttgtttttcagtcaggaggatagggtatggcagtatatgaagcaatcagaaatttagtacagtacggagtcaatacggggcttcttcaggagtcggatcgtatttatgcgacgaatcagattctcgaggttctgggactggatgaatatgaagaaccgcagggcgcatgcggggagattttactggaagagacgttggatgccctgcttgattatgcacatgagacgggcgttttgaaggaggacggcgtggtgtaccgcgatctgttcgacacgaagctgatgaactgcctgatgccgcgcccgagcgaggtgattggacatttctggaaattgtatgaggaatcgccggaggcggcaaccaattattattacaaattgagccaggattccaattacatccgccgttaccgtgtttccaaggatatgaaatggaaaacggatacaaaatacggggagctggacatcacggttaatttatccaagccggagaaagatccgaaggcaatcgcggcagccaaactggcaaagcagagcggttatccgaaatgcctcttatgcaaggaaaatgaaggctatgccggacgtgtcaaccatccggcgcgcaataaccaccgcattatcccgatcacggtcaatgacagccagtggggtttccagtattcgccgtatgtgtattacaatgagcactgtatcgtgttcaacggtgtgcacacaccgatgaagatcgaacgggcaacgtttgtcaaattgtttgattttgtgaaattgttcccgcactatttcctggggtccaatgcggatctgccgatcgtcggcggttcgattttaagtcacgaccatttccagggcggacattacacgtttgcgatggcaaaagcgccgattgaacagaaatttgagatggaaggcttcgaggatgtggaagccggaatcgttaaatggccgatgtcagttctgcggacccgttccaagaatccggaccgcctgattgatctgggtgaaaaggtgttgcgtgcatggcgcagctatacggatgaggatgcttttatttatgctgagacggacggagaaccgcacaacacgatcacgccgattgccagaaagaatggcgatttctatgagctggatctggtgctccgcaataacatcacgacggatgagtatccgcttggtgtttaccatccgcacgcgaagctgcatcacatcaagaaagaaaatatcggtctgatcgaggtcatgggtctggcggtgctcccgtccagattgaaacaggagcttgccgatctggcggaggcgatcctttccggaggcgatatccgttccaatccggagcttgaaaagcatgcggactgggtggatgagttcctgccgaagtatgagcatataacaagtgaaaatataaacgaaatcctgcaaaaagaggtaggtcttgtctttgagcaggtactggaagacgcgggcgtatataagtgtacgccggaaggcagggaggcatttgcccggttcctgcgctcagtgggcttccgataaagaggagataatggagagagatttatttttaagaaaatatcggatcgaacaggaagactttgacgcggcgggcgtttcctgggaggaattgaccgcgatcgcggatcattatgcgacgatcgagggaaagctgcgggagattggcaaggattttgtagataagtatctgtatgatattgaaaaagcggggatccattcctaccgttaccgtaccaaggcaccggggcatctgctggagaagatcatccgcaagaaaaaagagcagccggagaaatttgcccagctgggagttgataattactggaaatacgtgacggaccttatcggtatccgtgtattcttcctgtaccgtgaggattggcgtcatttccatgaatacatcacatcggcgtttgaaaatgccccggagcagtatgtaaaagaccgtgagcgcgattttgacaacgatgagacacactgctacattgcagagcgtccgaaggtataccgccgaaacggggacagccggatctacgatgaaaatgtgatcgaaatcaagtcaggcggtatctaccgttcccttcactacatcatcaaataccgcggttactacgtcgagattcaggcgagaacgctgttcgaggaggggtggagtgaggttgaccacgacattgtttatccgtaccacaaggacgacgtgatgctgcgcgatttctcccgtctgttaaaccggctctccggcatggcggatgaaatgagctcgtatttccgccggatgaaggtggagaaggagtttgaagaggtcctgctcggagaatataaggaagacaaagaggcgaagctgctcgcaagtatgcgggagctgctggggaaagaagaacgataaggaatagggaaaagataactggatcaaaaaaacgggcattggaatgcttgctatccacacagtggtggatgaagagcatttcaatgcctgttttatggagctataattatagatccagcttcaaatcgccttccttgatccatccggctttccggcaaagtgcgccgaagaacagggtcaaaacagccggaagcacgaagcagatgagcaggatgcccggccacatcatcgaatttccacttccctgcatggcggtgtagatgccgatcggtccgacgagaccgcaggttcccatgccggaaccggctggaatattttccagatggaagaccatcgtggagagcggaccggtgaccatcgaggcgagtgtcggtggaatccagattttcgggttccggacgatatttcccatctggagcatcgaggttccgagtccctgtgccagaagaccaccccatttattttcacagaagcttaaaacggcaaatccgaccatctgcgcgcagcagcctgcggtggcggcaccgcctgccagaccgtcgaggcttaacatgatgcagattgccgcactgctgatcggaagcgtcagggcgatgccgatcagggcagaaaccagaatacccatgaaaagcggctgcatgacggtcgctgtcttcaccagatttccgaaagcggtcatgaatgcggagacgcccggaccgacaaattgtgcggccaggatgccggagatgatggtgacacccggggtgacgagaatatcaaccggtgtctctttggagacgatttttccaagctcggctgcgatgatggtggcaacgagcgcgccgaccggaccgccaagttcattgcctgcgatgccgacggtagcggcggagaaaaggacgagcgtcggtgcttttaaggcgtaggcaatcgagacgccgagcgccgcaccggtcgcactcttggcgtagcctgcgatcgtagtaaaaattacaacgcctgttttttcccccagcgtgccgaaaatggtaccgatcagaagagaagcaaacagaccaaatgccatcgcgcccagcgcatcgatgagatacgtctgaacggagatgacaacctgcttccgtttcagaaaagctttcacacgttccatattgatagaacctcccagagtaaaataattgtgaacggaatgaatcgtttcagccattccggtcaaatccatgacagtcaaataaatggcttacacatgtcttgacaggtgtaatggacgtttgtattttaacacgaaatggagaaaatacaagagaaaatatagaaaaaagtaaaaaagttatggtacaataaaaaataattgacgaggtgttttcgaaaaagtatgttcgatccgaggggaggtatttcatgcagagacgaatttgtccgatttgcgaccatccgatcaagtatggtcattattgttctttttgtaaacagtggatccggaatcctaactatgtcaatgcaacttattatctgaatgagcgccacccggcgcatgagacggactgtgagtaccacaatgcgggatctgcctcgtgggaaacgagtgcaagggcaggcacagatgccatccgcacgcttgcggaccgggcgaaggtatattcccagacgcagaaagcagcaggcgtaggcagacaggcatccgtccggacacagaaccagaacagtatgtcgtatcagacaacgcagagacgaagcgcggtgcagcaaggaaaaaatcagaaaaagaaggggaaaatgagccttgtgctggtgattttgctgattttgtttgctttgtctggaattaattatctgtatcgtatgtttatgtattttatttggttcctatagattttacctatggcaagatatagaaaatcaatccagaagatagctgccggaagtctggcgttcattggggaaatatggtatactgagcaaaaatcatatagaatacataggcaatagaggtccggggcagaaccggacgaaatgatgagaacaggagataaatacgatgaagattaaggatattttagccaaaggacagccgacgctttcgtttgaagtgttcccgccgaaggaggagagcaacttcgcttccgttgagaaagcggcgcttgagattgcaaagttaaatccgtcatttatgagcgtgacctacggagcaggcggcggcacaagccagtatacggtccagatcgcatcggatatccagagcacctgccaggtgccggcgctgtcacatctgacctgcgtctcctcgacccgtgagaaggtgcacagtgtcctgcgcgagattcagacacacggaattgagaatgtcctggcacttcgcggcgatattccgaaagacggcaaggtagaaaaagattatcagtatgcatcccagctgatccgcgagatccgtgagacctgcccggatctgtgcatcggcgcagcctgctatccggagggacatgtggaatcggtcaacaagacggtggatatcgggcatctgaaagaaaaagtggaagcgggctgtgattttgtgacgactcagatgttctttgacaataatatcctttataattacctgtaccgtatccgagaaaaaggaatcacggttccggttgtcgcaggcatcatgccggtgacaaacataagtcagatcaagcgcatctgcagcatgtccggcacctaccttccggcacgcttcaaggcgatcgtagatcgttttggtgataacccggcagcgatgaagcaggcaggtatcgcctatgcaactgagcagatcatcgatctgattgcgaaccatgtaaatggaatccatgtatattcaatgaataaaccggatgtagcggcgcagattaagaacaacctgtcggagattctgtaatggcggaagtcaatcggagagaaatatatcggtatttaggaattaaagggcagcaggagccggatccgcagacgaaagatctggtggaggactgtctgggagaattagagcggtccgtcaactgccggagcttttacagacgctatccgctgacgctgctgccagattcagaacttgattttacgtgttttaaagtaaaaagtcgggcgctcagccgcaatttaaaggactgccaggaggtcatcctttttgcggcgacgctgggggctggtgtggatctgcttctgcgccgatacagccgtctttcgatgagccgggcggttgtcctgcaggcgtgcgcggcggcacggattgagagttactgcaatgaaatcaatgacaaattaaaagcggaggcagcagaagaaggactccatctgcgtccccgcttttcgccaggttatggagatctgccgctttcgtgccagccggatttctgccgggtactggaagcggaaaagacggtggggattacattgacggaaagttttttgatgatgccgtccaagtcggtgacggcggtcatcggagtatcgaagatagcggcgggctgtgtgaaagagggctgtgaggtctgttcaaacaaaaactgcctgtaccggagagataaataagtaagaaacaaaaaacagagaggaagctgacatgggtatacgggaagattggaacgataaaatactggtatttgacggaggaatgggaagtcttctgcagggagccgggctgaaaccgggcgaactgccggaaacctggaatatcaagcatccggaggttctggtaaagatccatgaggattatctgaacgcgggcgcgaatattattttatcgaatacattcggcgcgaaccgcctgaaatacaatgaggcagccgagtttaatctggatgagatcgtggatgcggcgatgaaaaatgcccggacagcggtagaacactgcggccgtggttatgtagcgctggatctgggaccgaccggacgccttttaaagccaatgggtgatctggactttgaggaggcggtctccatctataccgaggtggtaaaggcaggcgtgcgaggcggcgcggatctgattctgatcgagacgatgagcgacacgtatgaactcaaggcagcggttctggcggcaaaggaaaattccgatcttccaatctttgcaaccacaattttcgatggaaaaggcaaacttttaaccggcggaacaccgaagtccgttgtggcacttttggaaggtctgggcgtggatgcgctcggaatcaattgtggattaggtccggttcagatgaagccgattgtggaagaactgcttcggtatgcgtcgatcccggtggttgtcaatccaaatgcgggacttccgcgaagcgagggaggaaagaccgtatatgatattgatccgccagaatttgtcgaggaaatgaaaggaatgctggagatgggcgtttcggcagtcgggggctgctgtggtacgaccccggagcacatccgtctgctggcagagatgtgtaagggcagaacgagaaagccgatcgagccgaaaaatgacactctcatcacttcctacgcgtcggtagttgagatgggaaccgatccggtcattattggcgagcgcatcaatccgaccggaaaatcaaaattcaaacaggcgctgcgcgatcacaacctggaatatatcctgcgcgaggcgatcacccagcaggagaatggcgctgcggtgcttgacgtcaacgtgggactgccggagatcgatgaagtggcgatgatgcgcgaggtcgtacaggaattgcaggcggtgactgagcttccgctgcagattgatacgactgacacagaggcgatggaacaggcgctgcgtatttataatggaaaggcactgattaactctgtcaatggcaaacaggaggtcatggacgctgtatttccgctggtaaaacattacggcggcacggtggttgcgctgacgatcgacgaggaaggcattccggcgacggcggacggacgtatggcgatcgcgcggaaaatctgtgcggaggcggaaaagtatggcatccagaaaaaagacatcgtgatcgatgcgctctgtatgacgatcagctccgagccgaccggcgcgctggtgacactggagacggtgcgccgtgtccgccaggaacttggctgcaatacgattctcggcgtttcaaatatttccttcggattaccgcagcgtgagattgtcaactccaatttctttacgatggcgatgcagagcggtctgaccgcggcgatcattaatccaaattcggcggcgatgatgcgttcttattatagctaccgggccctggcagcactggatgaacactgcggcgattatattgagcaggcagcgcggctggcgattccaaaggcaggtgcgggcggagcttccggcgcaggtgcagcaggcagcgcaggttcgggtgccccggcggcaggtgcagctggagcttccggcagtgcggacactggcagccaggcatccggtccggagcatcagcttacggtcagtgtggagagaggtttaaaagagcaggcggcatcggcagccggggaactcttaaagaccatggattccctgaccgtcatcaattcctgcatgatcccggcactcgataaggtcggaaagggttttgaggcaggcaccgtctttctgccgcagcttctgatgagtgcggaggcggcaaaatcggcgtttgaggtcatcaaaaaccagatggagtcctccggggaagcaggagagaagaaggacaagatcgtgctggcgaccgtcaagggcgatattcatgacattggaaaaaatatcgtaaaagtattattggagaattacagctatgatgtgctggatttaggtaaggacgtagctccggaggcgatcgtggaagagacgatcaagaaccatgtaagactggttggtctgtccgccctgatgacgaccaccgtgccgagcatggaggagacgatcaagcagctccgcaaggaagcaccgtgggcgaaagtcatggtcggcggcgcggttctgacccaggaatacgcggatatgatcggagcggatgcgtattgccgcgatgcgatggcgtctgttaattacgcgcagcaggtgctggcctaacgcttgacagtctgccctacttagactaaaattagagtaattaaaaactaagaattgacgagggagggacagctatggtatcgaagaaagtgaaagtggttaatccatcgggacttcacctgcggccggctggcgtgctttcgcagaccgcgatgaaatttaagagccggactctgattgagtgcggggagaaacatattgtggcaaagagcgtgctgaacgtgatggcagcgggtatcaagtgcggcaccgagatcacggttgcctgcgacggaccggatgaggaagaagcgctgaagacgattaccgaggcgatcgagagcggactcggagaagaactggaacagtaaggtatcagccattgcctgcacagtgtgcggacggtgacacacatatcagaaccagagggggatattgcagaacggcagaaattgcagttgtgcaggtatccctttttagatggaaaagaggggtttttatggaactgaaaatttacgaacacaaagcgcagtattatgaaaccgaccagatgggaatcattcaccatgcaaattacctacactggtttgaggaagcgcggatcgacatgatggagcagatgggaatgggatatgacatcatggaaaaacaggggatcataagcccggtgctgtcggttcactgcgattataagagcatggcgcggtttggcgagacggtgcaggtgctggttcagatgaaggaatacaacggcatccgcatgacgctggaatacacggtttttgacaaggaaacgggcgcaatccgctgcgtgggcgagagccgccattgtttcctgacccgcgacggaaagccggtttccctgaaacgcaactatatcgagatggatcgtgcgtttagggaatacagcgaacagagccaaaaagaagagtaaatgctggtcggttcgaaaatggactgccagaggcgtgcttgtgcggaaattgccagaagcgcttataaagtgcttgaaaagcgggaaaattgtggtatgatgtaaaagataaaaaaagaaacgcagagtaggaatacaggcgttaagtgccggttgaacagggagttgtcagccggacgaagagaccctccggggtttcgcggtcagtattccgcatcccgctgcatcgttgatacaatctatctcctgatgtggttcgagagatctgcagaaaaggaggtatttttttatgaaaaaatttgcagtatgttatcaggcatcctttcaggaactgaaacacgtgaaaacactcacgactgccgccatgctgatggctgtctccgttgttctgggatacttcacgattgaggctggtccgtatttgaaaatcggattcggcggtgtggtcaaccagtttgtctactacctcttcggtccggtggctggagcggtctatggcggagtcttggacctggtcaaatatgtcgtaaagccgacgggggcattttttccgggatttacgctgaatgcgatgctgggcggcgtgctatatggcacaattctgtatcggaaaccgcttaccttccgccgggcgctctgggcggatctggtggtggcgctgatctgcaacatatttttgaacacactctggcttagcatgatgtctggaaaagcaatgatggtgcttctgccgatgcgtgtgcttaagaatctcatcaagtggccggtggatgcagcactcttttatctgattgcaaaacggatggagagtcttgggcttgtgcggatgatccgtaaattccaggcggagtgatgctggaggattcgttttgagcaaaaggaaacatacatggacagcgaaagtctgcgggcacggtggctgcatgccatgaaaggaaccgtttatgaaaaaatgcatcatgcatgatagaggaaaacagatgagagaaaaagcagtttcgcggagccgggaacattcgaaggatgtggcgctttgcggtctgtttgcggcgctggtcgccgtgggggcatttatcaaggttgtcattccgaccggcgcagataccatgaacttcaccttgcagtggtttttcgtgatgctggcagcatttctgctgggctccagacgggcatttaccagtgtgggtgtctatttgctgattggacttgcgggcgtcccgatctttgcacgcggcggcggtccggcgtatctgctgcgcccgacctttggttttctgctgggatttctccttgcggcgtgggtcatgggaaaggtctgtgaatgtttgaattcctggaaaatgggagcactgatgacggcggcgacggctggatatgtggtatattatggaatgggaatggtttatttctatctgattacccatctcgtaaccctgcagccgatcggctggaaagcgattgtgctggtttactgcctgccggagatgccggcggattatattctctgcattctggcggcgatcatggcaagacggctgcgcccgatggtacaggcgtatctgtagagaaaaatgaataggatataaaaaagacagacagtctgaatgcagtgcagcaaacgggctgtctgtttttgtctcatagaaaacgttactgttcacgcatacgtgcccagtaacggcacattcttttgtaacgctgccagttgtgtttgcccctatcatttttgcagaaaatatgataagatgtacggagattacgacaggggaaggtttgagcgttacaggttttggttttggaaaccgtctgagaggatgcaaaaacgaaaaccagcgaactgtcagaatccaacctgataaaaaggagaagtatgtatgagtgagaattgcagtcataattgttcaagctgcggcgaaacgtgtgccagccggacgatggaaagtttccgggtgccgttaaatccgcagagttcagttaaaaaagtaattggcgtagtcagcggcaagggcggcgtcggaaaatctctggtgacatccctgatggcatgtaagatacgtgcgagaaacaaccgcgttggcattctcgatgcagatattacaggaccgtcgatcccgaaggcatttggcattcacggcatggtaggtgtgacagcggatcagctgatgctgccgcgcacgacctcgacggggatagagattctttcttcgaatctgattctggagcatgagacggatccggtaatttggcgtggaccggttgtgggcggcgtgattaagcagttctggagcgaggcactctggaaggacattgattatatgtttgtcgatatgcctccgggaaccggcgatgtgccgctgaccgtatttcagtccctgccgctggcaggtattatcattgtgacttccccacaggagctggtttcgatgatcgtggcaaaagcggtcaacatggcgaagaagatggatatcccgattctggggctggttgaaaacatgagttatctggaatgtccggactgcggaaagaagatttctgtgttcggcgaaagccatatcgaggagacggcagacgagtatgagattccggtgctggcgaagattccgatcgatccgtcgattgcgtccaaggtggacgaaggactggttgagtatgtggaatccccgtggctggatgcggcggctgatgcagttgagaaggcataaaagaatatagataatagaagaggtggaagaatacaaatgaatattgctcagaatcccaacagcgagctgagccattttgcggtcaatacgcctcaggtgtttgagatccctgagacattccgggagacggcaaggcagtttcaggaagcgatgatgcagtacagctgcgcgattcgagagtttaagacgaagctggaagtacttaacgatgagctttccatgcggaatgcaagaaacccgatcgagatgatcaaggcgagagtgaagaagccgaagagtattgtagaaaaactgcagcggcgcggacttccgctttcgatcgaatcgatggagtccaacctggatgatatagcgggtgtccgtgtgatatgttcgtttgtggacgatatttacgagatcagccggatgctggaacgccaggatgatgtgaccatcattgcgatcaaggattatatcaaggcaccgaaggaaaacggctaccgcagctaccacatgatcgtggaggtaccggtattcttttcaaacagtaagaaaaatatccgtgtggaagttcagatccgcacgatcgccatggatttctgggcgagtctggatcaccagctcaagtataaaaagcagctggatgcccaggaggccgcggagatcggtgcggagctgaaaaagtgtgcggatgtcatcgcggagacggattgcaagatgttaagcatccgtcagaagattgaggaaaaacatccgacgcaggaagaatagctgtgatgtaaacgaatagaccatgtatcatccattaaaaattgcctgtggcaacgggatttttgcctgctggctcatgttttcgtacggtcagcgcagtaaatgcgcagatctactgaaacgttacctttaatacataaaataggacagggtttcggtaattcggaaccctgcttttttatagatcgagagtgccggataattgtcactgctgacgtgaagaacaatccgggtgcagccgcgcgcgatcagatcgtttaagaccagacagaaagcagcttcaccgattcccagtccgcggcagaggtcatggacccggaagccgtagaaacaggcatgaaatgtgccggaaacgtccgggacgggctgcatacgcgccatgcacacggcagccggagagcacatcggatccggcggagtctctaaaaattcataggtcagaattgtaacggccggatctggatcatcggcgctgtggaagcagtcccagcaactgtcgggatcaacactttcgttgacgtcaccttccggtgcagaagtgcaggtaaaggtaagcgggcgtttttcaaccatgggagagtcaaagcgttcggccgccgggtcaaagtcccatttcatctgatattcctgatcaacgcggtcagcgtgaatggctttcatcgtggcagccgtatcagcagattccgggtcaaccggaaatagaatatcgtgctcaccggagatgtcgcaggctttttctaagagtgcggcaaaatatccgcgtcggcgcagggaagggcgggtgaaggcgatgcattcgacgggttcctcgtccgaagagccatccggtggaaggatcattcccatgatggctgcaagtgtctctgattcatccagaagaagcaggaaacaatttccgtcttcaaatggaaaagaaatgtggatcggctgcgtcttctggcattcattcaacagtgccaggatctgttctgcctgtctggcagagagagagtttgtctgaattaaattcataacttctaatcctttctttcttgcaatacaaagtgtaccagctacaaaagcagctgagaagataagtctttcataaagataaacgtatttgcggataaaaacttcacgttttttggatcgaaaatgtctggattttacgaatcggaaaagcttacctgtatcgtataaaaaagacgcaaaaaattcaaggaaattgacagaatttatgctaattttcatattgtcctataaatttgggagtgatagaatagaggcattaaatacgaaaggtgaagacatcatgaagtacttgaaagaagtgacaattatttttggcatcacaatgctgggagagtttttgaactatctgcttccgtttccggttccgtccggcgtatacggattgttcattcttctgcttctgctttgcacaggtgcattacatacagaagatgtggcggaagtgggagatttcttcctggatacgatgccgattatgtttataccggcaggtgtaggtctgcttgacagcgtgcaggaggcggagtccatcctggtgccgctgacagtgattaccgtgatttcgacggtatttgttatggttgcgaccgggtgcgtggcgcagagcatcatccgcagaaagaataaaggaggtgcgaaagcatgaatggactgattcattcttctctttattttggaatgctggtcagcgttggcgcgtatatgttgggcgtctggctgaaaaagaagaccggctgggcgattttaaatccgctgctggttgcaattatagttgtgattgcatttttatctgtttttcatatagaatataaggagtataaccgcggtgcggtgtatctgggctatttcctgacaccggcaacggtctgtctggcgattccgctgtataagcagctggagcttttgcgtcagcacctgattgcggttgcttctgcaattgtggcaggggtagcgggaagtgtcggcagtatctatgtgatgtgccgtttctttcaactggagcatacgcactatgtgacattgcttccgaagtccattacgacggcgattggcatgggcgtcagcgaggaagcgggaggtatcgtgacgctgacggttatcagcattataattacaggaattttgggaaatattatagccgactggctgtttcagatatttaaaattgaagagccaatcgcgaagggtctggcacttggaacagcagcccatgcgattggaacggcaaaggcgctggaattaggcgagatcgagggtgcgatgagcagcttgtcaattgcggtcgccggtcttttgaccgtagtggtagtaccactgatgtcgggactgatttaaaggtggtgctgaaacggtcggaatttgtatagaaattggaatgcacatagagaggcagagaaaaagatactgcgggtcatgcgcatgataacggcagcaaaaagataggaggggagcaggtatgatgaatttgtatgaggcgataggatgtcgccattcagttcgaaaatacaccgatcgggaggtcacggagaagctgcgtgggcagatcctgtcctattttgataagacctcccggttaaatgaccggatccgggttgaggcagtgatattcgacaatacaaagaaaaaagccgatgtccacggactctggaaggtggatgctccctactatctggcgatctattcggaccaggaggaaggctgcgagcgcaatgccggttatctgatggagcagatggtgctctatatgacggcaaaagggcttggaacctgctatttgggcagcgtgcagccggcgcagaaggtgcgcggcggcaaacgctgcctgatgatggtcgcattcggctacccggagggcaagctctaccgtgaaagcccgctggcaaagcgcctcccgctcaatgaactctgtattttcaaggaagaagccggagagcagatgaagacgattctccgtgcggcgcgtctcgcaccgtccgcgatgaacacccagccgtggcgcttcatcgtctattccgaccgaatctatgtgttcgccctaaaaacccgctttccgggcaaaagcttccatgcgatgcgcgaattcagcatcggcattatgctctcccacattatgctcgccgccgaagaactctggatggaacttcagacggagacggaggaacattttgcggctaaaagttacaaaaatggagattatgtggcgacgttgacgctgcattagatgcattgattcattgtattaaatgttgaaatagtttatatttaagcaagaaaaactaattttgcaattttaaaaccaattattcaaagaaacgatacactcaagaaagaagcgcgccagccgtccgatgccgtgacagctggcgcgcttctttcggggcaatcaaaagggcataagcaaaaacccttttttccttgctccgtgcccttgaaagcgctctccacttatgataaaataagttgattatttatgagagatactctggaggagaacgtgatggttagtaaattgattgagaagattcagaagacaaaggcaccgatctgtgtaggactggatccgatgcttggatatattccggagcacgtgaaggaaaaagcatttgcggagttcggagagaccctggaaggagcggcagaggcgatcaggcagtttaactgtgcgatcgtggatgcgacggctgatctgattccggcggtcaaaccgcagattgcgatgtatgagcagtttggcatcgaaggcctgaaagcgtatgaccggactgtcaaatactgccagcagaagggcttaattgtcatcggagacatcaagcgcggcgacatcggttccacatcggctgcctacgcaaccggtcatctcggcagcgtgaaggttggaaatacgacctgttccgcgttcaataccgagtatgtgacggtcaatccgtatctgggaaccgacggcgtgaaaccatttgtggacgagtgcaacgcatccgaccgcggtatctttgtactggtaaagacttctaacccatccagcggcgagttccaggatcgtctggtggacggccgcccgctttatgagctggtagcggagaaggtcgttgagtggggggaggcttccatggatggcgactacagtaatgtaggcgcagttgtgggcgcaacttacccggagatgagcaaaattctgcgtaagctgatgccgaagacttactttctggttccgggttatggcgcacagggcggtacggcagaagacttaaaatactgcttcaacgaggatggactgggcgcgatcgtcaattcttcccgcggtatcatcgcggcatacaagaaagacgcatacgccaaattcggtccggagcattttgcggacgcatcgagacaggctgtcatcgatatgattgcggacattggacgcgtactgtaaggaggagctcatggcacagaagaaagagacagcagttgtatatagtcaggaagaactggcacctggcattttcagtatgtggatcgtgacggacatagcggacgaggcaagaccgggacagtttatctcggtctacagccaggacggttccagacttcttccgcgcccgatcagtatctgcgaggcagatccggatgaaggacgcctgcggatcgtataccggattgccggtaaaggaacggatgaattttccaaatatgtttccggagactcgatcgacatcatgggacctctgggaaatggtttcccgcaggagggcgaaaatgtatttctgatcggcggcggtatcggtgttccgccgatgcttgagatggcgaaacagttaaactgcgaaaaacagatcattttaggataccgggatgaaaatctcttcctccgggatgaatttgaggcatatggagaagtctttgtggcgaccgaggacggaagcgtcggcacgaagggcaatgtcctggacgcgatccgggagcagaacctgacggcggatgtgatctacgcctgcggaccgaccccgatgctgcgcgccatcaaggagtatgcggcggaaaagggaatcaagtgctatatttccctggaggagaagatggcatgtggaatcggcgcctgtctggcatgtgtctgccagtcgaaggatgtagaccaccacagcaatgtacacaacaagcggatctgcaaggatggtcccgtatttttagccgaggaggtagaattatgagacagatggcagtcaatcttgcgggtgtagagcttaaaaacccggtcatgacggcatccggaacctttggttcaggggcagagtacggcgagatggtcgatctgaacaagctcggcgcggttgtgaccaagggtgtggcaaatgtgccgtggccaggcaatccgaccccgcgtattgcggaggtgtacggcggcatgatcaacgcgatcggcttacagaatccggggtatgatttatttgcatcgagggatatcccgtttttacgtcagtatgatacgaagattatcgtcaatgtatgtggaaaaacgacggaagattacgtcgatgtagtggaaaaactggcgagccagccggtcgatatgctggagatcaacatttcctgcccgaacgtcaaggagggcggcatcgcatttggacaggatccgaaggcagtggaggcgatcacccgcgaggtaaaacgccatgcgaaacagccgattatcatgaagctcagcccgaatgttaccgacatcacggagatggcgaaggcagccgaggcaggcggtgcggatgtgctgtccctgatcaacacactgactggcatgaagatcgatattaaccggagaacctttgcggtagccaaccgtaccggcggtctgtccggtccggcagtgaaaccagtggcagtccgcatggtttaccaggtggcgcaggcggtcaagcttccgatcatcggcatgggcggtatcatgaatgcggacgatgcgatcgaatttattctggcaggcgcaagcgcggtggcagtcggtacggcgaatttccataatccgtatgcgacggaggagatcgtgaagggcatcgacgcctacatggaaaaatatggcattgaagatatacatgaactgattggtgcggttcggtaagataggagagtatgatggaacagtataagcaggaatttatcaatttcatggtagagagcgaagtgctcaagtttggcgaatttaccttaaagagcggacgtaaatctccgttcttcatgaacgcgggtgcatatgtaaccggtacgcagctgcgccgtctgggcgagtattacgcaaaggcgattcatgacaactatggtctggatttcgatgtcctgtttggaccggcttacaagggaatcccgctggcagttgccacctcgatggcgatcagtgagctgtacggcaaagaagtacgttactgctccaaccggaaagaggtcaaggatcacggcgataccggcatccttctaggaagcaagttaaaggacggcgaccgcgtcgttatcatcgaggatgtaaccacttccggtaaatccatcgaggagacattcccgatcctcaaatcccaggcagatgtggagatcaaaggcctgatggtatctttaaaccgtatggagcgcggcaagggagaaaagtgtgcgttggatgagatcaaggaactgtacggcttcccgaccgctgcgatcgtatcgatgtcagatgtcgtagagtgcctgtacaacaaggagtgccagggcaaggtcgtgatcgatgatacactgaaagcagcgatcgacgcatactatgagcagtacggtgcaaaatagagatttggttcacggagcggcatgcttgaaatgggaaatgccatgcgacggagtgtaagaaggagcggatcgatatggaaaagatctacaaaacgatgcagggaaccggtgtgattaatatcgtgattggaagcgtgatcatcacggtagggctggcagccggtgtgatggcgatcgtcagcggtgcgtttttactgaaacgcaaatcagatattacattctaaaaattggatttgaaacagggcagatatgcccagtcgaaagagaaaaaccgtatgaccggggacggtgtacggtttttctcatttctggcagtttatgtggggaattatgtggaaacggacaaaaacgcatcagaaggtgtgctggatattctttgtcgcatacctggtgcttcttatatattttatgtttttttcggacggattcgggcgcgcgccgcatgtggagtatgcctataatctcgttttatttaaggaaatcaaacggttttatatttatcgtgatatagtggggacggaagcgttcctgttaaatacggctggcaacgtggtgtgcttcatgccgtttggatttttcctgccgatcatcagtccgagatttggaaaatggtacctgatgttgattctgagcttccttctgactttaagcatcgagacgattcagctcgtattcaaagtgggaagttttgatgtggatgatatgtttttaaatacgttaggtggaattgctggctacctctgccagtggattacacgtgcaattgggaggtgtctgcatgggacgtcaaacagataaccggatttcttatatccgcaagccgatggcagaacacggctatctctgcctgggactggcgggagtcggtctgctgctgtgcgtggcagggatggcattcagtgtccgcagccagggcaatacgccggtcggcgcgctgtcgatgtgcttttcgagcatattattttccgtggcatcgctgatgtacggatggaaatcttttaaagaagaagaaaaaaattatatattcgcgaaaattggtacgattttgtcggggcttctggtcatctggtggattgtgacgattttgattggcatccggggctaagaatgaatggtttttatgcatggcttgcctggaatgccggaccaatggaacgccggtaagagcctttgcggcgggcgtggtttgaaagtgaaatttggcgatggcagaaggagggaaatatctgaacatgaaatattgggaacttttgaaagaagaaaatgaggcggttgcggagcgccatgagctcgcgatggagcgcatcggccatatgaaagaagaagcgacggttggcgagccataccgggcattttttgagcgcaccgtccagtttatcgagctgatagaagaaaccttccagaaacagatggatgggacgctggcgacgatgagccaggaagaggcggcagaatttaaccggacactttatgcggatatacttccaggggcgtatgggaagagctttgcgaacccggactatgcggcaaaagagctgggagaggactatggtccgtggctgtcatttctctatacggagatccgcagcgcgatcgtttacgcctatgagagccgtctggtggatgtgacggtgttggaggaactgtttattgaggtttacaacctgtttgagggcgggacgccggagctggcggagcttcgcgagccgctttattattttgtcagcgattactgtgaccggatgcttccgtggcgggtgcgtgagacgctggatccgtcgctggattttggaaaatcgatcatcatggacagtgatttaaacgatctgcgttatctgtaccggtttggcgaatatatctcggagacagagcttgcgacggcacgttttatgaatgagctgccggaggagacggtacgccggatggcagatacctacacagaaggctaccgcaagggatttgcggcgaccggacgcagctatgagggcaagaaaacggtgcagatccgttaccacatcggatttgagcgcatgatccggatggcagtggaaaatttccgcgaactcggtctggagccgatcattgcccgagcctccatcggcacggtgaaccggatggcggcgcgcacgaacggttactatggcacaccggcaaaccgccagtacgagtatgatcaccgctacgacaatgcggtttacctggacaaggcctttcgtgagcggaaattgtctattttaaaggtggcatatgagacatacaaggatctggcgtcggtatatgccggtccggcagttgtggaaaccttcggcgaggtcggatttgagccggtcaatgcagcagcagccttttctttaagtgaaaaacaggagaaactgctgttatcctacagcaatgaggcgatgcagattgtggacgcgtatattccggggacggagacgagcttcacaatcattgcattcccgcttccggagatcggagcggagtttgaggcgatttttaaggagacgatccgcatcaatacgctggactatgagctgtaccgcgacatccagcagatcatgatcaacgaactggatcaggcatcgcaagtccacatcagcggacgcggcggcaaccgtaccgatctgaccgtacagcttcacacgcttgctgagccgacgaaacagtcgaatttcgaaaactgtgtggcggatgtaaatattccggttggagaagtctttacctccccgcagcttgctgggacaaacgggcttctgcatgtcggcagcgtctatatcggggaatttcagttcaaagatctggaaatccggtttgaaaatggtatcgctgtctcctatacctgcaaaaactttgagacggaagaggaaaataaggcgttagtgaaacagatgatcctcaaaaaccatgagacgctgccgatgggcgagtttgcgattggcaccaacacaactgcgtatgaggtagcgctgcgctacggcattctcgacaaattcccgattctgattgccgagaagatgggaccgcactttgcggtaggcgatacctgctacagctggatggaggactgcccggtcttcaacccggatggacgcgagatggtggcgcgtgagaatgagatttcagcaaaacgcaaagaaaacccgcaggaggcatattttggctgccatacggacattacaatcccgtactccgagctggatacgatcgaggcgattcatccagatggaacgagtgtaaagatcatcgcgggcggacggtttgcgctgtcggggacggagaagctgaatgagccgctggaaaaataaaaagaaaaagtcatagaaaacaggtttattctcatataatctcctgaaaagggattccggagcagccggatgggagatagaatcagaaaatggatagccgttctgctggcaggaagtatactggtgatgattcagttggttccggtcggcggggcggtttttgttcgtgaaaacatagaaaataaagagattctgggagagaaagagacttctctacaacagacccttcacgcccgcgcctgggttctcatggatgcggacagtgggcgtattctggcggagaaagatgcggataccgcttatccgatggcaagcacgacgaagattctgacctgcattctcgcactggaacagggaaatcccgatgactgggtcggggtatcagagaaagcggcctccatgccggatgtccagctcaatatgcgggcgggggagcggtaccgcctatcggatctactctattccctgatgctggaatcccacaacgacagcgccgtggcggtggcggagcacatcgggggaagtgtggaaggatttgcggagaaaatgaaccggaaagcgcgggagataggatgtaagaatgtttgtttcgtgacaccgaacggtctggacgttgcggatgaggatggaaacgaacacagcgcttcggcggcggatatggcgcggatcatgcgctactgcgcgttccagtcgccgtgccgcgaaacatttctggaaattacccgtacggcatcacggacgattcaggatgagtcgggaaaccgttcattttacctggcaaaccacaacgcgcttttaagccagtgcgcggaggtgctgtcgggcaagacaggatttaccgggaaagccgggtactgttatgtggcggcgttaaaaaaagagggaaaagcatttacggtggcgcttcttggctgcgggtggccgccgcacaagacgtacaaatgggcggatatgcggaaactcgatcagtatgcatttgatacatataactggtatgatatatttgaccgggagaaaacatttccggaggtggaggtgaggcggggcgtgaaaggaacgacggcgctcacactgaatttgccatcggaaaaacagacgtttctgatgcttctgcgcgcggacgagaagccagacatccgttatgagtacccgaccgagctggaagcaccggttcatgaaggacaggaggtcgggcaggcatcctattatattaatgacgagcaggtggctgcttatccgatctatgcggcagaaacagtggagaagattgattatgggtggtgtttaagacgatgcatttcgtattttgaaacagaattcagatcaatatggcaaattcctgctgccaccacgttttcttacggcactttcgattccaaaagtgcctacccgtgaacagtagcgatttgttcataatagttttacaaaaatctgctttattttgctggttaattttgttataactatagatagtgtgaattactgagaatcatgaaaaggatgtattttttgcatagaaaaatatttccaatcaggactcaaacaaggatccggacacggaaacgtggaaggagaaagagaggcacggaggatgaaacagacatcactgagcagagaacaggggcttgcgctccttcgcaagtataataaagaaccatttcatattttacatggactgaccgtggagggcgtcatggagtggtatgctgagcagctgggatacggggacgaaaaagcattctggggcatggcaggactgctgcatgacattgattttgaactttatccggaagaacactgcgagcgggcaccggagcttctgcgcgacggaggcgcagaggaagatttagtccatgcggttgtcagccacggctacggcatacgggtggatgtggctccggaacatgagatggaaaaggtgttgtttgcagccgatgagctgacagggcttatctgggcggcggcgaagatgcgcccgtccaagagcaccaaggacatggagctttcaagtcttaagaagaaatttaaggacaagaaatttgcggctggatgttccagagatgtgatccgccgcggggcagagcagcttggctgggaattagacaaattgatggaacagacgattctcgccatgcgttcctgtgaggatcgggtcaacaaagagatggaggaactggagttttgagagaaaataaaccaatgaaactgttgtcggtagcgattccgtgttacaattcggcggcatatatgcgtaactgcatcgaatccctgctgccaggcggcgatgaggtggagatcctgatcgtggatgacggttccacaaaagataatacggcggagattgccgatgagtatgagagaaactatccgggaatttgccgggcgattcatcaggaaaacggtggtcacggcgaggccgtcaatgcgggactgcgcaatgcgacgggcgtctattataaggtcgtggacagcgatgactgggtcaacgaagaggcatatatggaggttctggatacgctgcgcaaatttgtccatgacaatgtgacgctggatatgctgattaccaacttcgtttatgaaaaacagggcgcaaaacacaaaaaggtcatgaactacaacatggcgctcccaaaacgccagctcatcgactggaacggtgcaagaggcttccgcctgggacagtatatcctgatgcactcggttatttaccgagtagaaatgcttcgaagctgcggtctggaattgccgaagcacacattctatgtggataacattttcgtttaccagccgcttccgcacgtaaaatccatgtactatctggatgtgaatttctaccgctattttatcggacgcgatgaccagtcggtcaacgaaaaggttatgatcggtcgtatcgaccagcagattcttgttacgaagctgatgttaggatattatgatgtgacgaagattaaaaatccgaagctgcgtcactacatggtccgttatctggagattatgatgacggttacctcgattttggcgattcgctcggagacagaggaaaatctgaagaagaaaaaagaactgtggcagtatctgaaacagcagaacttcacgttatatatgcgcctgcgttgggggttcctcggacagggcgtaaacctgccgggaaaaggcggacggaaggtgtcgatcgcctgctataagatttcgcagaagttttatgggtttaactagaaatccattataaaaattgaaataatatggattagaaaacgaaatcaaatctatcataaaagtgaaattaaaagatccgatcgtctggaaagtcgagtgtttccagatggtcggattttctgattctatgtcaatcattagatatgattcgataagggattaccacgtgatgaatgttagaaacctagttttcgtaacggctgcggcaggggggatttatcgcagataaaaagctggcacctgtcatactttggcgccagcttatgtttacttgtcttgagaaatcctttagcgaatatattccggttcgttctctgtctcttcctgcgtgcttcccgcatatactaacggatagatagctgcgcttaaaagaatcgcgcctgcgacgtccagaaccgagtgctgcttcagcgagacagttgccatgcagatagcgaccatcaggataccggaaagaatccggattactttgtgctttttcagagattcactcttcatgaccgcgatgtgggttccgatggagttgtacacgtggatgctcggaaatacattcgtgtttgtatcagcctggtggagcatatagaccagacgggaacagagattcctgtccggatctacgaccgtccgcaggtcagttccattcgggaacagggtgcagattaagagtgacagcgtcatgccggtaaataaaaatgcacataaccggtaatattcttctttgttcttgaagaacaggtatgcaatcgcagcggtcacataggcgaaccacagtaaatatgggatgacgaagtattcattaaacggaatcatatcatccagcgatgagtgcatgatatggtaattggaggtcacggttttttccagatgcataaaccacggaagatagataaatccgtatcccagaatccatatatgcccgtatttcttcaggagttccttcagaaaatgtttcatatcaatcaacctcgattttctttttatcataaataaattaacattattttaacatctctccaagttcgtctgattatagcacactcacccgccaacttcaaggctaaatagggattgttataaatattaagaaaaaggttatggaatgtgaaatttgttaaacaaaaattttatggatggacagggacgttaagtaaaataaaaacagcttgctcaactgcaagctgcttcatcaatagcgagagggggattcgaaccctcgacaccgcgggtatgaaccgcgtgctctagccaactgagctatctcgccatattaaattttaaaaagtgggacctacagggctcgaacctgtgaccctctgcttgtaaggcagatgctctcccagctgagctaagatcccgctgacactcgcacaaatcacgactgctttgcaagtataatataaattttcaagattgtcaacacttttgagaaaataatttatagaaattttcttatcatttaaaaggaagtatggtatacttatctcatgcaaaattgtaatggcgctgtatcctgtgacaggtattctggcagggtaaaagataaaatataacgccccagcaggggagtttctgtattttcggaaagcaggggacgttatggcaaaatatgaggatggagtaatgtattatttcattattaatcccgcttcacagagtggccgcggctataagatatggaagaaaatagagcagcggcttgtgcgggacggggttgagtatcaggcatatttgacagaatatgcggggcaggcgacagagtatgcaaggaagctgacgtcccactgcaaggaggcacgggtgattgtggtcgtgggcggtgacgggacgatgaatgaggtcgtggacggaatcgtttcctgcgacatggtgacgctgggctatattccggtgggaacaggcagtgatctggcgcgcgggctccggctttcgagaagaccaatgcgcggactgcgccggatttttagggcgcggcggatccggcagatcgattatggtgtgattgcatatggcgatgatgtgctccgacatcggcgttttattgtcagcgcggggatcgggctggatgcggaagtatgccagcatatgcagcgttcggcgatcaaaaatatctgcaaccggattcatctgcggcgattgtcgtaccggatactgggatttatacagtatttgaaggcgaaaccgatccgggggtatattttgctcgatggaacgcgccgggtggaatttaattatatttattttatcagtgcacagattcaaccctgcgagggcggcggattctggtttgcgccgaaggcggacagcagcgacggcaacctggaggtctgcattgtcagccatgcctcgaagcggcaggtgcttggaaccctgctccgggcgttgttccggcgctcccacaaccgggggctgcggtgcttcagttgccgggaggtccagatctacacggaacgcccgatggcagttcacgtggacggcgagagctgtcagtaccagagcaatctggaagtccgctgtattgaacgtaaattaaaaattgttggataagtgtatatttttcaaaagtataaaataatttatcaaataaagtaactgcgggcagtccggacagttacaaaatgaccaagaaaggaactggaatacgatgagaataggacagggatatgatgtgcataaacttgttccggatcgggaactgattttaggcggcgtgacgatcccgtatgagaaggggctgttaggacattcggatgcggatgtgctggtgcatgcggtgatggatgcgctcttaggggcggcggcactgggcgacatcggacagcattttccggacacggatccggcatatgagggtgcgtcgagcatcgaacttctgaaaaaggtagggaaacttctgcaggaacgcggctatgtgattgaaaatatcgatgccacgatcattgcgcagcgcccgaagctggctgcataccgcccacagatggcagaaaatattgcagatgcgctggggcttccggtcagccgtgtgagtgtcaaggcgacgaccgaggaagggcttggttttacaggcagcggcgagggcatttcctcacaggcgattaccctgttgacggaagtggagaattactgttatgatagtgaaatgatgacgcaggcagcggcttgcggtggatgcggcggctgtggcggctgtcaggcagcaccggaagcagatttaaaatagaagaggagtaatgaggttatgaaaattttcaacacattgtcccgcagaaaagaggagtttgtgccgatcgaaccgggcaaggttaagatgtatgtgtgcggaccgaccgtttacaattttattcatattggaaatgcaagaccgatgatcgtatttgatacggttcgccgatattttgagtacaaaggatacgaagtaaactatgtatctaactttactgatgtggatgacaagatcatcaggaaagccatcgaggagggcgtggatgcggagacgatctccaagcgttatatcgcagagtgcaaaaaagatatggagatgatgaacgtcaaaccggcgacgaagaatccgcaggcgactcaggagatcggcggtatgatcgagatgatcaatacgctgatcgaaaaaggacatgcgtatgtggcagctgacggcacggtttatttccgcaccaaatcctttaaagagtacggaaaactgtcccataaaaatctggacgatctgcagtccggcttccgtgagatcaaggtaaccggcgaggaaggcaaggaagatccgaccgatttcgttctctggaaaccgaaaaaagaaggagagccgttctgggagtctccgtggtgccagggccgtccaggctggcatatcgagtgctccgagatgtccaagaaataccttggcgagtccatcgatatccatgcgggcggagaggatctgatcttcccgcaccatgaaaatgagatcgcgcagagcgagtgcgcgaacggcaagacctttgccaactactggatgcacaacgcattcttaaatattgataaccgcaagatgtccaaatctcttggaaacttctttaccgtgcgtgagatcagtgagaaatacgatttgcaggttctgcgtctcttcatgctgagcgcccagtaccgcagcccactcaatttcagcgcggatttgatggaagcttcgaaaaacagcttagagcgcatccgcactgcggcagagcatcaggcagactgcctgaaagcagcgaaagagggcgagatgacggcagaggagaggcagaatcaggcagcagtcgaggagttggttcagaagttcgagacggcgatggacgatgatttcaacaccgcagatgcgatttcagctatttttgagattgtacgcctgagcaactccacgatttcggaagcatcgacgaaggcatacgtttcctatgtcaaagagacgatggacaaactctgcgatgtgctcggtattatcacggagaagaaggaagagattctggacagcgaagtagaagacttgatcgcaaaacgccagcaggcgagaaaagacaagaatttcgcactggcagatgagatccgtggacagcttctcgatatgggaattattctggaagatacgagagagggcgtcaaatggaaacgggcttaaatgcgtttaaggaagcgctgcatttaaaacatgttgaggcgggggagtattccccgctggcgctggcgtatatcggcgatgcggtctatgagctggcgatccgcacccttgtcatgaaccgcggcaatatgcaggtcaacaagatgcacaagaagacggcgaacctggtcaaggcggacgcacaggcacatttttatctgcttctggaggaagagctgacggatgcggagaaggcggcataccgacgcggacgcaatgcgaaatcttttacgatgccgaagcacgcgacgatgaaggattaccggatggcgaccggatttgaggcgctgatgggctatctctatctgaccgagcagtttgacaggatggcagaacttctgggaaaagggctggaacagatgggagaattaatatcgttataaatcatgatgaggaaaatagatggaacaggaaaataagcaggaaaatagatttgaagagacgatgatcgaaggcagaaacgccgttttagaggcattccgttcgggcaagacggtggataagctgtttgtgctggatggctgccaggatggaccggtcaagacgatcacgagagaggcaaaaaagcagaatacgatcatccactatgtggcgaaggagagactcgaccagctttctgagaccggcaagcatcagggcgtgattgcacaggcagcggcataccgctatgcagaggtggaagatatgctaaagctggcagaagagaaaggcgagccgccgtttctctttattctggatggcattgaggatccgcacaatctgggtgcgatcatccgtactgccaatctggcaggcgcacatggcgtgattatcccgaaacgccgcgcagtgggactgacatcgacggttgcgaagacctcggcgggagcgctgaattatacgccggtagcgaaggtaaccaatatttcagccacgatcgaggagctgaaagagagaggactctggtttgtctgtgccgatatgggaggagagagcatgtaccgcctcgacttaaaaggaccgatcggtctggtgattggcaatgagggcgaaggtgtcagccgtctggtgcgggaaaaatgtgatttcatcgcatcgatcccgatgaagggagatatcgactccctgaacgcatcggtggcagctggcgtgctggcatatgagattgtgcgtcagagaatgatgtagggtaagtgaaggttatcggtcaactgattccgctgctcccctccccgttggaatcatatagaaatatgaaaagataggaaatgagaatcggatgtctgcgaatgaaaacggaggcatccgatgaaaaaaacgggaaatttaaaaaaataaaaaaaattcaaaaaaaccgttgacaaaacgattgtatcatgataaactaatcgaggcttagagatgagccaaaaacaaaaagatgctgctgtagcacagtcggtagtgcgtcgcattggtagtgcggaggtcacgggtccgattcccgtcagcagctctgctagaaaagaacggaagcctttgatttacaagggtttctgtttttttattctctacttgcaattcattccagttgtgctataatgataacagtttggacggggacatagctcagctgggagagcgttgcgttcgcaacgcaaaggtcgcgggttcgaatcccgttgtctccatgatagagaaaggcttgaaaacattggtttttcctttgttttcaagccttttttgtgtttttaagatttcaagcggaacaaaatattccgttataggtacacacttttcggtacaaggatcacacgaaagatcacacggactttcagtatcgatgaatttgccgcacattttttctaaaagaactttcgaaaaaattcaaaaaaataaaaaaaactcttccattttgaactaccctatgttataataaacacacttgtgagtcagaaagacaagcaagcgggcatggcggaattggcagacgcgccagatttaggttctggtacgagagtgtgcaggttcaagtcctgttgcccgcactagaaattacgcagaagtggcggaattggcagacgcgcacggttcaggtccgtgtgatggcaacatcatgagggttcaagtcccttcttctgcatgattagctgtagaacctgagtgcagcgtggaactcccagagatgatttctccgggagtttttctttttctataaaatgaatcaaaaaggggcagacgcgcaagcgaaagccccttttgtaattcggatttgtaatataaatcaaaaaattagaatttctgaaattcttctacatttattacaaatacggttgctccgccgactttcatgttcatcggaacggtcatattaacggtcgggcagcagtttccggccatggtcggcggcgtgtatacaagctgctcgcgggcaccggacatttttttgatgatggagatggcgtcctcgacgcgttcatcttcgacaccgagcatcagggttgtacttttctttttcagaaagccgcccatcgtggaaagcttggtgacaaagaaggagtgctggtttaattcatatactaaatcatcggcgtcctcactgccaatgattgcgataatcattttcataagcggtacctcctgaaaaattttctattattgtaccattaatttatgaaaatggaaataaaaaaatgagaaatttatgttaaaatataaatgattatgattgcttgcaggtgagaattttttggactgaaaattccatctgccgcaggaatggcgacagatttgcgggatgagagaaaggcagaagtatgattcgaaatatagtatttgatatgggaatggttttactggagtatgatccggtcaaggtgtgctgggagtacacagataatccggaggatgtggagtggatgcgccgcgaattgtttgattcgaaggagtggtcgcttttagacgagggaacgctgacggatgcacaggcgctggagcgggtgcagaaacgcctgccaaatgaacatttgcgctggctggcgaaggaaagtctggaacactggcatgagtacaacatctgggcaaagccggggatgggagagctggtgaaggaactgaaagaaaagggctgcggcatctacctctgctcgaattgttccgtgcgcctgcgtgtgttcgagcaggagattccgggcattgaatattttgatggcacgcttgtctcagcggaggagaagctggcgaagccgaatccggcgatctatgagagattgtttgaaaaatttcatctcaaagcggaagaatgctttttcatcgatgaccgtcaggataacatcgacagcgcgaagggctgcggcatggatggttactgttttgcggacgggaatgtggagaggctacgggcgtacatggggaagatggaaatattatagaaaagcagtgcaaggtgtccgataaaaagattattttcctaaaaaacaccgggagagtcataagctgatgaaaagaaagtgaaaaggttttggaatcaggtacttatggtctaaaaaaaatacaaaatcagaaagaaatttgattgataataatatcacaatatgagataatgaagaagaatggggaaagatgcatttttagtaaattcccctggaagatgcatgtgaacaggcagttttttgaccgggaatctccggtgaaaggctgcgtctgttttataacggatagtgaggaggtcattatatgagagtatcgatttgtatcggaagtgcctgtcatctgaaaggatcccgcgaggtaatccagaagctgcagaagctggtttcagagaatcatctggacagtgaggtggatttaaatggagatttctgcagcggcaactgccgtaaaggtgtctgtgtgacggtagatggagaactgtattccgtaaaaccggagacaacggaagaatttttccagaaggagattctgggacgcctgaacgcgtaatcgtttacatataacggcaaaaagagagggagagtctatgccgattattgattttaaggcgacgatgtgtaagcattgttataaatgtgtgcggggctgcgaagtgaaatcaatcatgatccgggatggtcatgcatatatcatgccaaatcgctgtattctctgtgggcagtgccttttgaactgcccgcagtcggcaaaacgtgttccgagcgaactttccaaggtcaaaaagctgattgagagcggcgcaccggttattgcatcgctgtcgtcttcctatatgggggttctgccgtataaaaagcgggggcaggtcaagtcagcattaaaaaagctgggatttacgaatgtttgtgatgcggcggagggcgccgcgctggcgacggaagagtatgtccgtttattagagcagggcgagatgaaaaatatcatcacaactgcctgtccgagtatcgtgaacctgattgagattcattatccggaactgatcaaatatctggcaccggtgctgattccgtcggggatccatacgcgcatgctgcacgcggagttcggcgaggcggcgaaggtggttgtgatcggaccgtgtatcgcggaaaaagagaaaaacagggttgtgaagcccgatgcagtcctcacatttgaggatttaaaacagtggttgtcagaggaacagatcgagatcgaagcatgtgaggaagaaccgttcgaagatcgtgaaccgggcgcgaatctgcgttatccggtcagcggcggactgcttacggcggtgacggcgacccagaagaaaccggacaagtaccgcaagttctacgtcagcggcgtgaaggactgcctggatgtctgtgaggcgatgaaaaccggcgaggtggctggctgtttcatcgagatgaacgcctgtcatggaggctgtgtcaatggaccgtccacggcgacctcagtgtcgagttttaaagttaagctggatctggaagcgatgcttccgaaggaaccggcagatctatccctgatgcatgaggcggcgcgccaggtggagattcaccggacgtttgtggatcgttcccagaaggagcggattccgaccgaggaagagatccgggagatcttgaaaaagacgggcaagatgacgccggagcaggaattaaactgtggtgcgtgcggttatccgacctgccgggagaaggcgatcgctgttttccagaaaaaggcggaggtcgatatgtgtattccgtacctgcatgaccgggcgcagtcgctgtcccatctggtgatggatacgtccccgaacctgatcatgatcatcgacgatgatatgcggattcgggagtgttcggtggcggcagaaatgtatttcggcgtcaaaccggaggcgatcaagggaaaaccgctggaggactttatcaacgccgaggatgtacgcgaggtattccggacgcacacaagcgtccacagccggaaggtgatctatccggatcggaatcttgtgacgcttcaaaacattgcgtatatcgatgacggcaattttgtcattgccacgatcattgatgtgacgcgcgaggaaaaacaggcaaaacaggaatatgccaagaaaaaggcgaccattgatctggcacagaatgtcatttacaaacagatgatggttgcacagaatattgccggactcctgggtgagacgacggcggagacgaagacaaccctgatgaagctttgttccctgattgacgatgagagcgaaagtgaggtccgataaatgggagtaaccgtagatgtcacgtttaaaagtctgaataagtattcagagatcctgtgcggcgatacggtagagtgcctgaaaacgaaagattcggacgttatcattctggcggacggcatgggaagcggcgtcaaggcgaatattctttcgacgctgacggcaaagattctgggtacgatgtttttaaatggagccacgctggaggaatgtgtggagacgattgtgcagacgcttccgatctgtcagacgagacaggtggcgtatgcgacgttctcgattctccagattttcaacaacggcgaggtatatttagttgaatatgataacccgcgatgcatttttttgcgctgtggtcatgtggtggagctgcagaaatacaagcgtctcgtcaaggacaaggagatcagcgagtgccggttccaggttcagaagggtgatgcgctggtacttgtcagcgacggcgtgacgcacgcgggagtcggaaagagcggcaaatataaatttggctggccgtgggagtcggtggcagagtttgtttcggaacaatgcctgacctctctttcgtcggcacgtatggcggcggcactctgtgcggaatgcagccagatttacgagggaaaaccgggcgatgatacgacggttgtggtagcccggatcattgaccggaaaccggtcaacctgatgacgggaccgccgctcgaccgcaacgacgatgagacgatcacggcggattttatgaaagatgagtcggcaaagcacattgtatcgggcggaaccagcgcgacgatcctgtcgcgggagctgggacgaccgctgcgggtatcaatggattacagcgacccggatattccgccgatcgcttttatggaaggcatcgatctggtgacggagggagtcctgacgctgcgaaaagcgatcgaacttctgaaacgctatctgatcgaatgcgatttaagttctgagtttttcagcgagttggacaagaaaaatggtgcgtccatgatcgcgaagattttgatagaagactgcacggaattacatatgtttgtgggaacggcggcgaacagcgcctaccagaatccagggctggcgtttgatctgggaatccgccagaacctggtcaaacagctaaaagaagcagtcgaaggtatgggaaagaaagttacggtaacgtattattaataaggaggataaaccatggtaacgaatgacgcgacaattctgcgcatcaaacatgagatactttatgaggtagcaaagcttgcctggaatgatcagttagaggacggaagagacgatattccgtacaaaatcagccctggtccgcaggcacagtaccgctgctgtgtatacaaggagagagagattgtccgccagagaatccgtctggcagaaggtaaatgtccgtctgaccgcaatacaaacaacgtcgtacaggttatcaatgcagcctgtgaggagtgcccgattgcgtcctacacagtcaccgataactgccgtaaatgtatgggtaaagcctgccagaactcctgtccgtttggagcgatcagcatgggaaataccaaggcgcacatcgacccagataaatgccgcgagtgcggaaagtgttcccaggcatgcccatacaatgcgattgcccatctggagcgcccgtgtaagaaggtctgcccagtggatgcgattacctacgatgagtatggtgtatgtgtgatcgatgagaaaaaatgtatccagtgtggcgcctgcatccattcctgcccgttcggtgcgatcggttccaagaccttcatggtcgatgtgatccgcctgatcaacgcaggcaaaaaggtcgtagcgatgctggcaccggcgaccgaaggccagtttggaccggacatcacgtttgcaagctggaaaacagctttaaagaagattggatttgcagatatgatcgaggttggtctgggcggcgatatgaccgcggcagccgaggcggaagagtgggcggaagcttacaaagagggcaagaagatgacgacctcctgctgtccggcatttgtcaacatgatcaaacagcatttcccacagctgcttgacaatatgtccacgacggtttccccgatgtgtgcgatctcccgtatgctgaaggcgcaggatccggaggttgtcactgtctttatcggaccgtgtatcgcgaagaagagcgagacgctggatctgaatatccagggcaatgcggactatgcgatgacttacggagagatccgtgcgatgatgcgggcgaaagatgtaaatctggagccggaagagaacagcatgcaggaagccagtgtatttggaaaacgcttcggcaatggcggcggcgtaacagcggcggtattagaatgtctgaaagagtctggtgagaataccgatatcaaggtagcgcgctgcaacggtgcggctgagtgtaagaaagcccttcttcttctgaaagtgggacgtctgccggaggacttcatcgagggtatggcgtgcgtcggcggctgtgtcggcggaccgagcaagcacaaagccgagatggaggcgaagaagtcgagagacaaactcatcgccgaggcagatgcaagagaagtacatgagaacctgaaggcgtatgatatgtcgtcgttctcgatgcatcggcattgatgtgggatactcttgggagaatgtggctgagataaaataaataggaatttatatatgagttagtgggaaagtgcctgctctggaaaatgaaatttggaatatgaattttattttctggggcgggcgtttttcgttgtgaaaattccaaaagagttcttgcatttagagaatagatgtgttagactcaatatatcttatcgaaatgaactgcggtcgcaggtggtttcgttctaatttatctttttattctggtaatttgtgaggtgcgtttcgcacagaattcgatgatttaggaaaatttgggagaatcggataactgtatcgttataaaaaatgtgcaatatattatatgatatatgcaatgtaaaatgaaagctttttatagacggaaagaaccgttgtttaactcagagtgaggatgtgaaaaaggtttgaggggggaggtttgagttgttaaaaataaacatgggggctcataaagggcgtcgctgccggaatggtaccattttgggaatatcactgatattgatattttcatccggtagaatggcgctggcagctgaaaatgcagtgaaacaggcagaaacagctgtcatagtcggctacagcgtctcatttatagatgctgagaatgcaaatcatcttatatttcatacgcaaacgggcaaagttttggaaggaacttctctgaatgtatctttcccagagcaaatcatagggagcgacgggcatatctggaaatcagcggtacagtcaccgcaaatatttgaactgtatggaacaggaactgaaaaaatttatatcaaatatgaaagaggcggcaaggtcccagaaatgggagcagaggaggatgccgccatgctggcgcttcggaaacgcctggaacgatggaaacagagggcatgggaggcagagtgcgccatatttgggcgcgaggatgcggcggtatcgggcagcgattccggtctgaccgttcaaaatcagtcggaaaatgatgccaggatccggaatctggtatctgcgatcggggatgcagcgtggcatgaattttatctgattggtcaggattttacaccatcggcaaaaacaatcggggtggaatacgacgcggtttattctgaggtggaagaggattccttttcggtggatggaaaggaatatatcatcacgcgcatccgggtgcggagaaactgggatgaccgtacttgtacgcatcagtggagccaatgggagtgggaggaaaatgattgcttaaagaatgggcgggcagtgtatgtctgcggacgatgtcagaaagaaaagatagagcgccttccggcgctggggcacctggatgaaaacggggatcaaatctgtgaccgctgtggaagcgtggattggagtgaaagtgaaatgcccgaaaaagtgatctggaaggagggcgatgtccagctgcgcgaggtgggcggagagattttgtcatttacctgtatcgacgacgattaccatgactggcagaatgaacaccggaaagcagcgctgtttctctgtgaccgcgtgatccgggcggatgtggacacggcaccgggaaaaaagatgaagattttctcgtttggcaaagacaataattataaaacttcgcaggtgcgcgcatggctgcagaaaaacagtcagaacagcagtttctgtctggaaccgatccatacgggaatccagaccgcgtacacgggaagcacggcggctggtgcattttcgcagacgtccgggcgggaactggtgcgtcaggatattggttttcagtttatgaacgaccagcttttctgcctgtcattggaagaggcacttgcgtaccgggaatatctatggcggtttgattccggggatgataacccacaaagtcagatcagtacctattcacagggatattatctgcggacgcctttttatttgcaggatgaaaacgggaaattcatttataatcagcagatttatggcgttgatctggtaaatggctgtctgcgtccggtgaggacggacagtgagacatatggagtacgtccggcatttgcactgtcacagatgtaaaaaagaatacttgttgagcttggaaagcgggagtgaagctgtttggcagtttgattaggagaaaagattggacaaggggaaatcaatctaatgtttggggaaagaggggaacgtgtatggggaaaaagaagatgaaaaaagtgattccatttgcggtgatgacgacgatgcttttgtcggcgacgctgccggcgtttgcggcgagcgggtttgtgtttgaggattgggatttggggattgtttcggaaagaaaggaaaagttggatgatacagacgatgccataaaaaggcggaaagaatggcagaaactggctgcatcgtccagtgagcttatgaatgcggatgtgagggcaacttcctctgaattacgttcttccaaagtcatagaggcaactccttcacaattaatcatgtcgcgcgttagcgtcagcgccagcctcggaaatctctgggaaaactgggatgtggcggatttgagctttctggatggaacacatggacttggaacgaaacaaaaaccgtatcagatacgcacgaaacatcagctgatgggacttagcttcctggcggcgtttggcatgcagccggattacggcgaggtggaagaagagatcgtgggggattaccggggcgcatggtttgagctgacggcgaacatcgatctgggaggaatggactggaatccgatcggttattaccgggatgattcggaattttcaggggaggtgacgcacccgtttacggcaaatctggatggaaacggttataagatttcaaatttccggtttgcaggaggcagttcgccgaatgttggattctttggtgcgctggatggggcggagatccgaaatctgacgctggaaccaggaaagccggtcaaaggagtgcgtcaggtgggaattttggcaggaaatgcgaagaattccaagatttttaattgtcaggtaaaaggcgatgtggaaggaaccggagcggtcggtggaatgatcgggcgcatggaaggcagcacggtggaaaacggaatggcacaggtaaccgtccgaacgacgggacgtgcagccggagcgcaggcgcttgcgggcggaatcgccggggaagcggcggatgattctcgtatcattgactgccaggtccgcaccggggataacagcacctcgcggattcagggaacggatgcgactgtcggcggaatcgtagggcttcagaatggggcggctctctacaatacctatgtaaatggcacgatcggcggttctggcagccagaatgtcggaggactcgttggagaacgaatcagcggagacttgaaagtggggcggtttgagggaacgatcggtcagtcgggaactggggctgccggacacagaggaaccttcatcggataccgcgcaccagctaattattttaaatatggggatgacatcgcgtacctgtttgcggatacggaggcgaaaatcgcaaacaatgtctgtggaagcggcatttcagatgataaccagtatacatacgcggcgcacatcggatattcccacgcgagggacaatttcttcacgctggtatccggcggtgtcacgcgggatgtggacgagcgatatttttatgaagaactggaacaggggattctctcgattgtggatgaagagctgggcggggagatggatgcggagtcggtggggtatgatcttgaccattttgcaccaaatgatgcgggacgcccggtccgtggttatctgattacgattccgcagatcgataccgtctccaatggaacgaattattacgatgtggcagtgctggaagcacggggaaatggcgcgtattaccggacactcgataaaaaacgccgcggtgcggtggcaccgggaaagacggtgacggtcagcacctcggcaaagcaggcggaaaaagcgcgctttcagatggagggagttccgacgtacacgcgtgggaagagccggaaagatactacttatgtaaatggcggcgagtattgttttacgatgccggaggaaaatacgcaggtgtcggcggtttataaaaaggtggcagtttcggtcggtctgacgccgggcgtgacgaaattccaggtggtgcaggagcggaccggaaaccggaaacatccgacgaaagtcacacgcgtgatggatggaaatggaaaattaattgcgacgtacatccatggaaatctgcaggcgggaacacaggtgcagccggtgacggtgcaggcgattgtggatcggaataatgatgtggcggatgcatcggtgcgctggagtatcgacgattcagatttgattacgttacttccaaatgacgatgaggaaagtggttatacgaaaaagagcgcgtcagtccaggtaaatttaaatagttcgtttatcactgatatagtccggaaactggaaaaagagcaggcagaccgcggataccagtatgcgatcggaagcgacatatacggagcggggcatcagaacggcggcgtggcggtgctgacggcagagacgaaaccggcggcgagctttgatggaaagccgtgccggggaaatgcgcggattgaggttacgttccagatcaaggatcagacctatgtagccaatgaggaggcggcactggatcaggaacagttgaaatttgaggtggtgcggacattaaccggaaatcggaaacatccagatgaaacgattcaggtcacggcaccgcaggcgctgagtgcgtcttttacaccggattattttgaccggaaagagatatcgtggactgtcggtgatgcagcactgatttcggtggatggcgaggacaagtctgccagtgtgcaggcgaaaaaggatgcaaaatggatccgggatctgatcgcggcagatcagggcagacatgtgaatacaccatatgaaatacagacagcttccggcagccgcacgacgaaggtgacagtgatcggcgatgatatgcttggaaaccggcagacggcatcgtgcagagtacaggtggatttccggacagtggacgaatcgaagatttgtgtggaaggcatcagccttataccgaaaacgctgcaatacgagatcaaacgcacccggacgggggcgggttatcgttcggtggaggcatggacgggaaccggtgcgaaaaagctggcagcgtcggtatttccggcgcaggcgtttaaccagaaagtgacatatcaggcaagtgatgattcgctgtatgtatcatcggatggaaccgtgacggtcaatacgacggcttcctggatacaggagcttgaccgtcaatacttaaaatcaggcagccatacggcatatgtgaccgtgaaaaccgaggatggtggcttcacggaccgggcggcagtcacaattcagtatgaggcagtcgatcagacatacagcggaggttcccattcgggcagcggctcaggtggaggctcttcttctggaaagggggcagcggcaggaagcagtgcagcgaatgcaactggaccggcatcggggttcagtgatttgacaggagcgggtattggaaatctgacagaaggacaggcaggccccgggcagaatgcggatgcggcagccataccggaatatgtagtagctggaaactggcggaagaatgcagatggaacctggcagtttgaagcgggcggtagaagctatgcttctgagtgggcggctgtctacaatccatatgccgatccggcaaaggggcagagtacgtttgactggttccgatttgatgcagatggcaggatggtgaacggctggtatacggatgtggatggaaacacgtattatctctggacagaaatggatggaacacaggggcgtatgctgactggctggaactggctgccgggaagcgatggagtgtttcattgctactattttcaggaaaaatccgatggaatgaggggacgtttgtatcaaaatacgcacacccccgatggaaatttagtcaatgcggatggtgcctgggtgctggacggaatagtacagacgagaagctgagagaggaggagagaagaaaacagaggtaaacaggaaaatgaagtggaatgacacggaaagaataaaaaatgggggtaaaaaaaatgaaacaggataagaaaacaaccaataaatcgggatgtacagccgtactggcagcagccatgatcgcagccggaggtttcagcgcttatgcgggcaatcaggggacgcatggcggtgaatggaaggacacagagagtctgagatgggagtggcagaatggagagatgagtttttatggaaatggaagtattttttcagagcagcacccagagatcagcgatccagaatattacctgaaagaggcagtccgttatccgggggaagcaaatccagggtggaatacgaagggagaaccgaaagcaaattatagctgggcttcggtcgaagaactgcagaaatttgtcaatagttttgactggattcatttggatgaaaaaacgcgtcttctgtatgtgcataaccggattgcaaacggagagggaggttttaaccagaatcattacggttcgccggaagaggcaaaggatttcccggttttggaaggaggcgttggcgtctgccgggatttcgcggaagaatttcagttcctatgccagatcgtagggctggagtgtgtgacctacacgccggagtatctccatgatgcgtgcctggtgcggatcggcacgcagtggtatgcgacggatccgacctccagcctgccgctattttcaaatgcgaaaacatatccggttgactttgagacggagttttaccgctatgagaataaggagcgggagcagagaagaaaggactatgaagcggatccagacagtcttgccaatgtgctggcgctgaccttgagtatgcggggagaagggacgatttccgagtctgcctgggagaaaatacaggcaccgatggggcagatagaagaacagtggggacgacaggaaatatcaagacaggagtatgaaaaggggattatctcgctgctgaaatcagtttggggaactgaaaaataaagaaaacgagggactgccggtgttaaggggcgcggggcagtaaaaacgaggaggaagtttatgggggagtatcggtacagagagaatgtgaaacgggggatggcgtttgtactggcaattatattgggaggaatggcttttttgccaggattcccggtttttccggcgaaagcggcacctgcgagtggtcagcagacaacactgacgacagcccatggcgatacgctgctgggacacaagctttattgtatcgataagggcggttatgcgatctggggaattgcagaaaaaggggatctctatgaagcacaccgtccctcccaggcatccgttccgctgagcagtcaggaacagaaatatgtattttgggcgatgctctcgctcaaagccgcgctgggggatgaaaaggcaaatacatttatccgggcgatcaatgtggcagcaaaagcacagggaaaaccggaaattatcaagatggtgtccgaggaagatctgaaaacaatcctctatgttccagctgtgcgggcaaaatatccgtggctggaggcagctgcgtcaaatagtgaggcgtacatgcaaatgggaggaatgctgtctggcggaggcagcggaaaggaaaataccggtgtcggcggcggaaagattccaaatgtgatagcttccagcacctcgctgggaacggcaaaacaggtagatgcggcgactctgacgctgtcgtttgcgccggatggctcggattgggattttatccgttctgtaccgcttgaattttcaaacaatgacggtgtttcattcagtccggttccgaccgatggatggacatatataaaaaccgactcgcagattgtatttaaaaatccaaatccaaaaccgtcgaaagccctgattcgtttccgggtggaaggaaccccatacgcttcgggcggcgggggatatgcttcggcggaggaggcgattgaccagtcgcttcaaatctgggagtgtgtgacctgttcggggacacacggaggcggaacgcctgccaaaagtgatccgtggattcatcagcggatggcatggatggagctcggaatggttccggtcaattattttgctgcattggcgggcgatccaaccccggtaccggagcagggaggcattcagtttgaggtatttaggcatgaagaggattttacttccacctataatctacagatgtataaatacgatcatgagacagggaaagcgctggaaggggcgcggtttggcttctttgagcgctttgacgataagaacagggtaaatactgagcgggacggagctgccgaattgtatgagggcggagaaccatatgccagtcattatcaggatgagccggttctctgggatggtttcagacaagtgggttcggcggtaacagatggcgatggctacgcctcccagacggtggaacacggttatcactatgataagacgttctgtgacggtcatccggcaccggtctttgtacctgttccagaggaagaggaggatgaagagggagaagtcatcaatgaggatgagattgaggcggcgcaggcagaaaatatccgcctggcaaatagctggcttttgtgcgaagaggaatgtgaaagaaaggcgggcggagactttgagggcgtccatttccactggataatggaggaggtcgatgcaggggagatagaaggtatcgcgtcagacggcggctccgagggagaaacacccgatgcgggaccgatgacaggggcagacggggaaacttcgtatgcaaagtctggctgccaggaggactgtgggcagacgtatgagaagttcatttccatgaagtacagttatacctggaaagaatttaaagcgcgggatggatatattctgcatgatgaacatgcagatgacctgccaattgagattatcacaaccgatgcatctgagcatggggcaaatgcagcctttggaggcggatattcgcgtgatgtggtgctgggaacgaagagtgtgagaaggagtcagggcatcggagaggcttccggaaatcagaatggagaaagtgaggcgaaggcaggaatttctgaaaaaaatggctgggatcgtcgaagtgcgtctggctggacgatccgggaaaatttagcggcttttctgggggagagtcctgcatttccagggccgttaaaaatgcgtgttttgccgcagagggtggttctgtttacggcattggatgcagcgcttctggggaaagggacaccgtcggaggcggagataggagaaaaaccgcaagatacaggaagcaaagcggggagaaataggagtaagacaagtgaaaacaaacaggacataaatgaaaaaggcagaaaattgacacaggagaagaaggaagcaactgcctcggagatgaaagtctctatttcggagcgtctggtaaatcgcgtccagaaaggttttgtgtttattgatgaagcggatgatgatttagaagaagcagaaaaagcggaacgtgcaagtattcggcgatatatggcaaccggctcagatttattgacaaccgaggcaggtttttatacaagctggcatttaccttcttcgttgtatcaaaatccgcagttgtcacaaagaacggaaacactggcgggtgcggcagcagagtctctatttttcccagcctatgaatcggcgcttgtttccgcgagtgtgggttcagcgatagagccgggaagtgctggcaatttcagccattgcaatggggcagacggcgagaaagatgcctggaggatctacgatcaccggacagagggcgaggtacatatcaataaaaaggatctggatctgaaaaagggcgaaaatgagtcttacaatgcgcttggggactcacagggggatgcaacgctggaaggtgcagtgtatggcttgtttgcagcagaagatctgctgcatccggacgggaaaacaggggtagtttaccgggccaatcatctggtggcggtggcgacgacagacaaaaatggcgatgcctcgtttctggcatgtacagaggcgccggggcgaacctatgattattcgaaggggacaattgcggatgcagcggatggatggcgaaagaaagcgccgggaaatctgtatacacaagatgcggcgatcgatgattatacggcagataaagcctgggagcggatttattataacaatacgtcaaagaatggaaatgcctggattggacgcccgcttctgatgggggaatattatgtcaaggaattaagccgatccgagggctttgaactttcgattggaaataaacttcacgcagttacaaacctgggacaggatctggaggcagcggtcctggaaccgggagaaggatatgcccatatttccatgcagatgtacggggaagagcaggcaggcgatggcggcgctgatacgaatgaaattttcttttcggcagagtcgaagaacacgaaagagggagtttatgagattgtggtgtcagggctgccggagggcgtgagcttttatcgaaaagacgagggaaaaggaacggtttcggtggaagctgggacaggtgagtatgaaaaagtttataccggggaactggcagtggcagagaacgactatcagtatccaaagtacaatgcggatggcacgccgatgaataaaaaagttccgattgagtatgcggcggggtggatgcgccaggtccgggtgcaggaacttgtgccggagacagtggaatcagttcttttgcaggcagaaacgggaatgaccgaggaagaaaatgcggacaagctggtaaagacatttgatgtggatgacttttgttatctgaaagggaaagctgagcgggtactccgcagacatgcgaaaacaacgccgagaataccgggagcaggaggaaatgcatattccagtatctataccggcgtatttgaccggggtgtccgggaaggagagcgggacgtgtacggcgtcagcggtgtgacgccgggagaaaaggcagaaaaaatagtgtatggttctccggttcagacgattgcggtgccgaaaacaaaagatggaatttcaatgacagtgggagacgcgatcacttccattctggatttttatcatacccatccatatatcagctatggcggtctggacgcggtgcatgagtattcggattcgtttgaatttacggtatatgcaggaattttaggaataccggaaaattttatggtactgggaagtgatccggagaaagacagcttgatttttcaccgggcagagtggctgccggataatatggaaatgtgtccgcgttatgtgtatataccatattcaaataatcgcgagcgggacgcatttggaacgtataccgattacagggaaacaactgctggaaatcaggtgatggcgtcggcacttttgcagaccgatgctgcgattgagggagatggtacgattgttccgaaggaaaatgaggtaaatgtctattacaaaaccggggaaattccgcacgatgcggatgggcagccgatccgggtatttatttaccaggaaaagacagaaacacagcagcgggaggtgacggagacaaaatgggttcatcaggcagcagagcggaatgcagacggaaaatacatactgcagatcaacgcgaattttaccgacagttttggtgtaaaaaaaacaaatgcaggtgtgctggaagagctgggatttaaggcggtattgaaagagaagaaggttacactgaacgaggaagaagccgcaatgctgggaaatggtttctttgccggtcaccagatgaacagttccagctattacacgtgggtaaaacaggcgcgggcaaaggcatatatcgattctggacgttctggcttgataggggatgattcctatgtggtcccggtggcactggcataccctgggcaggagaccacctatcaggatgccgggacaagaaaagaaccgctgggtgtactggagcgtgtgatccgccaaaagataaaaatcatcaaagatatagcgacgacgccggagaacacctatgcacataacacttatgcggaaagtggacataccgatctgtttacggaaaaagagggagggaaggaaaatgtcgcttcggcactgccaaatttccgttttaagctctatttgaaatccaatctggaacgtctgtaccggaatacggatggcgaaatcgtgtggatgaatcgggatggagaagttgtctcgttgccggaggtaaaaaagaattttccgctgcttatagaatcctttgctccggttcagaaaattttcacgcaggtaactcataaaaaagattcccagacggctggttccgtcaataacaatgtctgggacagcgcagtgacggcaaatgatcgtctgtacgaatatggaaaagacgggcagatcgcggattcgaaagaggtcaatcaggggtatacaagacttcttgagacagtcatgcggatcaaggaagatggagcgggagcggtacgggaagttccaggctatcagtatgagaaatttttcgatgcgatggcggtggcgaaccgggataaatggcagcgggcagatgcagcagatacatcctttaagccgtttgcgtggatccgtacgggtatttttggaagcagcggcggagaaacaaaagatccggtgcatcataacaatgcggcgatacagaatcagagccgtacgtcagaagcagccatagaaaatgcaaaacggtcggatgctgtccgtcagtttgcgattgactggtatttgaagaatgaggtaaagaagcagaacattcaagcatcgggagaacaggaaagctatccggattatatctatgatgaagcattatatcaggcaattttaaaagcagaggaatatttgaagccgtttttctcctatgatttggacgatttatacgcgattgagtgggacagcgcggaaaatggaggttccgatcgggacaaaacaacgttgtcagcggaaaacttaaaaaaatccgaggaaagttattattacggcgtttcgaaataccttccttacggaacctatgtggcagtcgagcagcaaccgtattcgggagcactggaagatttcaaaaatcagcattaccagatcgaccagccgaaagaaatagaagtcccgtcggtttatgaggcaggtggaaacctcgtatctccggaaaaaaagtcagcggattatcaatatgacgcctcggcattgccggaaacgctggcggcgaactatcagatccggatgaatgaagagtggggagatacaaatcaggcggatttgaggaaatatgtgatccgcgcacatggacaggatggaaattatgagatttataagtatggtctggatgcggataaacggcagggaacgatctcctatccaggcggaagctatgactacagcggattttcgcccgctcagagggaaatggcgccgtacaaggacatttatcggtctgaaaatgcaaacagccggtaccggagcaacgagaaggtagaaagctattaccgctatggttcggtctcagagcaggcagggtgggcagattcagtggaatatccgtatggagagaagacggatgataacaatccggcgggattttatctgaaagatcatgtcaggacaatcaccggggcgctgaccgggtttgacgggcggtattttcagggattggtgccttacagtgtgacagaaccggcggcggagtctgcctatgatgcgttgggatttaccggctacgcggatggaaaataccggaatacgttttatgctgcaaagcttcggattgaaaaactagattcggagacgggagagaatattctgcatgatgatgcggtgttcgctatttatgccgccagccgggacacgtcgaagtacagcgagggggaggtgcagttttatgaaaaagatacacaggtgacagccagccgggaatttttggaggcaatgggggcaaagaaaatcgcgccggttgatttgaaaacgctaattccgtcaaaatacccctggaaagcaccttatacaggaaaatatacaggcataatcccggcaggaactccgatttgcagtgaaaccgatcaggtggtgatgcaggatgcctttgggacgcggacgggcacattccgggtttattcgacgctgcaggattttggtggtttgggagaaactctgccgtccaaccagaatacaggatatctgatcacgccgcagccgctgggagcaggagcctatgtgttgtgtgaattatctgtaccggaaggatacgtgagaacgaaaccgatagcggtggaagtgtattcggatgaagtgacgtattatcgggacggagagcgcggtcagcgggtggcagctgccgtgtatagagaaatggtaacccggataagcagcaacggagaagcagtccagaatccggatggaacgaagccaaatggcaataagccgcaggaccggggggatgtggcgcggatttatgtaggaaatacgccgatccggctggaaatcgcgaaagtaaaacaggaggaaaaggagattttgtttgagttgagcgatcggcgagagggaactttgaccgagctttcgaaccgttatggtcttgaaaatctggaactggcgtacaatgcgtcgggaacgttccttggatatgggtggtcaaagggctggctggatagtctgagggcaaaacaggaagccggggagtggattgacctgatttatgaggatcaggtttttactggaaaggcgatctggcatcgggttccagatacggcgcacgcactcaaccgctatcttccaggtgcatcgatgtgcctgtatgatgcgatcgaggtaaagaagaacggggacagtgaggatcgggcgtatgccggtgtcaatgtggtgcgcgattcgtttggaaatgtgatccggatgtatgtgcagaaaggttatgcgggaaaccgacttctgtatgtgagggataaagatcaagagggggaagatagcgaaggagaaaataacaattatacacgatatacgcaggatgaccggttcaacgaccagggaaaaggcagatggattctcaagcgggttgaacgcgaagatacagacattttatattacgatctcggggctctggaggtatttacgacactccggggcgtgcggtatgcctataacgaaaagggcgaactggtgcgtccaaaagacggcgaaccgatctatgcgatgaaagacggtgttccatttctggaaattgtaagccccagctatgaaaaactggcgtacagtcggaaagaaaggcggtttgaatacgttccgtccgggacaaaattctatcatctggcatcagacggaagccgggacagcgaggtagaaccgtacacgggaatggcatatgtgacggaggagaaaaccggcaaaacattggtgtgggtggtccgggtatcgaaggatcgctatggaaatgtgattgccagggataagataaagactggccgcgtagcaacgatgtatgctgatacggaacaggaatacacgatcgggacatatgacggaggtctgctgcagccccatgtcaatccggttttgaatgaaaatgggctgccggtttattaccagcgttccgatcagacctatatcaaaggatatcccgtttatgatcgggatggcgattatgtgcgttaccgatacagcgatcttctcagagcttacaatgccaatgcatgggatctgcagttgaaagcagcgctctatgatattggaaatgatccggaaaaacgggaagatgaccgaccactgtaccatcgtcagggtgaggcgtatctgatggaaaacagctggataaccggggatgaaatgccaaacgatccgttccatacacggatcagagatgggcaggtggacgttttaaaacgcgttccggtgggagtgtatattttagaggagacgcgtgccccatccggctatgcgaaacggatgccgacaggtcttacggtagaggaaacctgtgaagtacaggagctgcgccttactaaccgcccgatcacggtgcagattgaaaagatcgacgcgccagaacaatatcagcagccagtccgggactatgatcgcattttgaacgaatcggattctaagacctgggaggaaggaaaaggaggttatacgttttcaagtgtggaaggagccgtgttagcgctctatccagcaaaaagaattgcgagtgatgatttggaagcacatccgtccgggtattatctggaaaagaaaggggaacttccggcgaactggacggtactggatgagagaaaccagaaaaagacagtgactgccaaatggaccgtcggaaagacgccaatggcatgggaggggattccggcaggcgattatattctcggggagatagagacgcctccgggatatctgacaaatcaaatggaggtggaaatccgggaaacttctaagctgcagctcatcacgatgcaggaagatcatataaaaactgcctttttcaaatatgaggagaaggatggaaaaaaagaatgtctgccgaatgcatatgcggcggagctgaccctgtatgaggcagtgacagatgaaaatggaattgtcatggaagcggatggaacaccgcgctatgaccgggaaaaacgggtgacgagctggaagaccgaagatgcgaaagcctacagccaaggaagcgacagctttgcagcccgctatcagaagctgtatgcagaatatcatacaaggtttaacgcggttacatggtgtggatataccgctgaaaaacaggaagaaacggcgacagaacagggcgaatcagtgcgtcagctctggaatctgggaaatggttcgcaggtgcttgttcaggtgacgaaaaatctgcagctagatggaaaagcaggctatagctatgatttccgatggaattaccaggcggagggaactctgatcagttatgatacctccgatgggattcaccgaattgattatttaccgctgaatccgacgaaaaatgatttggcttcgaacagaaagaaaggctattacgttctggtggagacgaaaacaccaagcggctatcagaaagcagcaccgaagccggtgattgtcgaagaaactgctgaaattcagctttacgggctggaaaatagggcaaagtctgtctatatttccaagctgggaagctcaggagaggcatccgaagaggcaatttatctggcaggcgcagaacttgctgttttccgggcggcacaggatggaagcctgatgcaggaaaaagaatatttagtggaacgctggatttctggatcggatggaaaatttacagaggaagaagcagaaaaacaggagattccggcaggctggaaggcaggggactggaagccgcatcggatttctccgattgcctatggagtgtattatctggtggaactttcggcaccggcaggttatcgcctcatggaacctaagaaatttacggtggcggctgcttcgggggagacaatcgaagcagttaatacgttgaaacagggacgggttcgggttgaaaaggtggatgagagaaagccagaggaaaaactggcaggtgcggtgtttgaagtgaaaaacagagagacgggagaaaaggttcagatggagacagacgagagcggtcaggcggaaagcccattgctgccaatcggaacgataggggagaatggaagctggattccgtaccattacgaagtccgtgagacgatgccgccggatggatatcaacttattccgcgcgtgtacgaggtgctgatggaagatcagaaggaatgcgaggtgctaacgtataatctgacggtgccgaatgaaacaacgaaaatcaaaatttccaagctggatttcgatacgggtctctttgtgtcagaagcaaagctggcagtgtatgaagcgggatttttggatggtgtgtacactgaagcgggtgaggcattggaaacctggatctgcgatgggaaaacacacgtgatagaaggaaagctgattgccgggcacacgtatcttctgaaagaactggaagcgccggatggatacactgtgcagaaaccgatgattttcacggtgtcagatacaggcagggggattaacgcagccagagatggtgtaaatgcgctggagacagagacagcagacggtttatttgacagcataacgtctctgcaggtgcagggaagaaaagcgcttcgtctggtgagaactctgtgggatttggacagtggggaagaatttgtactttcttcactgatggaagcttctgtgccttatctggaacgagaaaaatgtgaaaaagagggggtggcggaaggacatcgtttcgaactgcgggagatcattgagttcagtgacggcagccgccggacgataggaaaaaatacattccgtctgaattgggatgagaacggacattatccgctgacgcttcgaacattaaaaggaacgaggtatcgtctggaagaatatcatcagaaagagacagatggcagggaagtggaaagctggatcccggaaaacagagatggcctgggatatatccatgaaatacgaaatccggaatacagcgacccttgtggcatccgcgccgtttccacgattggaaaagacggagcagcggtgctgccgggaagtgtaattgtatatgaaattacatatcggaaccagtcagataaaaaagaaaatatgaagattggactggaaattccagctgggtgtgaactaatgacagcggcttcgatgggcggagcggaacaaataggtgaatcctggtattggaatatagagaatgtggcagccggatcaggaggcattttgcgggtggctgttctggttggagagcatataaatgaaaacggacaggaaaatcattctggtatgacggtaacggcaacgatatggggaaaaacgggcaaaagctatgaatccttccatccaattctatctccgggcgcaattgctatcgccgggcgggtgacgggaactgctgcggcgttgttaaggcaggtagatataacatatacgttatacttaaagaatgcggagggaaaagagcttccaggcttgatttcgtacacaggttctaaatcgggaacgctgcgaagtggaggaagcctgacgctttcttgtggcgaatcggttgttttgacaggaatgccgtggggaacaaactatgaggttcgggcacaagttccggcacagactccggatggactgccgatcgagtggaagagtacaggaagcacgggacggacctcccggcagggaaatacagtgctctgggaatttcatcagaatgatcggtcggtgcgcgaagtgctcaaacgtgggaatagataccgcctggttgaactgctggaactggacggtggaaaaacggaagaggtggagtcgaatcagatgattttttctctggggaatgatgcacagatagacggaattggaatgatagattccccgacaaagctggtcttttcaaagacagatctgggcggaacggagcttccgggtgctcagatagagattctggatcagtctggaaatgtaatcgaatcatggatttctgcggatcatcctcatgagataattggaacgttgacaccgggaaagagttatataatgcgcgagacgggagcgccggatggatttgcgtatgcggaagagattccgtttactgtttccgaggatggaacggtcgagcggatttccatgcaggacaagccgacgcacgtggaaatcacaaaatacagtgtgacgggagaaaaggaactgccgggggcgcggatggaactctgggaggagaaggaaggcggaaccttggttgattcgtgggtatctgatcggggcgcccatgtgataaaaggaaagttaaacgctggaaaaaactatgtgctggtagaaaaaatagcgccggatgggtactggaaagcagaaaaagtgacatttacggtatcactggacggtcgagtcgatcaggtgaagatgtatgacagaccgacggaagtgcaggtggagaagcggaaatggagggagcagaaaggagatagcgaatttataaaaggtgccctcctgaggatttctgatgagactggaaaggtaatattggaatggatttctgaagaaaaggagaaatgtatacagggcattttaaaggagggctgccgctatattctggaagagctggaagcgccggagggctacgaaaaagccgaaccagtttcatttacggtttcagaggacggaacggtgacggttgtgcggatgtatgaccgtttgaagccggagaagccagggcgaccgggacatggtcagccggaatatccaaagaaagtgatagaagagctgaaagagggctatttaacagttcacgtgccagagtcgatctgtggagaggggaaaattgttctcgacagcagacagatgaagccgcttccgaggatgggatatggagaatcagccacctggggagtggaaggcgcttatcagattgaggacgaaaaagaacgtctgaatgaagtgatttcactgatttggaagtggaaactggtgattggactgatatgtatgagcgttgggacaggactggcgctcgcagagcggcgaagaaaggaggaaaatataaaaaagaatatggagaggaatgataagggcaaggaggagtaaaaaaataagagaaaaatgaacagaagaaagatgtactctcggagtcttttctgcacttgcttttgcggctaacaaaaaacatttcacaaaatcaagcacagaaagatttcgagagtacataaagtgggagaggagggattttatggatcagatggcgaaagggctgctctttggagcagccgtactgagcttggcggctgcgggatgttttcccgctgccgcggcatccatcaatcaggtcaggattcggctggcagcagaagagtttgatgaaatgggaatgcctgttttggaggcagaaagccgggacagggcatatagcgtcactggtgtggaacgaatctccggtgattcggcaagcggaccggcgatggatggggcagaggtggaaaaaaaagaaaatgaacaatataaagggagcatacaagccgactctgaaaatataggtaccaaagaagtttctttagaagaacgaaagatagaagaaatccatgcagaagaacctgctccggaaattctatacgaaatagaactggaatccgacgcagatgattctttttccgtccttcgccaggaggacatccagttttcagggcttggcgcggtatgcagcaaggcagttcggaaagataatggcactacgttgcttttgacgatcgaattacaggatgccggagagataataggaacggtggatgcagcaggctgggcggaaagaggaattggcaggtggaagaaagcgccgggggcttcggcatatttggtgatgctttaccgggatgcgaagcgtgtcggacatccgcatcggacgagtgctgaacagtacgattttgtaccgttgatgcagactgcgggtgtatatcattttaaagtgattcctctgacaaagcagggaaagcgtggtcaggcagcagaatcggcatggaggaaagtgacggaggcaggggcagctcaaaaccgggaagaatggggagggaaaaagccgggatggcagccagaaggggaaattccatcgtatattttaaaagatggtgcatacccgcagatggattctcttttgattggggaaaagtatgagcagtttaatgaaaagggggaaaacgtgtcgcgaaccgtaatattttgaggattttcgtataatttataaaaatcagttgaaaaagcagaagaaatgtgatagcatacctcacataagttcgttcctgtttactgaaccgtcctgacgagtgatcgaaggtcagtcaggcagggacactctggagagtctccaagaaggagcgccgaaggtgtaagacggatgcacgtccatggtattcgttgatctctcaggcaaaaggacagggcatacaaccaatcacaatggaaccaggggatgagttctattgtatgcatatgttctactctttggagagctgatttgtatcagctcttattttattactcgatcccggatttacaaaagagccggaatcgtaacgaaaacatagaggaggataaaaaatggacacgattttgacactggtaaacaaaggcaatgattttctgtggagttttcttctgctgattctgctgtgtggaacgggcatctattacacgattcgtctcaaattcattcaggtaagaaaatttggcgagggctgcaagcatgtgtttggacatttcagcctgaacggagaaaaacatgaaaaaggggaaatgagcccgtttcagtcgatcatgacggcgatcgcagcacaggttggtactggtaacctggcaggtgcggcgacagcgctgtttggcggcggtccgggtgcaatcttctggatgtggctgagcgcgttcttcggaatggcgaccatctactccgaggcggttctggcacagacctacaaaacagaggtaaatggtgaggtgacaggcggacctgtctactacatcaaggcggcatttaaaggtaattttggaaaggtattatccactctgtttgctatctttattgttttagcacttgggtttatgggcaatatggtacagtccaactcgatcggtgctgcgtttacagaggtatttcaggtatatggaatcaatattccgccgatcacgatcggtcttgtgctggcagtactggcaggattcattttcattggtggaaccaaacgtctggcagctgtggtagagaaggttgtgccagttatggcaggcgtttacattgtaggaagcctgattctgattggtcttcatatcaattacgtgccgacagcatttatgatgatcatcaagggcgcgtttgatccgaaagcggtaatgggtgctggtgctggtatcaccgtccgcgaagcaatccgttttggtgtagcgagaggacttttctccaatgaggcaggtatgggttccacaccgcatgctcacgcacgtgcgaaagcagaaagcccgcatcatcaggggctttgtgcgatgatcagtgtctttattgatacatttgttattttaaatctgaccgtatttgcagtcctgacaacggatgcgatgagctccggcaaggatggtacagcgctgacacaggcggcattcatgcagagttttggaaactttggttctatttttattgcgatctgcctgctgttcttcgcattttcgacgattctgggatggcatttctttggtctgacgaatgcgaaatatctgttcggcgagggcgcggcaaaggtttattccttcatcgttgtgatttgtattgtcattggttctatgttaaaggtaaatttagtatgggctctggcagatttcttcaacgcgctgatggttattccgaacgttttggcattacttgcattgagtcatgtggttgtggcggctgaccggaaagcggaagcgatcacgaaaaatgtgacacaggcatatcgggctgcagaagaaaagtaagagcaaataaagagaagataaaaggtaactgtaagcgtaaaaagcgagcattaaacaatcattcaaaaaagacctgcttatgtagtgaaatacataagcaggtcttttttatgaaaatgaaaacaaataaaaaaccaaaagtccctaaacagctgccattaccttccgctctctgtaaaaataaggagtttctctctttgctgtctgctttttaagtgtttcatcggtcaatttgcggacagactgcaaaatcctcagatgcgtctccagagggagtgcatcaacggtcagttccgcttttttcatgcatccatccacaccgcctgctgccacaacccggcggagcaattctgtctcggtgcggtcagaggggagaagattccgtcccaattccagggagagcagggaggcaatgccccagccccaccagttggaaacgccgcttgccagcgtcaggtctgctgcttctgcggtgcagataagttcgccgtgtggaacacctgcgagaatttcacggcggaaggtccccattcccatctcgttgccgccatctccgatggaaatgaccgtggcaccagcttctctggcagcagacaggaaaagagccgaatccgtgatcatgtcgtcgagctgttcaccgcgcatgctgtgataatgtccgttttcagctttacctgggcgctccaggctgatcagatgggtcggttttgcatcacggataaaggtgcggataaagttatccgtattctgttccggcagacggatcaaggttgcctgcggagcgcggaagcggagagccgcttccagatgcggataagaagaccagtcggttacgactgacacgccgcagccagctgccgtcagcgctgctgcgaggttggcagttccggaaggtccatccgtctcgccggtaatagaaccgtctggcattcgaaccgggaaaccggtcagaagaacggctcttttcgcatgggcgagagaagcagacacagccgcaagtggggaagcaggcagagatgctaaaagtccgcgaccgccaaaatcctgtttcataattgaatctaaagtttcataaaaagtcatggtatcaatcctccaggtatactgcattgtgcagaaattgacaggggattttctatctggatgatccgagcgcttatttactggataatttccaaatcaaaaaagattggaagcagtccggtatggtagctgtatcggaatcatgtgcaataaaaaaagacccacgtatcctgtaagattcatggctcttatttacgaagggagcatccgggcaggagtcccgataaataaaagaatctgttttgttataattatattgtaaatgaaaaatatcagactgtcaattccaaatttattttacggctgacagaaagtgaaatttggaatataataaaaaatggggtaactgttcagtaggtcagcgcatttactgcgctgaccgtacgaaaatatgggtcagcaggcaaaaatcccattgccgtaggcaatttttaatggatttttgcttgtggctgtgaaggtactgaacagctacaaaataggcatataaacaagctcagaaataaaagcagacaagaaaatggatagagagaatgaaacgagaatcaaatgagataaaaaaagaaaatgaccgcgccgcatcgttcatgcgcttctgcgaggtggtccgccatctccgtgccgaggacggctgtccgtgggatcgggcgcagacgcatacatcgctgaaaccgtactgcattgaagaagcggcagaggtgattggcggtatcaatatctgggaggcgaccggcgatgcggagaacctgaaagaagaactgggggatttaatgctgcagattcttcttcacgcgcagatcgcggaggaagaaggactgtttacggtacgggaggtcatggatggcgccagcgaaaaaatgatccgccgccatccgcacgtgtttggtaagtcgatgctgtccgaacagggagaaccggtcacggattgggatgcaatcaagaagcaggaaaaagccggaaaagagtggacggaagcgtatcttccgggagcgctggaagaggcggagaaactgctcgagcgggcaaaagaacggaaaggcatcaaaaaataacgtttgagatgcttcaatactgaaataaatagaaaaatctatatataaaaaggcattcggtcaaaatggaatgccttcgttcatttataaatgctaattcgtacttttcggcaaagactgactttcctttaccagatcttctaaagtaatattatagaagaaattgtgtacaacctgatcaaagcgtttccacatcggcagggtcacacagcttgtctgacgttcgcacggcggcgcatccggtgcaaggcaggcaacggaagagagagagccttcggtcagttccagaatctctccggcggtatattcattaatcggacgggttagacggtaaccgccgcctttgccgcgctgtccttccagtaatttatttttgaccagaaccttcaagatgatttccagatacttttcagaaatctgctgacgggtggcaatttcattcagtggtatatatccagcagaattttgttccgccagatcgatcataacgcgcagggcgtatcttccttttgttgatatcattcggtaacctccttactattaaccaattataacgcaaggtaataggactttcaaggagaaaagcgtggaaaacaaagaaaaaaagttttttcctaatacctattgacaaagttggtttataagagtatcattaagccatcgagttcggaaagaacatgaaaatgaaaaggaggcagatacaatggcaagacagaatattgtatggaacggaaatctgatgtgttgttgtcgaatgtgtaattcccgggcattttatatggtcaggtaaatttgcatatctgccgttcaagagaatgacaacgatttaagatgcaagccatttgcccgggagcttaaagaagattaagcggtccggctttttatttacccaaaaagccaaatatacatttgcataagcaaatataataatgcggaaaagcaattattttatagaaagcttgaaaataaatggaaaaacgcttgcttaaataaaaaaatgaatataaaataaaaacgaatttacatactaggaaataaactttcagaaaagaaagagaggtattttgagatgggaaactatagatttgagactcttcagttacacgtaggtcaggagcagccggatccggcaaccgattccagagccgttccgatttatcagaccacttcttatgtatttaaaaattccgcccatgcggcagcacgttttggcctggcagatgccggtaacatttacggacgtctgaccaactccacacaggatgtatttgagaagagaatcgcagcactggagggcggcgttgcagcactggcaaccgcatccggcgcagctgctattacatatacaatcgaggcactggcagcagacggcggtcacatcgtagcacagaagaccatctacggaggcagctataatcttttagagcatacactttcccatttcggtgtatctacaactttcgtagatgctcataatctggaagcggtagaaggggcaattcaggaaaatacccgtgctatctatctggagactctcggaaatccgaatagtgatattccggacatcgacgcgattgctgaaattgcacacaaacacggacttccgttagtcattgacaatacatttggcacaccgtacctgattcgcccgatcgagcatggcgcagatattgtcgtgcattccgctaccaagttcatcggcggacacggaaccactctgggcggcattatcgtagattccggtaaatttgactggaaagcaagcggcaaatatccggcaatcgcagatccgaatccgagctatcacggcgtatctttcgtagaggcagcaggtccggcagcattcgtcacctacatccgtgctatccttctgcgtgatatgggcgctacgatttccccgttcaacgcattcctgcttcttcagggaactgagacactgtctctgcgtatcgaccgtcatgtagaaaataccaagaaggttgttgagtacctgtcaaaacatccgttagtagagcacgttaatcatccgtctctgccgaatcatccggatcatgcactgtatgagaaatatttcccgaacggcggcgcttctatattcacctttgagatcaagggcggacaggcagaagctcataagttcatcgacaacctgcagctcttctctctgttagcaaacgtagcagatgtaaagagcctggttatccatccagcaaccacaacacactcccagctgactgacgaggagctggcagatcagggcattaagcagaacaccatccgtctgtccattggtaccgagcatatcgacgatatcatcgaggatctggagcgtggatttgcagctctgaaataagtaagagtgtgtcgggctgagaatccgaagcatatacataataaatggtaaattgataaaatgcggtgtcatctgccaactcttctttaagcagggaagaacggcagataacgctgcatttttactattccattttggaagaaaatggcgtagaaaaattcataccaaaccgcctttcacagggtaaaatgctgaattgttgggatttaaggaggaaacggggaggcgagtcttgacaataagggcgggtaagtggtaatttatcagatagaaggatacagagctgtacatttgtgatataggggggctctggattccaccataaaatttaagaatgaggtgcaaaaaatgcaggagatgaaaccgattaaagaaggaaaagtccgtgaaatctatgacaatggagacagcctgattatggttgcaacggatcgtatcagttgctttgatgttatcttacataatgaagtgacaaacaaaggcaaggtactgacacagatgtccaagttctggtttgacctgacgaaagacattatcccgaatcacatgatttccgtagatgtaaaagacatgccggaattcttccagcaggagaaattcgaaggaaagagcatgatgtgccgtaagcttgagatgcttccgattgagtgcatcgtccgcggttatatcacaggaagcggctgggcaagctaccagaagaccggaaaggtttgtggaattgaactgccggaaggcttaaaagagtctgacaaactgccggagccgatctacacaccgtccactaaggcagagattggcgatcatgatgaaaacatctcctatgagcagagcgtagatcatctggaaaaatacttcccgggcaagggaaaggagtatgcagataagctgcgtgaatacacgattgcactttacaaaaaatgtgcggagtacgcattggaaaaaggtatcattatcgcagataccaagtttgagttcggtctggatgagaatggcaacatcgttcttggtgatgagatgctgactccggacagctcccgtttctggccggcacagggctacgaggcaggacattcccagccgtccttcgacaagcagtttgcacgcgattggctgaccgctcatccgggcaatgactggacactcccgcaggagattgtagacaagaccattgaaaaatatcttcagagctatgagatgctgaccggcgaaaagctggcataagcggatcgctcgatgcagccagtcaggcagcggaagaaaatacattgaataaaagtaaaaaagctgctgtgaaaagaatgaaaatcttgtttcgcggcagcttttatatatggaaataaaaaacaaatatattgctagttcgtaatctgcagcagaggggctgtttacagatgtgtgcttttgaaagggaaaataaaagatgcgcgatttcatggatttatttagcttaaaggggaaaaaagcgatcgttacgggcggaaccagaggactcggctatggcatggcagagggactgtgcagagctggggcggaggttgctattttgggaacaagtgagaaggtgcgggagagcgctgatgcgcttgcacggacaaccggtgtggtggttcacggaatagtgggagatctggtaagagaagaggaggttccgaatatctataagcgtctggtggaaagtcttgatggtcaggcggatatactggtaaactgtgcgggagttcagcaccggtgcgtggcagaagattttccgatggaagagtggaatcggattctgcgagtaaatttaggtgctatgttccagatgtctcagctggtggcgcgggatatgctgcagcgtggatacggcaggattattaatgtggcatcgatgacctccttcttcggaagtgtgatgataccggcatacgcggcaagtaagggcggtgtggcgcagctcacgaaagcctgctccaatgaatggtcatcgcgtggtgtgaccgtcaatgcgatcgcacctggttatatggagacaaagctcacatcggacatgaaagccaaaaatccggatcagtatgaagaggtaacggcgcggatcccgatgcaccgctgggggaaggcggaggatctggcaggaattaccgtgtttttagcgagtgacgcggcagaatatataacgggagcggtaatcccggtggatggcggctacctggcgaagtaaacgagagaaaaggaaagaaatatgaatctatttgatatagtaggtccggtgatggtcggaccgtccagttcccacacagcgggcgcggttcggattggatttgtggcgcagaagcttcttggggaaccggttaagcgggcaaggattggtctgtacggctcatttctggcaacgggaaccggacacggaacccagaaagcgctgattgcgggacttttaggaatggtgccggacgacatgcggattccggacagctttcacctggcagaggagaaagggattgagttttcctttgaggaagctaatttaaaagaggcgcatccaaattcggcggaactggagcttgagggcatttctgggcgcagtctgacggtagtaggtgaatcactgggcggttcccggatcaatattgcgaaggtcgatgggattgaagccaatttttccggcagttatccaaccttggttgtccacaatgacgatcagccgggacatgtggcggatgtgacggcgatgctggcgcacaaatcgatcaatattgcgacgatgcagctctaccgtgcggcgcgcggcggcatggcagtgatggttattgagtgcgatcaagagattccggaagaagggcttgtgtggctgcgccgtcaggagggtatccgaaaggtaacatatttaagtcttcgataggaaaggttcatataagaaaaggaatggaacgggaaaatggaaatgttatatcattcagtgagtgatctggtccgcttagcgaacgaacatcaaattccgctctggaaggtggttcttctggcagatgtgcaggaacgccaggtgacggtggaagaatcgtttgaaacaatgcggcagatgtatcaggcgatgcgtcaggcagatcaggaatacgacggctcgatcgtctcggcaagtggaatggcgggcggcgacggagaaaaactgcacgcatacaacgcctccggtcgcagcctggcgggcggatacatggggcttgtgatggaaaaagcggtgaaaatgggagagtccaacgcctgtatgaaacgaatcgtggcggctccgacggcgggcgcatgcggggtgattccggcggtatttttgtcgtatgaggaatattgtaaggaaacggagaaccggatggtcgaggcactctttgtcagtgcaggaatcggtgcggttattgcagaaaatgcgagcatcgccggtgcatcgggtggatgccaggcggagattggttcagcaagtgcgatggcagcagggggtctggcatatctgcagggcggcgatgcggagtgtatcgcgaatgcagcggcatttgccctcaaaaatatgttgggattgacctgtgatccggtctgtggtctggttgaagttccgtgtatcaagcgtaattccgccggcgccgtcaatgcggcggtcagtgcgcagatggcaatggcgggaatcaagagtgcgatcccggcagacgaggtcatcgattccatgcgtcggatcggcaatgcgcttccggctgctttacgcgagacgagtgagggcggtctggcagtgaccgagagtgccagaaagatagccgaacggatgggaaagaaggaacacattgctaagaaaacccgggaaagcaatgaaaatcaatagaaccagacagcacgcgattgcagaacctgtcagaactgttccggctgctgattagaaaataaaattgtagaagaaagaacagcaatatagaaatagctctgtttaaatgatgccagaatattcttaaaaatcacaaaaaaacatataaaatagcaaatttagaaaaatgcttgactttccgggaatgctctggtatcataacatacgtcctcgagacaaggacaaaaacaaaacacgaaacgaaagaaatgatttgaagattcttgatgaactcagaaaaatttcggaaaaacgtggatttgtaaaaaaataaaaaagtgttgacaaaagcaaaaacttttgataaactataaaagttgctgctgaggcaacaacaaagaaccttgaaaactgaacagtatgtaaaaccctgaaaattctaagaacaaaggcttttggttaagccttgaagttcaagagaacattcagaacaaaaccaaaa

SEQ ID NO: 11018 - DNA, 76661 bp, Unknown
  gut microbiota DNA sequence
cagcaggaatttgccgtatttaaatgcgaagccacggcaaattccgttactgggcacgtatgcgtgaacagtaactgtcaaacgaatgaatccgcctaatcgttctaattttcttttctaatttcccaataaaatcttcacaaacaggatcgccagcaccaccagaatcagcgggcgcacgatcttctgtccatttcccaataccaggccggaaccgatataatttcctaaaatactgcagatcgccgcagccagtcccagcgtgtaaatgatcttgccgtgaatcacaaatgtgacaaacgccgccacattagacgaaagattgatcgcctttgtcgtacccgccgcctctttcatcgtatagcgcgccgctcctgtgagcaccagcagcaggaaagttccggttcccggtccgtaaaaaccatcataaataccgatgatcagcgcggatgccagcgcaatcaggaatgatttccgctccggcagggtgcccgccagcgaatcatcgcccattttcttattccgcataacataaaatgcaacaatcggaagaatcacgatcatcatatactgtaaaatcttatcgctgactaacagagtcaggttcgaaccgatcgaagaaccgatcagcgccgccacgataaaccagaccaccttcttaaactgtatgtaaccgtttttggcaaaccgcccggtcgcgattgccgttcccatcatggaactcattttgttggttccgagcgccatatgggtcggaaccccggcgatcaggtacgccggaagtgaaatcaatccgcctccccctgcgatcgcatccacaaagcctgccagaaataccatcgggcagacgattataaactgcagtatcgtgcaatccatgctacatcctccaaaattttcatgcacgcccaaattcctcctgccgtcgcaaaacagaaatcaaaaagcactccgggcatacatttctattcttattgcaaaaactccgccagtgcataggtactgacatccaagccatattcagtcaggcggatatggctatctgtctggaccgctgcttccaacaatccttctttcaaaagcctctcgatcacctcaccgtacaccgcttccatcgccacgccaaaccggcgttcaaactctgccgtccggacgccgccggtcagccgcagccccagaaacataaattcttccatccgctcctgacggctcaattcgtgtatttcctcatactgcgcgcccgctgccagctcttctttcgtaaacaccagataacggttcaaatccgccgtcacctgaaagcgtttcccgcccaccagcgaggatgcccccagaccaagccccagatactccacaccggtccagtaaccgatgttgtggcggcaggcatagcccggtctggcataattggaaatctcataccgctcatagcccagcttcgccagcgttgttttcgtgtggtggtacatattccggtctgtctcctcatccggcagacatttgcagccttcatacttcgtctgtaaacgctttggcatagaggcataatcgccgtatttctccagatccgcgcacatctccccgtactcttcatataacggcgtgccttcttccacaatcaggctgtatgcggaaatatgttccggttcaaggtcgcagacgaaccgcagagtctcctgccagctctcctccgactgtcccggaagcgccgacatcagatcgacattgatattgtcaaatccagcgtcccgcgcagcacgaaaactctgtaaaaactgctcccgcgtatgaatccgccctaaaagccgcaattcctcctccgaagccgactgcagccccagactcaggcggttgacccctgcattccggtaaccggctgccgaatccggcgtcaatgtccccggattcgcctccatcgtgatctccgcatccggctctacccgaaagacctgccggacggctgccagaatccgctcaatcgccgatggtggaagcagggacggcgttccgccgccgataaagatcgtctccaccgtccgccctgtcaggtttagccgcggcgccgcattttcagggcactgccctgcatcctcttccagaatgctttcaatctcccggatcagctgatccacatatttttcccgcacgcacgcatcggacgcaaacgaaagaaaatcacagtaacggcatttgcggacgcagaacgggatgtgtatatataattccattattcctcgtccagcttcaggacgctcataaatgccttctgcggaatctctacgtttccgatctgacgcatacgtttctttccttccttctgcttctccagaagttttctctttcgggaaatatcgccgccgtagcattttgccagaacgtccttccgcattgccttgaccgtctcgcgggcaatgatctttccaccgaccgccgcctggattggaatttcaaataaatgacgcggaatctcatccttgagcttctcgcacatttttctgccgcgctcatatgccgaaccttcgaatacgatgaaagagagcgcgtccacttcctcgcggttgacgagaatatccagttttaccagcttggattcctcgtagccctttaactcataatcaaacgacgcgtaaccgcgggagcgcgatttcaatgcatcgaagaaatcataaataatctcatttaacggaagttcatatttcagcagcgcacggctcgcctcaatatactccattcccaggtaaacgccgcggcgctcctggcacagcgtcatgatcgcaccgacaaactcggtcgtaaccatgatctccgccgacacgatcggctcttccatataggcaatctcggacggatccggcaggtttgacgggttcgtcagctcaatcatatcgccgttcgtcttgtgcacccggtatacaacgcccggcgccgttgtcacaagatccagattgtactcgcgttccaagcgttcctggataatatccagatggagaagccccaggaaaccacaccggaaaccaaagcccagcgctaccgatgtctctggctcaaaatagagcgctgcatcgttgagctgcaatttttccagtgcgtcccgcagatccggatatttcgcaccatccgccggataaagaccgcagtataccatcggcgttaccttcttgtaacccggaagcggctctgcacatgggttgtccagatcggtgatcgtatcgcccacgcgggtatcctgcacatttttaatactggcagtcacatagccaaccataccggctgaaagctcttcgcacggaataaactgacctgcgccaaaatatccgacctccacaacctcggcagccgctccggtcgccatcattttcatgcgtgtgccttttttgatcgtaccgttcttcacacggcagaatacgataacgcccttgtaagaatcatacagagagtcgaaaataagcgcctgcagcgatgcctccggatcgcccgccggtgccgggatcttctgcacgatctcctccagaactgcctcgacatttaagccggtcttcgcagaaatgcgcggtgcatctgacgcctccagaccgatcacatcctcgatctccgctgccacgcgctccggatccgcactcggcagatcgatcttatttaacaccggaatgacctccagatcatgatccagcgccagatatacattcgccagcgtctgcgcctcgattccctgtgccgcatccacaaccagaatcgcgccgtcgcacgccgccaggcttcgggaaacctcgtagttaaagtccacatgtccaggcgtgtcgattagattaaaaatgtactcctgaccgtctttcgccttatataccgtgcggactgcctgcgacttgatggtaatacctctctcccgctccagatccatgttatcaagcacctgcgcctgcatctcacggctcgttaaaagtcccgtcatctcaataatacgatctgccaacgttgatttgccgtgatcgatatgtgcaatgatgcagaaatttctgattttgctctgatctataattgccatccgttcattcctctctctgtatcactttgtttggcagcaaaatgtttgctgcgatatcttattttttatttaaaatcatcttttataataaataacacctgatctaaatgaatataccattttttcaggtacgccgcaagtcctgaaatagaaaaagccttgactaaaagccttgccattagcctgtcagcacctgatccagaagctgcgccagcggatccatcgcattgaccgcctcttcatatgtattcgtctgtgccccgacctcaatcaacgccgagcgcgggcgtagatgtagattgtaacgaagcccctttaaataaatcgtccgcgtaaacccaggatatatctgatcggcattccacttcatctgaaaactgaacgccagattttccttccggcagggatttgccagatactcgatcggtccgtccggcgtctcgctggtaccgttgaaaaacatgatctgtgccgttggtttcccttctatctgcgtgactagatgcgtctgctcgctgacaccgtcccggtgcacatctaaaatcacctgaatcgacgggtatttctgcaaaaggttcgtgacaccctcgcaggcatatgtataggcacggctccggtcgagatgccccgacttcatatcataggcagttgtatcgtgccagacctgatatcctttcgcccgcagccgttttgccagctcttcccccagagacactaccgcgccctttccgtcgcttcccgcataatctctataattttcctgcgaatgggtatgataaatcaagatctgtggtccgtccgcctcgtccttcctgattgtcagatccatcgacaaaaatgtctctgcgttcatcaggctccggtcaatcgacgccgtcgggtggattgtaaaaaaatgctggatcagataatcataatcttccagctttttccgcagacgcgggctgtccaccagtgcggcaggatttgccctctctgtcttttctccattctttccaacactatacagcctctcttcgtccgtctctccgccgccctgtctcccactttcatgaacaagcccgttccattttccaagtaaagttccatccaccagcctactcccggaaaactgtgccaggaaatccatatactcctgccggacttcctgttcttccagatatttataataggacggatcggcttctccctgcgtctgtttcttccacccggcaagtctatgccttttcccctcctccgaatctggtatatcccgcaaattagtcccccagaccggataccaggaccttaccaccgcattctgcacagctgtccagatgaatgcacgcatcttccagccgactgtcagcaaaaacagaaccatcaggagcccggctgccctctgccaccaccgcaccgcattcatctcccttctttcctgttctatcctatgcgattagcaaagtgtagtttcctgtttggttctgtttttcaatctggcatttttttcagtgttatctttcttcctccagccgttccactgcccgccggatcccctcggcgattgctgcgctcagcttgcagatacgctcgtccatgtcctgcggggtcacaaacatcgctccaaattcaggttccagaagttcccggatcagctcatactggctgtccgaatccagttcccggatgtattcaccgaaccggctgccctcttttgaggcggttagtgtccgcactaacgcattgaccgtcccgtgaacgatcgccgccgcgcccacaaccgtcggaacgccgatcgcgattaccggcacgccgagattttcccgcgtcattccccggcggtggttgccgacgccggaacccggatgaattcctgtatccgtcagctgaatggtgcttgccagacggtggacgtttcgcgccgccagcgcgtcgaccgcgatcaccagatccgggcggctctcccgcacgacgccgcggacaatttctgccgtctccatccctgtctgtgccatcacccccggatggataccgctgagaaccggatgcaccgtccgccccgctttctcagccgtatagaggtatgtgccatttcttctgcctggctccgtccgcagatggcggttcatcgaaagcccatccaccacgcgcggtcccagcgaatccggcgtcacctgccggtttcccagtcccgctaccagaatcgaaagtccggccatggttgaagcacagtttttccggatcagggacgccagctgccgtcctaactccccggcagccgcctcacagtatacatcctctgtctccgacagacccggatcttccatcgtcaggtaggttcccatcggctttcccattgattccgcacctttttcgttcaaaatcgagacttccgtcatccggatcgaactgccatgacagcgccattcccgcagcgccacaccgccgatttcgcccccattcccctcaaaactttctctctcctccaacgccagatccgtccgattttcaaacatggctgctcccttctatctcacaactcaatcacaacccgcaccaccataaggcttaaattccatcctatcactttttacttcaagatagccttattatttttctcaattcgtaactgttcagtaccttcacagtcacgcgcaaaaatccattaaaacgcagtaaatgcgcagacctactgaacagttacctcaatttttatattttccagaaatatatattttattctctcaaaaaaacctaacgcttttttgtttcataggacgcaatttcctgtgaaacaaaaaactgcgccacccagcccagatatttgacatcgcccgcaaggataggcgccgcctgatatccggtcagataccgcagtttatacgtttatttttcgaatttttctaaaactctattctatttctcgccgtccgcactctccaccggcgttactgttcacacacgtgtgctcagcaacgggattttgccgatgctacgcattccaaatcggcaaaatctgctgccggaactgtatcgtacggaattttcagttcagaaaattcctacctgtgaacagttacccaccgacatctattcccccggatgttccaccttccagatctccgtctccagatagttccagatctcttctctgccctgttttgtctcggcggagaacggaatcatcatcacttcggtgccgactcccagacctgttctgagaatctttaactgtttctggagctggctgcgcttgatcttgtcagccttggtcgcaatcaggatcggctggaagccctgggaaacgatccagtcgtacatgagtttgtcgtttgaagacggctcatgacggatatcaatcagcaggaagacgcagcgaagcatctgcgatttgtgcagataattctcaatcatcttgccccactttgccttgacctcaacgctcgcgcgcgcgtagccgtaccctggcagatcgacgtagtaaaacgcgtcgttgatatggtaaaaattgatcgtctgggtcttgcccggctgcgaggatgttctcgcataggatcggcggttcatcagcgcattgatcagggacgatttgccgacgtttgatttgcctgcaaacgcgaattcaggctgtgtatttgccggcagcttactggtgataccgcagacggtttccagatttacatcttttataatcatattttttctcctactaaaccgctatttctccggtacaaatgcctctcggatgacttcgttcatctccttgatgtatacgatctccattcctttcgtgatttccttcgaaagttccttgacatccggctgatttttcgccggtaccagtaccttttccacctgcgccatgcgggctgcgagcagtttttctttcagaccgccgatcatcagcacatgaccgcgcagcgttacctcgccggtcatcgccacacgcggcagtaccttccgtcctgtcaccgccgacagcatcgccgttgccatcgtgattccggccgatggaccatccttcggcaccgcgccctccgggatatgcaggtgaatatcgtgtttctcgaaatagttctccttcacgccgtaatcagatgcaaccgaacgcacataggtcagtgcaatctgcgccgactccttcataacatcgcccatctgacccgtcatctgcagcacgcctttgcccggcatgacattgacctcgatctgcagtgtatcgccgccgacgctcgtccacgccagaccgcgcacgataccgacctgtgcctcatttccggctgcatcgaagaagactttctcgcgtcccagataatgatccagattccgctctgtcacgcggatcgacggtttcttcttctccagcacctctctggctgccttgcggcagatatcgccaacccggcgctccagattcctgactccagcttccctggtgtagctgtgaatcattttctccagcgccggacccgtgatatttaactgttccttcgaaagaccattcttctccagctgtttcggaatcagatagtcttttgcaatgtgatatttttcattttccgtgtaactattgacttcaatcagctccatacggtccagcagcggtccagggatcgtctgcgttgtattcgccgtcgcgataaataatacctccgacaggtcaatcgggatctccacataatggtcgcggaatttcacattctgctcgctgtccagcacctctaagagcgccgaggatgtatctcccttataatcgctgctgactttgtcgatctcatccagcagcatcagcggattggcaacccctgcctgcttgagcccttccacgatgcgtcccggcatcgcgccgacgtaggtctttctgtgaccgcggatctccgcctcgtcgcgcacgccgcctaggctgatgcggacatatttgcgtcccatcgccttcgcaatcgagcgggcgatcgaagttttaccggttccaggcggtcccaccaggcaaaggatcgggctggtgcccttcttcgtcaggatgcggactgccaggtattccagcacgcgctctttgaccttttccagaccataatggtcggcttccagaatctcttccgcatgcttcaggctcgcgttatccttcgtcattttgttccacggcagttccagcaccgtttccagatatgtccggatcacattcgcatcctggctgccagccggcatattctggaaacggttgatctccttgcggatccgctcctttacttccacgctggctttgatcttcttcaactgttccttcatctcatccgcatcagaaaccggattttcctctcccagctcctcccggatcacacgcagctgttcccgcagaatataatcacgctgatttttatccagcgccgcctttaccttcgtctgaaactcgcgtttcacgcggtaaacctctaattccgtcagcagaagctgcagctctgtctcatacatctccgtcagcgtccggcattccagcaccgactggcgcgcttcatagttccacgggaactgggctgatatctgattcattaattcggtcagatctggctgtgcgatcaacggacttaatacttcacgtcccgctgccacatttaattttccgtattcttccagcttttctttcagaatccggagcatcgcctctttctgaatcgtgtccagatcgtcctcgaccggatccagaatctccacgatcgcagtgcagcatgcctcgcccttctccatctccagaagctcggctctctcctgcccttccaccgtgacgcgcaccatgccgcccggcatcttgacaagctgtttcacgtagccaatcgttcctacctgaaaaatcccgtcaatatccgggatcacctcatccggctgcttctgcgtcgccagaaatactcgctgatcgcccaccatcgcctgctccaccgccgcgatggatttatcccggatgatatcgaaatttaccgtcatctgcggcagcacggtcagtccgcgcagcgcgatcatcggcattgtcagtttcttatcttccataacacctttatctttcttaatcaaatgtatcgttatttcctgtgaaagaaaaacaggggtctgcctatggcagttcgccatctcacagaccccattaacagccgccattctcaagctgctgcatttattttcctttacatttacgcaatctcgccggttctgtctttcttagaacgtcctgtaaaagacttgcggggcaccgtattgtcgcgatataccagctccggcgcactctttccctcgactacgtctttggtaatcgtgcagatgccgatcgtggaatcggacggaatctcatacatggtatccatcatcagggactccatgatagaacgaagtcctctggctcccgtctttctctcgactgccatgtgggcgatcgccatcagcgcatcatccgtgaactccagcttcacgccgtccagatcgagaagcgcctgatactgcttgatcagtgcattcttcggctctcttaaaatgcggaccagcgcctcctcattgagcgtctggagcgataccgtgattggcacacgaccgataaactccggaatcagaccaaacttcgtcagatcctgcggcattacctgtttcagaagctcatcgatatcctgatgcttgcgatccacaatatcggagttaaatccgatggaaccggcacctaaacggctgtcgatgatcttctccagaccgtcaaatgcaccgccgcagatgaacaggatgttggtcgtatcgatctgaatcagttcctgctgcggatgctttctgccgccctgcggcggaacactggcaatggttccttccagaatctttaaaagcgcctgctgtacaccctcgcccgatacatcgcgggtgatagatacattttcagacttcttcgtaattttatcaatctcatcaatataaatgatgccgtactctgccttgctgacgtcgtaatcagccgcctggatgatcttcaagagaatgttctctacatcctcgccgacatatccagcctcggtcagagtggtcgcatccgcgatggcaaacggtacatttaagatcttcgccagcgtctgcgccaggtatgtcttaccggaaccggtcggtccgagcatcaggatgttgctcttctgaagctctacatcctgcgtggacttggacataactctcttgtaatggttataaaccgctacggagagcaccttcttggcgtcgtcctgtccgatgacatactcatcgagaaattctttgatttccttcggcttcagcaggttgattccgctgaaatccggtcctttttcctgatcggcaaattcctcttccagaatctccgagcagagttcgatacagtcatcgcagatatatacattatctgtgccagcgatcagttttctaacctgatcctgtgtcttgccgcaaaatgagcagcgtattttgtcgtctgttctgcctggcatacttccaccttgttcctttctattattccatccagaaatctaattagtggttggtaatgacacaatcaatcagaccatactctttcgcctgctctgctgtcatgtaattatcacgctctgtatcacgcacgatcacgtcatacggctggcctgtattggctgccagaatctcgtttaatttcttcttggtacgaagaatattctccgctacgatctggatctcggttgcctgtcctctcgcgccgccggatggctggtgaatcatcacttctgcgttcggaagtgcatatctctttcctttggtaccgccggaaagcaggaatgcgcccatgctggctgccatacccagacagatggtagatacatcacatttgatataattcatcgtgtcatagatcgccatacctgcggtaacagaaccgcccgggctgttgatatataagctgatatccttattcggatcctctgcctccaggaacagaagctgtgctacaaccaggctggctgtcacatcatttacttcctctcccaggaaaatgatacgatctttaagcaaacgggagtaaatgtcatacgtccgctcgccgcggctggtggattcaaggacataaggtactaaactcatgattcttcctcctataattgagaatgaatgtttatggcaaaaattgttacagttcacacgcgtgcaaactgtaacaggattttgctgatgcttcgcattacaaatcagcaaaatctgctgccactatgttatcgcacggcactttcggttccaaaagtgcctgcctgtgaacagtaatacaaaattctatgatgccttaggacaccatagaattctgccgtatttcagtattcgcttttatcggtttgattaagcaagctttgcctgctctaccagtaaatcgatcgctgcctgaactttcaggtcctcacggatctgctctttctcgcgctcacccatcatttctttcagcttagcgccttccagtttataggatgctgcgatctcgttgatctgctcgtcaagcttctcatcggaaacttctacgttctcaacttcaactactttctcaagaaccagtctggtcttgattctcttctctgcttccggacgcatctgctccatcagcttctccggtgtcatgccggtatatttcatgtaatcgttgatgtttaagccctggctctgcagacggcgagcgtagttctctaccatctctcttgcctgagtgtcaaccatcggctgcggcagttccatctgagcgttctcaactactttttcgattacgttgttctcgttctctactttagcgtcctgctctttcttctcctgcagtttcttgcggatgtctgctttgtactcatccagagtatcgaaatcagatacttcgcttgcgaactcatcgttcagctccggaagctcgtttctcttaacttctttgatggttacaacgaacttagccggtttgccagccagctcatctgcatggtactcagccgggaaagtaacgtttacgtcacaggtctcgccttttttcttgccgattaactgatcctcaaagccctcgatgaaggaatgggaaccgattaccagcggataatctgtaccagcgccgccgtcaaatgtcttgtcatcaatgtagccggtgaagtcgatgatagtgttgtcgccgtcctcgattgcgccgtcttctacgtcgatcagtctgccgtttttcttacgtgctgcagtcagctcgttctctacatcctcgtctgtcacaacagcttctgccttcttaacttctacgcctttgtactcgcccagagttacttccggtttcagagctacggttgcctcgtagatgaatgccttacctttttcgatctgagtcactttgatctccggagtggatacgatctcttccttgctctcctctgctgccttcggataagatgcgtcgatcacttcgtttgctgcatcctcatagaaaatgccagcgccatacatcttctccagcatagctaacggtgctttacctttacggaatcccgggatgctgaatttgtttttgttcttgttgtacgcatttttgattgctgcatcaaactcttcagccggaacttcgatggtcagctttgccatgttcttctctaatttttctacctgtaaactcattttaaggggtcctccttgcttctatatgtgaaccgccattctaccgggcgttacacttcaagatagcattatagcatatctgcgtgctaaatactagcggaaaatataattttgcgttcactttttgcgggtttatgagtggttttaggtgggttttatgccatttttgatgtattttctgtgtgttttttagttgaaactacacctggtcatactgaattgaatctttgacctgtaatgctaccgggcgatcgactaagagcgatgccagctcaattcccagatccagcgcatatccaagtccacgcgccgttgtgatattgccgtccgtcacaacgcccgcacccgtcagcttcgcaccggtcagggcatcctcaaagcccggatagcaggttgccttcttgtccttcaaaagccccagctgccccagaatgctcggagccgcacagatcgctgccaggcgttttccagcagcatctgcctgcaccagtgcatcgcagagcggtttgcacgccatcagatttttcgttcccggcataccgcccggaaggaacagaagatccgctttcatcggatcaatctcatgcagcagggtgtctgcatgaatgccaaatccatgtgcgcccttcacctcttttttacccgtaatcgaaaccagttttaccttcacacccgcgcggatcagcacgtccgccgttgccagacattccacttcttccagtccatctgctaaaaatgcgtatactacagccatgattatttcctcctgttctttgtttttataacactttttatattaatttttttattttccacaaagcaatcattttttctttttagatatcagaaaatcattgcaactgttcaattcgttcacttttttattcttcatgaaccgcattcgttgtttttccagcttttccttttgaaaatgcctttactagcacccagatatttgctgcctcgtcaagaatcaggctcaaaatccagccacaaagcacatcgaccagcgaatgctgtttgatgaacatggttgaaagacaaatcagaatcgtgacaatccacgaaagtgtacggatcggtttcttgttccgcacacttgccgcgtggcagatcgtcagatgcaccgccacagtgctcgatacatggatcgacgggcagacattgttcggcggatccaccctccgcagaaaccgcacaatctgcgcgcagaaattctgtgatgtgatctcctgccgcagatttaaaccgtttggtgccagcaggtagacaaataagcaaaaggttgctcctgcaaacatcacaaaacaaagccgcagatacgcctcccggtcccgaatcataaaataaagcataaacaccggcacccacgcgtaccacagaaaatacggcagtacgaaccattcattaaacggtatcaggtcatcgaccgcacagtgtataatatgaacatccgatggttcatgcagctccagcagaaaaaatcctgacagaaacaccagcatatagagtcctaccagacagtagcggtgcgttttgatccaattcattacttgttttatcattaataatatacctttgtattgttctttcgtttttattctttcgtttttaataccagtttttccgccagcgccagacggctgttctggtactcgcccgtaaacgtcacctcgcgcccgaaccattccggcggcacaaaggcatgtgcggcttcctcacttggaaattcaacctccgccagcttcaatccctcatattcacctaaaaaaatgtccagctcaatcgtgtactccgttccttccatcggaatcagataacgctttttcgtcagaatcctgccgtcagccttcgaacggagatgctcataggattccttcgtcagcggcagattgtattcctcccgcgccatcagtcctttggatttgtaggtcagataataggtgtcatcctcctgacggacacgcacaaccggggcagtgcttagatatgcctgctcgatctggtggaaggggtatccggctatatcaaatggaatgtgactaattaaatatttgcgttcgatttccataaaattagttgtcctttttatatttcttaaaaagtcttaacaaaagtaccgtatttctccaaaatgagaaagccatttttctataatttcttcactgttggcctctatcacccgaatcatactgttcaaaatttgggctgatattttggaagaattgtggctgagcaatgccttgcccgtactggttatccacacttttgtcgcatttgaagttgctcttccctctgcaatatggacatgcaccggttccagcggctcattttcattcgaccaaaaatatacaatatatggtccaatcctaaaaatttgcggcactcagaattcctccctcttgtgaaaactccataatcaagtgtgcattttcccgaatcagtttcttgaaataactcatttccatatctgaataaccatttatattctcccacttgtaatctggcaaatagcatatcgcattgtgaaatccatctttttcatcgggtgtttctatataaactttaaccctgccatctgcccgcatttcagaatgggtaatttccgtatcatcatttaaggtcataaatgggtacatcatctttcttcctcctctcatttatcctcaaaacagttttaaccacggctgctttctacttattcagcatccccatcaccacaaccaccacaaacagtaccaccatcacgccgataaaaatatccatcgtccgcacagagacatgcacatggtcatagatgcgctctttgatggtcttttctttcatgagttccagctcccggcggagcttttcattctccgcttccagttcctccagagttttatctgccgtctcctctgccgcttctttcgccgtctccagtttttcgctcactgtttcttttatcgtctcattcttttccagcatttcgttttcgctcatccttgttcctttcagaatatggcttgttttctctgctgctcactctgaaacagcctcttctcttattatatccataaaaataagttcaggcaatccaaaaatatttttccgtcactgtcaaagcaagcgctggcacgccatctcgtccaccatccccctgccgattacaacttttcagatttatacaagaaaaatcctgcccgtcagggctgtttatataataggagattccaacggattctcccattatataaaaaactcccccgccatgcatccatggagagggagttttggatttgttttcaatatttatgtacggttcccgacgacttttcatatggtacatacattctcgtcagaacacagttaatcttattacttcttcgcaatgtacttacggatatccagtgcaatcgcaacaacgataacgataccctgtgcgatatactggtagttcgggtcgatgccaaggaactgcagacaggtctttaagaactcgaatacaagtacaccgatgataacaccggagatacgtccgataccaccgtttacagatacaccaccgatggtacaagctgcaatagcctccagctcgtaaccgttaccggtatttacaccggcaccaccagatttagctcccagaaggaaacctgcgatagcatacagtgcagtagctgttacatagatgatgatcttggttttcttaacatttacaccagcaacctctgctgctgcctcgttgccgccgattgcatacatatatttaccatggcgggtgtagttaaatacgaaccacatgatcgcgccgatgacaaatgcaatgatgaacaggtacggaataccgaagaagttaccatttgcaatgatggtatactcctgacgataaccgcctaacggaacggattttgtgtaaaccaggttgataccgtatacgatcatctgcatacccagggtaccgatgaaagccggtacattcaggtaagcaactacgataccattgataagaccaaatacacagcagatagcaatacagataaggagaatcagccatacgttctgctcgccaaatcctttggtaagttcaaaatgtccgctgtaatcactcttctggagcagagtacctgccaggcaggcagaaagtccaaccagacgtcctgcagaaaggtcggtacctttcgtaatcagacagccggatacgccgactgcgatgatgaaacggcatgctacgttgatggaaatgttgctaaagttgcttctgctgaagaagttctgttttgtcacaccaacaaagagaaccatcaacaggatcagaataacgataccgttattgatcaatatatcttttacattcagttgtttcttatccattctctcttcctcctttagaacttagtcgcgtagctcatgatacgctcctgagttgcttcctcaccctgtacctcaccggtaatgtgaccattacacatgacaaggatacggttcgacataccaatcagctccggcatctcagatgaaatcatgatgatacctttgccctgctttgccaggtcaatcatgatctggtagatctcgtacttggcaccaacgtcgataccacgggtcggctcatccatgatgaggatatccgggttgttggccagccagcgggaaatcagaaccttctgctggttaccgcctgaaagtgactgaatcagtgtcttactgctcggcgtcttgattgaaagctttgccacgttatccttgacaagctgctcaatcttcttcttattcagtttgataccatagtgtaaatactgatccagggaggaaattgatacattatctgcaatggacagacatcccagaataccagttccgcgtcggtcctcggtaatcataccgataccgccccggattgcatcctgcggacgcttaatgttcattttcttacccttaatataaacttctccggatttaatatgacgcataccgaagataccttccatcagttccgttctctgagcacctaccaggccgccgaatccaagaatctcgcctcttctaagggtgaaggagcaatcctggaaggaacgatcatggatactggaatatcctctgacatccagcagtacctcgccggcttttgtatcattcttcggaggatagatattggtcagctcacgaccaaccatctgtttgacgatctcatcatccgaaatctcgtccatatgccaggaaccaacataggtgccgtctcgcatgatggtaatatcatcacaaatctcacgaatctccgccatcttatgggaaatatagatgagggatacgcctcgtgatttcaggtcacggacaatgcggaaaagcgcctctacctcattatccgtcaaggaggaagtcggctcgtccagaattacaactctggcatttaaggatacagccttggcaatctcgacagactgcatctgggcgatggacatggttcccagttttgccttcgggttatacggcatcttaacatcgtccagccattttgctgtctcttcaaacatctttttatggtcgatgacctgaatcggaccaaatttcttggttggataacgaccggtgtacatattctctgctaccgttctctcaggtatcggctgcagctcctgatgtaccatggccagtcctctgtgaagggcttcatccggattgtggatctccactttttctccatccagatatacctcaccttcatccatatgataaataccaaagagacatttcatcaaggtggatttaccagcgccgttttctcccatcagtgcatggacggtgccgggacgtactttgaggtttatcttgtccagagcttttacgccagggaagcttttcgataccccgcgcatctccaatctgtactctgccatcccattctctcctttcataaaatcgggtgtgccatctgcacacccgacactttattcactcccctgcaggggagtgatatgttcataaccgtccttctctgaacagctacaattatttaatcatttccagaatatcgccagcgttctcagttgtaacctttacatagtctaccatgtatacgttgtcaacatctttgccgtttacgaaatcaagagctttgtcagctgctgtatgagcctgtccgaagtaatcgttgaatacggtaccggtcatcttgtcgttcataacgttctcaacaacctcaaccagagcatcaacacctaccaggtagatatctttgtttacagttcttccagctgcctcgatagcctgcagagcaccaagagccatagcatcgttgttgcagaatacaacatcgatcttgtcgccgtactgggacagagcgttagcagtgatctcctgaccctttgtctgatcccaatcaccacgctgcttggtcagctcttcaacctctacgccagctgcctttaaagcctcaacggatttctcagttctgtactgagcatctacgttctccggatctccctgaaccatgatgtaacgaacaacgccgtcgccgtctgcatcacccttgttctcaagctcagcgatctcttcaccctgatatgtaccggactgtctagcatcagcacctacataagtagctttgatgccgtcgtcaacccaagcctgctctctctcagcatccggctcacggttgatgtaaacaaccgggatacctgcttcgttgcagatgttggttacatccggctcagaagaagcctgaaccaggttgatgatcataacatcaaatccctgggtaacgaagttacggatctggttcatctgctcggactggtcattcttaccatccatgatggagatgttctctgcctttaagccaagctcatctactaaatatttctgaagttcgtttctatacagtgtcatgaagttatcagcgaactggtaaatagaaataccaactttaacttctgccggatcttttccttcgattgcttctttaacagtctctgctgcgtcagctgctgctgttgtctcttctgccgctgcagttgtctctgccggtttgctggagcaagcagttacggaaaatgccattgcagttgccaaaccaagtgctgctacttttttcagtttcataatgtttgtcctcccttaaacttgcgtatccgtttgcgctgtccggatccaccgaacagttaaattttccgcatacacacattatacagtttcgccgattcgtcattttttcttatcgacaccattattatacggatcgtttgtacacttttccatataattttcttggttcttatataaaatttttttagatcctttgtgattttattcacatattcttgtttttccggtgtgaaactgtgtgattttatggtaaatcagcaacagtcaacgctttctgactgcattgataataggttccttcctctaattcgaccttttcctgtacattttgaccaagtgcctcagaggcagctatctcaaaaatcacttctgcatactcgtcgctgtcacactggactgttccatacagttttccgctcttaagcccctcgattccctgcggggttccgtcgatgccgaccaccttgacgccccttgtgtcaccggcgcgttcaagcgcctcggcagctccgagcgccatctcatcgttgttgccgatcaccacctcgatcgcatccccgaactggcggatccactgttccatcagcgccgccgcctggctccgatcccagtttgccgaaccaccggtcagtttttccagcggaatatctccgtcgcgcatcgtctgcaccgaccactctgtccggatcagcgaatcctgatggctgcgctcgccctccaacatcacatatcccacggttccatccccatttaaatcaagactgcccggattttcctgatacgcatccaccagaagctctccctgcagaaccgccgattcccgcgcgtcctcccctacataatagaggtgctcccaccgtttcatgtcctcctcgaccggttcgcggttgaaaaatacgaccggcgtcccggcatccatcgccttgttgatgacatacgatgctgctgagcgatccaccatattgacgcagatcgcatcgtattccagggaaaggaaacgatctacctggctgttctgcgtattttggtttcccttcggatccatgatttccagattgaccttaatgcccgtctgctgctcatattccttcgccttttcctccaggctggaacggatattgttgataaaggcatcctcgccccggtacagcgttacaccgatacggatgctctttttttctgccggttttgccgcgctgcatccatttaaaagaagtgtgcccactgccagaagtgccagcgccatctgaatgctttttccgttttttttcatctttctatactccctcccggatttttaatcaatcgggtacagcatcttctcatatttcttcgagcgcagctcatccttctctatatagtaggattccaatgaaagctggcttctctcctgctctttttcaatcgcctgcactgcttttttgaccgcaaaatagcccgcgtcaaactggtttgtcaccaccagcccccggattgtccccttgtcaagctgatccagtagggacggcatcatcccgacgccgtatagcccggaaatgtattttccgtacacgctgcttccgccgacaatctccgccgcctccgctgtgctggcgaaatccagtgccgccaccaccgccgtgccgctgcccggataaactgttttttcaatgacggaacggtaagtatcatcggtgccgcgcggcacaatggtataggaaaagccctgtttttccagcacctccgtcagcccctgcttcatctcccccgccttgccgatatatgggttatctgcaaagatccaaacaggaagatcggggctctgttccgccgtaatcgcctcgcccagctttctcccggctgccgtccagtccatatgaaccgcccccttgacctcctcatccggtgataattcacccagcaggataatcggcgttccatatgtattttcttccagatattggcggcattccagctcatcaaccggctccagtatcactgccccggcaccgtctgccgcttcccggcgcaccagctccatctgctgtgccagattatccttttcatacagggtaataaagctgacatctacattatactcaaccgccgcctgatccacgcccttgcggaagttgacgtaatcatcatccgaagtatcgctgataatcagggacaccgggtagacctccacctctttttccttgatgatccaatccgtggaggaaaggagatacagcaaaataagtcccacacacaggattccccagagcaccagctcctttttttttctcactccatatcgcattgatctgtcgcccccacttttacactttcttctcttccagcactttctcgtaaggcactgccggaagatgaatcttcaccgcggttccctcatccggctccgactcgatcgaaagaccatattccgcgccgaaatacagcttgattcgctcgttgacattgcgtaccccgatgccggatccgcgcttggatgccacgtgcgccgtatcggtaaagaggctctcgacctgttcctccgtcatgccaagcccattgtcccgcacctccagatacagctctttttcctcctgccaggcgcgcacgaagatctcaccgtcgccgtccatatattccatgccatggtagatcgcattctccaccagcggctgcagcatcagttttaaacttgcaagttccaaaacctcatcatctgactcgatcgtataggtaaacttatttttaaaccgcatctgttggatcatcaggtaattccggacatgttccagctcatccttcacagtaattaagctcttgccgcggcttaaactgatacggaagaaccgcgccagcgccgtcaccaccttgaccgcctccgttttctgctcattttcaatcatccagacaatgatatcgagcgtattatagaggaaatgcggattgatctgcgactgcagcgtatcaaactcctgcttgcgtttcgcctcatgctcacgcacaatatcctgcatcaggaggcggatctgacccgccatatcactgatcgattttcccagatggcggatctcatacgaaccgccgatgtacaccggtgcgcttaaattgcccgcctccaggacgccgaccgatttttccagctcacggatcggattcgtgatcctcgatgaaatataagagttaatcagagccagaatgcacaaaatgagggcaatgacaaatacgataaaaagccgggttttgatcgtgttgagcgacacggcattttccggcgtcaccccgaccaccttccagcctgtgtagccgatcgtcttgaccgtcgccatccgcttttttccggcaaatatctcctcatgatttccgtccgaatagccggctgcctgtccattgttctcctgcacccagccggaatccagaagctgcatctgcgggtggtaaagaatctcgccatttccgctgatcatatagaaataaccaccgcgccccgtcgtgatgccgccaaagagctgttccaggctcgaatagcggatatcgaccagaaggacgccctgcgaggtcgaggttccgtgtgtcagttcgaccgcccgcgatagcgaaatgacccatcggtattgattttccgcattgtcaaacacatactgtacgtgcggcagggaaaaatgctggttttccgtccggtttaaggcgctccggaaccattcttcctgcgtcacatccacctcatttttcagacgcaccgccgggactgcctccagaagcgccccatcctccgaaaacagggcaatattctccacattatccttattattatcgtagagaagcgtaaattcacttccaagcgactggctcgacagatcggcattcttgatcgtgccataataaagcgagtcggacagcttcatgatcgtgcggaggtacgactccacagagcgccccacctgcgcgatcaggttctggctctcctcctgtactacttccgtgacctgccgtgacattctctggtacagcgacagggagatcagcacgctcgccgccagcgccgtgatcgtaaaatagataaagatcatagaccggatgctggcgtcgtcaaaaagctttttcttccagatcgtcctttttttacccattatgcctccccgctccggtgtgccgtgcggtaccgcgtcggggaaacaccgaattttttcttaaatacgtaactgaaatagttctgctccgggtagccgaccttttccgcgatgatatacgtcttgtcgtcagttgccatcagaagctcgaccgcgcgccccagccggacatcggtcagataggcgatgtacgcctgtcccgtctccttcttaaacatcgttgaaaaatacgccgggctcatatgcagatggcggcagatcttctccaccgacagatccggatcttgaaaattgtcctgaatgtactgcttcgcctcgtggatcacgttttttgtcgtattgctccgctcttcttccattccggcattcatcttgagcgccacctcggtcaggtacgggcggacattctccatcttctggacgcgccccagaatctcgaaataatcattttccacgccaaacatctcgctgatccgcagatcatactgctgggagagctgtgtcagcacattgatgatcgcaagcacatacgcctgatactggcggtaatgcacccgcgcatcctccatccggctcacaatcccgtctatcacggaacggatcttttccttcggtccaaacttgactgccgctataagctccgactccatccggctgtcgaaccggagtttttcatgcccggacggctccatatcgccgatgcagatcacgccgccggaacccgtgatcgcacggtaaccgagtgcattgagtgccgtgtggcacgggcggcttaaatccgtcagcgaactgcagctctcgcccacgccgatcgtaaccgatacctccagaattttcttcgtctccttgcagatatcgcccagcagggcaatcagcccggtctgtgtattgtctttgtcgatcgccaccagaaggatcgtctcaaaggaagaatggaatacaataaaacggtactgcccttccagtttttcctcaatcagattgcggacggagatcggaatcagctcccgctgctgatgcagcgaaactgccttgtccaccttctcatccggttccagatggatcgccgcaatcacccatttgaccgcacccgcaacgtcgatcgcatattcgttcagtttttcctcaatctgcgcttcctccatgccgccgtgaatcagatcattcaaaaaatgttcccggatcgccggaagactcttgatataactttcccgaagcagggtaacattccgcttctgctcgatctcctcatcgagatttttcttgattttctttaaaatcgccgtcagctcttcgacattgaccggctttaaaatatattcgatcacattgagcttgatcgcctttttggcgtactcaaattcatcaaaaccagaaaaaatcacgatcttgatggacggatatctctgccgtatattctccgccatctccagcccgtccatatatggcatccggatgtctgtcagcacaacatccggctcattctgctcgatcttttccagcgcttccttcccgttctccgcatccccgatcacctcgaatccggcatcctgccagtcgattttgcgtatgatgcttgtccgtacttcctcctcgtcatctaccagcatgattttatatgggttcatatggattcgtcctttcagttcctaatgcaatgttgttgtgagccagtttgtcttaggactctggagctctgctacggtatccccattccagctttccctgacacctcatgaggaagtggctgggcaggctggaatgaggggaatttctttctttacattataccacatctttctttatttgtgagtttgtgatttttcactggcaggttccaatttctgtaaaggcgtgcttcgtccccgggtgcgggaacccggttccacacagcgtctgcatccagtccgccgtccgcggcaggcgagacagtcttcatctatttcataaacggcatttccatcaatgatcagccgggtgttcatagctctgaatccttttctttcttattttttataatatactatatgtggtttttcctgtcccggagctttttttctttaaacattcccgttctttttcgattccaaaagtgcctacccgtgaaccaaaacgtctttttttcctctcatctgcatatattgagacaaagatttgggaggtttttttcgtgaaccaagatgtttctctcaaaatgaccgagttagaccgcttgacctcactcccacatatgcagcttgtcaaggcggcgcttccctatattcacatcccggaacagcgttttttctccctgtttgtgaaattccgcgaactagaaaagacgatgcagctatttgctgatccggccgacggtgagatcggaatctgctcggtgggcgaacgcgacaaggattcgccggttgatatgctgaaagcgatcaagccgtatggcacagaggaagagcaaagttcgatcgatctggtcttaaattttatcgaaggttcccgcctctatgaatcctactggcaaaatatgccgcagacagcatcctttccgacttcgcaagatatccagaatgattcacccaattctgatgcagttccggcatctgtcctttacccgcaagccgaatattcccgcagacagaaaaaaaccacagaccgtgcatctggcacatccacttcaaacagacaggaggcacacactatggaatttcaaaactggaaacaggatccgagactccgctccatggatccagacaaaataaaacagatggaacagttagccgatcaggcaagaaacacgccgcaagacaagcttctgccgcttctcatgagtctccggggcagcaacggttccccgcaattctcaacctcagaaatggacactcttttttcgatcctgacagaccaaatgcccccagcgcagaaacggcaggcggaaatgctgcggatgctgagccggcagatgggcggggcaaataaatcataaaaccagagttgccactgctatttttccaaatcatgctacaattcatttcgataatgggaagcttgtgatgcaggctgagaggaaaccaaaagttccgacccaaaacctgatttggataatgccaacgtagggacagatattttgagacacctgagcgccggatattgtccggcgtttttgggtttcattaggaaattatgtcctatgaaacaaaaaaactcatctgggggttcctatctgcttccagataaaaatccccaaatgagatctgactctcacagcctatctaattagtaatttgctaaatcgctctcatcctgcaccaccacaatcttcgtcccggtatccacctggcacacaacctttttcatatcttcctccggaatactgatgcatccggaagttcccgtattattccagctcttcgggcaatgcaggaagatcgccgatccctttcccggtgtgcactccgaattataatccagcaccagaccgtaattatactgcggtgcctgcgccatcagatcctccgccgaattccagtccttctgcacctgtttcgtatttgccaactggttataataccggctgtttccatcatccacataataatcgccgtccacaatctggtgatacggcagaatcgttcccggatttgccttcaggccaaatgccatcgtaaagcggtacacacccgccggagtttttttatcgccctcctgcttctgcgttgtaatgccgttcatgccgctgaccgcctcttttgacattacctgcaccagttttccatctgtatcgcgtttataccagtccagacggctcttcgccggatcctggcggttgccaatcaccacaatcagctgcgttgcatccttcgccgcctccagtgtatttacatccccgttgtagcttgccgtaagcgccggtcctgtcgctttctccgccgccatcgcagccgccggagctgccgcactcatcaacatgcctgctgccaatactaccattgctttccgcttcattctcaatttcatcttatttatctcctattattttatgtatctgaatttcattcaaaaatcggctgcttttatctttcgcacacctctcctatacgcagtaaaaacacatttcctcttttctatatgaaacattcttttccacacactctgtcagttcctgccactttccagtccagccgcctgcagcatcgcctttccaaaaatatgatgaaacagcgcaatcacgcgccccaccagcatgacagcacagaccgttccaatgccgattcccaccggttttcccgcaaacaaaagtcccataatcagtgacagaacaatgcaaaacgcatccacacagttcttcatcagacccgtgccgattccaaaggtgtctgcaagcacctgcaccagaccatcgcccggatttggcaccagccgcattgacagggacatcgccgcgccgatgcctgtaaaaatcagggcaagcatcagcactcccaggcgtcctaaaagtccagacgccgccgttccgcattcttctaacgacggtatgcacactgaaaatacattcagaaatcttgtaaatacaatactcaatggaaactgcagtgcatctttcataagcaggctgcgtccggcttttcccttctcccgcagatgaatcgccgcctgaatcaagacaaagataccatacaggacaaaggtcatatcaccaaaattccggttccagatcacggatgccgcatacgaaagtgaaataatcggcgacactccgagtccagctttcgtattgagcgtaagccccatcgccagaatcagaagccccatcagataaaagccccaccgtgctgccccgcttcccgtcggtttctccgtcatttccatgttgtgattcaagatttcctcatctctttttcttaatattcgttaaatcgtaactgttcagtcccctcacagtcacgcgcaaaaatccattaaaaattgcctatggcaatgggatttttgcctgctggcccatgttttcgtacggtcagcgcagtaaatgcgcagacctgctgaacagttacattaaatctattctattatagatccttctctttccacttgacaagcgctttccgttctctttactttttccatcctctatgctacactaaactcatgattttagctgtatcaaaggagttttatacatatgaaaaaagatatgaccgaagggcgggaatggtcctccatcctgctcttttccctgcctatcatgggggcaaacctgctgcaggttttgtacaacctcgctgacagcgtgatcgtcggaaacctcatcagcgcaaccgcccttggagccgtcggactaaccagctccatgatctggcttctgaccgccatctgcacctccatcggtgccggtgtcaacatcgcagtcgcccagtatttcggtgccaaaaaagagacagacatacaggaatccatctccgtctcctatctgattgccgtggtcgtaagtatatttttaaccgccgcctgctttctggcagcccgtccagttattttcggctttttgcaggcaccggaagaaatgcgtttcgacagtatggcatactttctgatctacagcggtggaattattttccagctgctctacaatgtcacctatggcatcctgcgggcacacggtgattcgcgcggcgcactcattttcctgatgatctccgccgccctgaacattgtgctggactgtgtgtttatctccatctttcatatgggcgtctctggcgcggctgccgcgaccgtgatcgcacaggctggttctgccatcgccagtttcctgtacctgcggcatattttcccggacttgctgccaaaacggcgttatctctacgcctggaaaggacagggggcgctgctgatgcgcctgagtattccgatcatgctgcagacgggcgtcaattcgattggtttcctcatcctgcagcgtctcatcaactccttcggcgctcccagcatcgagggctacgctgccatgctgaaggtcgaacaactcgcacacattccgtcccagagctttaacgtcgccatctccagcttcgccggacagaatatcggcgccgaaaagctggaccgtgcccgccgcggttaccgcacgaccatcctgatgggtgtcctgatcagtatctccatcagtatcgtggttctgctttttgaccggccgcttctccagatcttcaacatcaccggagagtccctgcggcgcgcaaaggaacatctcgacatcctgatgttcttcatctggaccagcacgatcaccaacatcacctgcggtttcctgcagggagccggcgatgtcaagatcccggcagcttccggtttcatcaacctgggcatccgcctcacgctctcctttcttctggcgctcaccccggttggcttccgctgctactatgtgagcatgccgcccgcatggctgatcgcctgcttcgtagttgtgatgcgctaccggagtggaaaatggagggagtttcggattgtaaaagagtaaagaaaagggatggaagaattcactttggagggtgatttcttccatccttatttcgtttagagctctttttcgcgttttaccctctcctaaaattttagcacactactatctataaaacacaaactccatttttaccatgcacattccactccacgcgcacaccgctgctgccagtgcccggtatgtaaacacgatatggatataagaatattggatcttcattctggtaatctggtcggtaggctgcagcaacgcagttcagggcactgacatcttctttttgataacaggcatttccaatcataagcgcatccgtccagttatccagcggatccgcatatgtataaccaaccgccgcacctattccttaaacttttccaaaatatgcctaacttcatccacatctatcttcatctgttctgcaatctggttttctgtatatttatctcgatataatctataaatttcaaacacccgttcttcaccctgtttctgcccttccttcaatccatccttcttaccttccgcatactctgccttccgaatcaattccttttcccgtttctcatcatattcgaaaatacacacctctatcgcctccgttcgattctttctcaggaaatcagccagtatattttcctcaatacattccgtcacagcctgctctgccgcccggtttatgtccttatactctgccacatatttacgaatcttgtcaaccagaagcatatactctttcaacaggcagcaagtttccaaaatcctctgttttttatccagattaatattcaataccttcactatcaattccagctctggttcatccgccttctggcagaatgaatatgacagtttcagaacactttccgcttcccgctcctcttctccattgtaaaatacaacaaagtgtggggtcggcaattctaccagcgttgacgcatacagcgtttgattccgaatgagcatctggtattctttcgtcacataaatcagaaaacgcagcggcatattcggattccaagttgactgatgttcatacaaattcaactgcatatccagcaaaaatgcctggtcatttttcatattcatataaactgcattttccagcgtcacgatctccaactcttttgcatccgtataatgtgaatgatttaccgcattatacagactcaacaggttctcccttgtactgaaaatcatccgaaacaacgtatccttgtgatcccgccttacttttacagaattcatatttctcattcattctcccttctggcaggagaatttccacttttcttttaaccctttgaaaatctcctgctcttcaattattgttgacttggataagcataagatttctcagattaaaattagaatattagataccgcttaaattgctgataaagaaaaatatatgcttgataagataaatgtagcatatccgcatataggatgcaagaagaatttatttcttttatattcctattttatgccccagattactgttcacacatgagtgaacagtaactgccccagaacattcccagataccgtttccgcatttccatatccaacggtgcatctgtcataactttcgtattcaaataaggagtgccctccctccgaaagacactcccgtctaagctaaaaatcatttaaatcgttccaaaattttccgtacttcttctacattcatccccagcttctctttaatctggttttccgtgtagttcgcgcgaaataattggtaaattttaaatatccgttcggcttcttctttctttccagcttcccgtccaatcctttctccctctttcataccttccgaatactccgccttccggatcagctccttctcccgcttatcatcatattcaaaaatacacatttcaatcgcctccgcccgattctttcttaaaaaatcagccagtatattttcctcgatacactccgtcactgcctgttcgactgcctgattaatatctttatactcatccgtatatctacgaatcttattcaccagaagcatatattctttcaaaagctggcacgcctccaacacttcctgtttcttatcaaggttaatattcaacacccttaccatcaattccagctctggtttatccgtcttctgctgaaacgaatgcgacagcctcagaatcgtctccgcctcctgctccgtctccccattataaaacacaacaaaatgcggtgtcggcacctttaccagcgccgatgcataaagcgtctgattccgcaccagcatctggtactcctttgccacatacatcaaaaagcgcagcggcatattcggattccaggtggactgatgttcataaaggttcagctgcatatcaagcagaaacgcctgatcattcttcatgttcatataaaccgcatttttcagcgtcacaatctcaagctccgatgcatctgtgtaatgcgaatgattcaccgcattataaagactcagcagattctccctcgtgctgaaaatcatccgaaacagcgtatccttgtgattccgcttcacttttacagaattcctacttctcattcattctcccttctggcaggagaatttccacttttcttttaaccctttgaaaatctcctgctcttcaattgttgttgacttggataagcataagattttcttagattatttttagaatatagataaatatatgaaatgtggtaaagaaaaatatatgcttgttatgttaaatgtagcatatccttacaggagatgcaagcagaataacatccttttttaacaaacttttgatgtttcaaattcatgtccttcttcccttcttcccagacatccccgccatcacaataacaaaccagaaaaacggctgcctgcagttcatcagcgtaaaactctctgccagaagtgccagcaccgccgccctctgcgctttctcacaccgaatcacatttttcacaatccaatacaccagaaatgtggtaggaatcagtccatacgaaaaccagacatcaaaaaagctggaatgaatctcattaacatgaaaaacatcaaacacgcccggactcagaagcttctcaaatccatcatacggaataaaacgttcaaaaaaaccctctcccgctccataaaacaaatactgaggcgtcaataccagccgctccgcacttctgtcatacagcagatcatagagatttccatttgccagcttccatattttctgctggattctggaaagaagcgtataatccgtctgcgaaacatcaaaatttgcccctggccagatccgatagacgcccagcgccagcatcactacaacagctgccccgccgaaccaccagagttttttatactttgagtgcgtgcatctttcccagaaaaactgccatgccagtattacaaaaaaggcaagcagtcccacaaacataccggttgattttgcttttccaatcagaagaactccccaaaaaaacattccccagcacgcaatccgtgtcttgactgtatactctgccttccgccggtattccataaaaagcaccagaatcatcgtaaagatgaaaaaagcaaactggttcggatcattaaacgttcccataaaccgagaaccgccccagctctcatgaaaatagcgtcctcgtccggaaatcaaaacaattgtctgaaacaccagattgatccgacatatccagcaaagtccccgcataaacgaatccgaataaagtgtccggaacgcccagatcaggaatgcagaataaatccaataaagcgtatgtaacggaaaacttccttttcctgtccgaacaaaataaatgccattaatgacagctgcaaatatcaggaagaccacccagggaaaatcttcctgataccagattttcttaccacttctccacgccatgataagcgccagggcaccggacaaggcgaaaaacagatccgcgatgccgatgctgccgctggggagaaggtagaattgtttggtgaggacggctgtgtaaaataaaacttcaaccatcctgtttctctctaatttcatttgttcttactttatcctaatcccacaaattttccggatataatccactctctatcatctgtcggaatccctcctgcgccggttctatatcttctttataagtaattccaatccatctgtccggcgtattcaaaacttttacggaagctaacttcttttcaagcaattccgccacaatatttgggagaagatactccttcttctccggattttcccctaatgcatcaaggaatctggcaaatccttcatctatgtaccgcaaaaaatccggatatccggcccacatattcatggataccatcgtatccggtgtgatccatttgcttaccttcgcattatcacactggatttttccatctacacactgaattcccgtcgtttcaacgacctctttcaagaatcccgcctcatctgccacgcagacacctctggtaaccgctccgttttcactcagcgtattctttaaagaaaagcctgccattgccagatttatcttatccgcatctgtatttccagaaagcaggaactcatgaagcttcgaaaaagcttctttcccataataatcatctgcattgatgatcacaaatggttctttcacaacatctttacaagccagaattgcctgcccggttccccatggttttactcgtccttctggaacatgatagccttcaggcaagtcttctaactcttgatagacatattccacaggcataaccttagataagcgatttccaatcacttctttaaattctttctcaatggctttccgaattacaaatacaacttttgtaaaaccagcttccttcgcatcgtaaatcgaaaaatccataataatctctccattcggagccatcttagccagctgcttgataccggttccaaaacgggaacctataccggcagccatgatgatgagggttgtgttcatgttttcctccataactataaagatgcaaatttacagagttgtttctttctgaactattctcttctgttctccccattttttacagactaacagcatcaattctgaaatcattaccgaccaaacgattgacattcctaattttaaccaatatccatttaaaggaaataatctttgaatccaatcttgaataggataatggatgcaataaattggaagtgccaattcacccaaatgaatgcatatcgaataaatatgcttattttttatataattttcatcattcattaatgtaaaaaacatcactataattaaataggcaattatctccgctgaaatatcaattccaccatttctaaaaaaaacagtaataaaaataaagcctataaatccaatcacactcgctatacgaaataacattttagggaaatcatctttttctttataatatcttgtcatataaaacaatgcgcttccaacagtcaatccagcgattcctctaaagcactgaaatattccgccttcccaaattgcaatttttttcatataatccatgcacaatgcatataacataataggaataaaccagcataaaaaatatttataaattttttcatttttgaccattaaaattataatcaacggcaaaaacaaaatcaaatgcgtaatataccacaaaggtggatcataggtataagaagaatttgctatatcacttccttttaacaataataaattatatattaatgaaaaggaagctacgcctctgtcattttcagagcattttgtaataacattcaaaaagctgaacagcaccccccccctactgcataaggatacaatttttttattttactttttacataaaaaaacatttcatcgtactcaactttatgtttttccatttttttgacaaaatgactcgttgtataatatcccgttaatataaaatagaactctacaaatgcccatcctcccaaaaaaatcgtccgatccatcaatgtatatgaatgatgacataatattataattgcgccaacaaacctacacaattcaatatattcacacttatttttcattcattctcctatacgttttacttttgcacacacaaatcatgtacacaattctgtctataaataaaatattaaaactttttcttcatactttttattaatagctttcactattttatcttgtctctgtgtattcttctggtgtataatgaataatttttgtaccaccctcttcaaacttgaatgggacatgtaccaaatctttcattgcttctttcactctactttgtcgttcttccggaacataaaaaacaagaaatccgcctcctccagcacctaaaagcttccctccaaaagcaccttcttttattccaagttcatataatcgatcaatagaagaagtagatatcttcgagcccgtttgcttttttaacttccatgtagtatctaacaattttccaaaatcatcaatatttctatttttatttaccaatacctgttccgcttcatctaccaaatcatacatttctgaaagatattctgatttactttttgcagccacattattaactgcttgtatttcagaagaaaatcgcgtgaaaccagtaaaaaataacaacaaattattttctaattgtttcttcctttccggtgaaatcacaattggccttacatcatattcatttccagaaaaatcgatccgattcaaacctccaaatgacgcagctatttgatcttgccatccgcctgcctctttacaaagttctcgctccaaataaatagcttcatctgctaatttctttttatccgcatatttaccctttaatgcataaaaagcatttaacattcccaccgcaaaagaactgcttgttccaagtcccgatctagctggcaaatctgcctcatatactaaacgtatctcatgcatattaagcatattcattgcatttcgaattgccggatgctttatctcattattttcatttacatattccattttcgaatacgtcaaatgtgttttatattcaaagaaacgcggtaaatgacggacatttacataacaatatttatcaaacgtcgtagataaaactgcccctctattttcataaaaatgttctgggatatctgttccaccgccaaaaaaagacatccgaaatggtgtttttgtaattatcatataattttctcctatataaattcaaacttcatattttatgaagacaattagctttttagaatatcatccattagtttatccaatggatatctttcaataaataaattgtattgatgaatactctcttttctaatatcatcaatagtctttttccgaacatcatcttcataatttgtaagttccataagatatttagcacactctttttcactttctaattgatgatatttttcttttaatccaagtccagttgctgcaatttttgtacaaataatagccactccatatgacattgcttctaatgtcttacacttcaatccagaataaaaagtatcaggattgatgtatatatcatatgaggaatagaactttttcaagtcatcaatatatcctaaaattcttatattatctggaacctttaatgatgaaagcatattacaaaccccacccgcaatatttaattgtatttttttgttatttgcaagatccgatattaatttcttaatagcaaaataattaggcggatttgaagaagccaaatatcctacttttattaaatcttcttcatatttattatcattccttttttcatcaatataatggcatgcaggaacgaatggatatgtaattaccttcgtttgataatttgttatttttctaaaaaacgttgcatcttcttcctgtgatgccaaaacaatatctgcccgtttaagtgcacgtgcttcttctctttccgtatttaccccaaaccaaaaactccactctggaaaacccgctttttttaatgattcattatgttttgtaaatttgtcatgtgtatataatactttctttgcatttggcaaaacctcaaatgcttttgaataaaataaataatttgccatgcaaagatcgtaatgataatgttcattcattcggactatcgattgtaaaaattcatcatcaacccaatcatctatataatccccatccgcacaattaggtgaaacattagtatgcgaaaaatatggatttgatgcatgttgataaaaaactctatcccaaacttttctatttatattatcaggtctaaactcattataatacaaaaacaaatgcatttgatattttctcttttttaacatttcggcaatattttcaatgttatgaattgctgcattttcagaataccatggcacaattacaagtgcttttttcccttctcccacaggttctaattcaaatattcctgtatcaaaatccatgcaatataatcgatttgaattaccatctatttgaacttctccctcatgtaatttattccatataaaaggtctatgcatgaattgattaaattttgtccatataaaatcacccattcttgtatgatacatgacccttagaatatttttcgttaaatcatgttttctacgaccatcttcatttacaactatccctgtttcaaattgttttaaaaatggatatacagttttataataataatctcgcatttcccatctttggaatcgtgcattatctaatccaactccagcttcttttccctctttataaaattcttttgccttctctaaaaattttttttgcgttttatcatccaaacgattataatggaacaaaaaatcaaaatacccatgcaaataaaaagcatttttaaaaatctcaaattttttatgctccatcagccatttttttatctgtgcataattcttaaattctgcatcccagttcttcgatgatttacttgaagaatttgttgtcataactcgatagtcatataccgcatcaggtatacacacaactgttttggtggatgaatatatcataaatttaaaaattccatcttgatacgctgctccagccgattcaatcattctaatttgattattctctaaaaaatctctgcgataaagtgccgcccatatagatgattccattaacatcaaatcgttagaataacatggctctactatcacctcaggctcataaaaaggaaatgggggttttacttcacaacttccaccatcttgatatagttttttaaaccccgccttaacaacattggcctgatgtttttcagctgctttgtataaaacttccaacatattgggctcaataaaatcgtctgtttcaacaattgcaacatattttcctgaagccttatcaaatccactattaacagcttttccgtaacctccatttttctgatgaataggttttacacgatgatctttttcagcataataatccattatttctccgcacttatcaggcgaaccatcatcaactggaataatttcgatatcttttagcgtttgatttaatacactctcaatgcattgttgaaaatattcttcgactttataagtcggcattattactgatattaaagccattttttctcctttataacttacctcattatcaaaatctttgcactttcatataaagcactgatcacatcagcacaatatcatttatttatcacattacctatttcatcttccgtaatccaatcgctcacaactccatcacctaaatatttacttttatattcctcaaagtcattttccaccgcccaaaaaatcttaattccagctctcctaatatcttttattttctcatcatcagcatattgtaagtttatattaactgctttaactttgtatttattacaattcgaaagcaattcatcaaacttgtctggatagactgcatgctgtcttaacataatattcttaaatggatatatttttaatacatcctctaagtcctggacatcatagcaagaaacaaccaaatgattcagcatttcatcattttctttaaaatgttcaataatccacgtatatgtttcttttgcatcctcttttacatccaaaaccatatacgcgtccgaatgggatttcatccaatctacaacatctctgaatgataacggtgtatattttgacaagatgcgagcttgtttaaattgttctaaagtcggcaggtattctcttggtatctgctcttgaagatattcactcggctggcgttcaatctgctgtaaatattcaaattcaggctgccctaagtctacttgtgtccagtcatgcctcagtacaatttcatcatccgaagtaaacctcaaatcaatatcaaatagccttgtctcattttgataggactgattgagtgcttctaacgaatctgtatatatgtttccatctattccccctccagcatgagcaatcacattatagtcataaaatttagcttcctgagttggtttgctgcaggaacataatacacagcatccgcataacattaatatgtatttccaacatttcatctttcgctgcctttatattcttcccttattttttctttaatactttttgtagaaactgattttgtatatggaaaataaacacacgaaactcccttttgtttcaatttttcttctatttcattgtacatcttcgtatttttccaatcgtctccatgaaataaaacgttgtaattaatttccgttaatacctccagcttgttcattgttttctgcggaattacttgatctacacatttcaatgactttacaatacgaagtctgtcttcaaaaggaataatgggaaattctcctttatactcttttaccagttcatctgtgcttacacctacaacaaggtattcacaattttcctttgctttttccagtatatttaaatgccctacatggaacaaatcaaaggtgcctgttgtatacccgattttgaatttctttttctgcataaaacaatccctttatactaattttcattacatttcaatttacttagatattccttgtaatccatctctgtatcaaaaattacccctccatgcgtattcgatacattctgaggcgtcatataatctccatacctgtttgtcagatatgcatcatacccagccggtaccggcattttcaaatattcaaagtccatccaaattgtctcatcatacatatggcggtctctgattctcttttctgtatcaaaaataaagtttaaaggtgccaccttatctgcatctttctctttgactgaccggaacatatcatctatatatttccagcaattgtctgtactcagattttctttcaactcctctggaatttcaaaatcctccggccattcaaattctcttccatctgtcgtttcaacaataaattgctttaatacatcacagttcattctctgcttctctacaacctgtacatcatttgaaacattctctaaaacaaacagatcgataaaaataccctgattaaattctttattctgtctttcttctacgcttaggattccagttgtatagctatttcgaatctgagcatgtccatgtacatactttttatccgtgtacacattctgaaaaaaatacggttctgtgaaatatctgggagcaatctcacataacttatcatagtcttcccggaacattgcaaaatccatatcatcatcccaaggaatgaatcctttgtggcgcactgctcccaacatagttcctgcatctgcgaagatttttaaattattttccctgcacaccgtcagcaggcgatctgccatctccaattcaatcgcccatacttttttctgctgttctgttatttcaaaaccgaattttgtttccggatcaaaaaatgactttattggatatgtgttccatccatgcggcattaccaaaaatccatgctcttttcgctcagctgtcttgatatccaacacaataaaatctatcagactgtcatgaagaactaaattttctccccatatacgtgcttccaaataatattgaccatccaaaagataatttttatcaatatgacattccatgactccgcaatgctcggataaaatcatttttttatattccaatgcggttgatgtccgataaactggtgtatgatcttttgtaacaattccaaatgcaaaacttaacggcatatttttagttctgcttgcatattgaaaacgaattgttatcttatctccggtatcaaaacaagcactggattttccttctttgtccagcagttcaatcgaagtaaaatgaaccagtcctgttccttctcttttcgcctccggagcgctgaaaatactcagtgagctgcaggtctcatcagtaaaaggattttccttctccttttccttcatctctcctttatttccacttaagctgtttaaatacgctcttgatacttcacggacagttccacagcctctgacaactcctttttctaaccacaaagcattgtcacagatttttcgaaccgattccatcgaatgagatacgtacagaagtgtcgttccttcttctcgcatctttttcattcttttctcacattttcgctgaaacgcataatcgccaaccgcaagaacctcatcacaaatcaaaatatccggcttaaccaccgtcgcgatcgcaaatccaagtcttgctgccataccggaagaataattcttaatcggcatatctaaaaaattttccagctccgcaaattctactatttcatcaaaatgctctttcataaactgttcgtcatgccctaaaacagctccatttaagtaaatattttccctggctgtcaaatcaccatcaaaaccggcgcccaattcaattaaaggagcaatcgttccgtttaccgttactgttcctttatatggttttaaaattccgcagatcacctttaacaacgtcgattttccagagccattgattcctatgattccccaggactcacctttttttacactgaatgatacgttttttaatgcaaggaactcctcaaacattaattctcgctttacaagcttaataaaatattctttcagattatctatcttttcagaagccatattaaatctggctgttacattctttacttcaactgctatttcatttttttcattctgtttcattttttcctcgtctaaatatataaaataaatttatcctgtgttttagaaaaaacaatgcttccgacaaccagcgatataagtgctaccgtaaatccgtaaagaatccacttaatatcagggaatactccttttaaaacaatggtccggaattgtactacatatgaatacattggattaaatattttaattaaatgctgtacttgttctggaagctgctcaattggataaaaaattggtgtaagataattccacgctgttaagactgctgcatagatatgctgaatatctcggaagaagacacatccctgcgccaatagcaatccaagtccaatactaaatatataaatttgtatcagcacaaccggaatccaaaacatataaaaattaaatttcacaccgcacacaataaatacaatcaacatagctccaagagaaaataaagtatttacgaaactgcttgttattttggatattgcaaatatatatttaggtacatatgtcttttttagcaatgcactatttcctataattgaccacatggcctgactggttgcatctgacataaaactaaacaatgtagaaccaataatcaaatataccggatagttttcaatattaaagcgaaacatttgtcgaaacacaattaccataataatcatgatcattaatggattcagaatgctccatatatatcccagaaaacttctccggtatttcaatttaatatcttttattaccaactgcttcatgagtggtttatattttttaaataattctatttgcttctttcccattctcaattctcctaatggatactaacctctatttgttaatattttttcaatccagagctttccattttttaatatttcgtattttgtcttatattctttttgagtttttccatattgaaccatcagaatccgccaagtatttatgcaatacatagctgctttgaaaagctgtctttcttcccgaactgccactctcttcttttttgccccagtatcccgcaattcaatccgcttctttcggaaaatcgaaaacggtgcatcatacggacgtaagatacctacttctttatctgctggcaggaaccagccgttgaaagttatctttttccaaaactgttttttattccgatccgggttatagcacctctgtaattcttttagggttggctgctcttccaattccatcggctctgtatccggaagatgctttctcaactgattgttcaaccgctctgcgtctgtccccatcagccattctggacctttcatgaaatctatcattccccgccaggagaaataggcttcttcataacgcatctttaaaacagctgttatgataaatttagagatccatttccacatctgaattcgtgacatatccggttcatgcagtgctgcaaatatcaggttattccgcacatcgtaatatgcgttggttcccagaaaattcacttcaaaccctttatgccagacattgaatccatttaagaaaacaatgcctgtctctctgtttcgaatctcatattcgatatcatcccggtgaataaacagcggaagcggcaaattatcttttcgaactgtattcagggaatagcagcaacaccaccaaccggaatacatccgatactcatcctgcggtgtctcaatcaatggcttccggcagttctgaaagctacgcatatctgtcataacaagacggttagtcacattgaatccttcaaaccactctcccattgcctgacaaatatatggataatcttcccgaagcagcgtacctcccaagcggatatcttcccactcatccttccgcatccccaggaacccatacgcccgcacaaaaagctccggatccatgatggcatcatcatccatcagctgtacatgcgttaatccgagacgttctttttcctcgatcgcctcaatcatgcctctggtaaaaccacccgcgccaccgacgttacggtttggtatgattcgaacggtttctggatatctggctgccaggcggctgatttcttcatgttccgaaagcgttcttccgttgtctaccagccaatagcagagttttaaagaagcattttccggtcgttccagaaattgcaggatacttttcagatttcggaggacatatggctctctcttaaacgtgcaaactgccgctgcgatccgcacctgtttttcattccgacaagttccctcataccagccttttatatgatttgatatatcaaaaccgatatttttctttgtatcctttatcgttttggcagctgcattttctgctgattctgtctccgcgtctttcacgttctccgattctgtctctttcccggcacctatctttttcaccgaaaaccagaaaactcctttttccgtctccggatatgggaactccagatccagagtttctttcccccccgtcagcatcttttcctgaatgacattctcatccaacatcagacgaattgcctgacagccattcaattccaggtgcagcgtcaaactttcctggtttgtgtacttctttcttttttcgatatagaaaaggttgaaatatccattgaaatcgacccattctccatttcgatggaaatacagttcttcttccctgcagatatctgcttccggaaatcgtatattttgtagacgcatccgctgtgtctccttttcagtccttttaggaactgccgttcctcattccatgttttgggattatatagtttctaatctgtctttatatctctgacggatctatcttcatatttagaacttccttctgctccgcccaagcgcccacaccgccgcccgatacagcccataccggcttacccgcagcagcttcaccgccttatttcggttcgcatggtaaatctccggatagtcccgaagtaattcatcttcaaactgcatcaatgcatgctttacttccttgtcggccggaaggctcagaagtatcttcactctcccagctgccaccctggcgattccattttcaagatactgtagcttttcctgagtgcatgaaatcttctttccgtcttttccggtaagtgttccgccctgatacaggcggtaaaaggacagcaatgattccatcactcggtcataattttccttattcctgatcatcttctccgggctgacactctgtccttcccgaccgatccgatattgatacacaaaatccgggataaaggatacggttttgacccacggaatcggatacaaaatgtattcggcatcaacgtaatagcagtgttcatcgatcgaaagcggcattttccgcaggatctctgttttccatgtgattccatgcattttcatgtaaatctggtctgcgattccatcgaattcataggaaatcccatatttcacccctgaaaatggttccggaatttctgcttttttcggaaaggagctttcctctccgcttccgttttcaaatcgccagtagaaaccgctgaccagcacatcatcccgacagtttttcagcgcagcaatcagatgatccaatgcctccggatccacccagtcatcggcatcgactactttcatatatcgccccaatgcattctggatgccgcagttgatcccagatccatgaccgccattttctttatgaatgacacggacaacggtcggatagcgctccgcatattgatcggcaatcgcaccggtttgatcccttgatccatcgtctataatcaatatttccatgtattcggaccaatccatacctggttgaaaatcaggcattcttgctgatacggtttgaatgtttgattccgtttcatttcctgtccagctctgatttttctttttcaaatcccggtctctgcaccctgcgcacagtgaatccagggtatatgtgatatatttttctgcgttatacgccgggatgacgactgtcagaagcttttccattgtctgcgactccttccgtactctctttgagcatcatgatcttcggtgtcatcaggatgagcttcaggtcaagaagcagagagtaatttcgtatgtaagtcaaatccagtttcagtttgtcataggacgttgtattgtattttccatagacctgcgcatatccggtcagtccggctttcatctttaagcggtagcagaattccgggatttctttctcgatctccgccgccagctccgggcgttccggacgcggtcctacgatcgacatttcacctttccagatattgaaaagctgcggcagctcgtccaggcgagttctccgaagaaaatgtcccaccggcaggatccgatcatcgtgttccgctgccagtctcgccccggtttttgcctccgcgttctggatcatcgtccgaaatttgcagatctgaaattcttttccgccctctgtgagacgggtctgcttgtaaaagaccggaccgcggtcggtcaggtagatcgacagcgccaccagaagaaagaatggagataataccacgattccgatgctcgaacagatgaaatccatcgcccgcttaataaatcgctgaagatccgatatgccatcatttctcgataatagcagaggactgtcaaagatatctaattcctgggaagtccggatcagaatgtccgataatttcggcaccgtgtaggtccggatatcctgctcaaaacatttctttaaaagcgcatttcgatccttcgccggaatatctccgataatcagggcatcatattttttcgcctcttcgagaatggcttttatgccgacgccgatatgaatcgccgtttccagataatacttgtcctctctggaatgaatcttttccatcaggtgaaaggccggacggtctccgcataccaaaagcatccttcttggcggaaacagaatcctgtatatctgctgaaacaggaacgtccagatcagtgcaatcaaaagctggacaaccgtcatcccaagcagtatccggggatcatgaaattttttatctaacagagaaatctgaatatacgtaatcagatttaaaagtccgatcgaaaggatctgagaacagagcagatttccttttttcaggtatccgatccggaatcccccgtaagtcagcaggaaaaatagtaatagtcccgcatacagggcgatcatcagccagtttcctcttctccagaacggaaattcgatcattttgttgaaatatccgttccagacatatccataagcgccaacttctgcccccatcaggagcagcgcacctatcagacggaacagtcgtttgaatggttcatattgtctcaaaatagttcctcttctttttgtttttattcaggccgaactccccagaacccaacatgtaattctattccaggtaatctgcctgtttctttttataggaacactaagcatcctctgaaagcgttcctctcaattttttctgatagagtattccacgcacggatgccggaatcagacttgcagtaacgcggatcacgcagtttcgcagatactctcttctatttaaaaatccacttttaaaaaacgttttctgcagattcagagcggccctggcataggacagaccgccgcggcgtttgatcatcccattatccgtcctcgcatacaccagaatatccggaagattttctgctttatatcctgcctgcaaaaggcggacccacaattcatagtcctccgcccccggaaccggatgatagtttcccaccgccagcacagctgaacgccgcatcatgacggccatatggttcatcggattgcgctttctggcaaacgttaaaatttctttatattggcagggaagtgaccgaattccagtgattctgcccggcggaaacaattttccattcatcccacttccaatttcacctctatctggcgcatttaggttatctacattttcctgttctggcacttctgctgcggcaaattctgcaatttttccgctcagaagtccgagtttcccctgttctgctttctttcccagcaatttgcccgctgcttcttctgcatatcgtttcagctgcttttcacagcgatccggacaggcaatatcatcactgtccatgcgggcgatccattcatttcggcacgcttctacacctgctgccagcgcccgtgcgattccgccgcatacaggaaggcgaagcacctgcagaactcccggccattcccggtcaatcgtctggatcgtttcatccaacactggtgtcaacggtccatcgcataccaggacaaattcatctggaggaatcgtctgattcatcatgctggctgccgcctgatagaaatacgctggattttctttgtgatataccggcatcagaaccgaatatttcatacactcatactcattattctgctgccagctttgttccatcgttctccgctccatgtaatcttgttatcttttttgatgggttctttccagagaccgatacccggctaaaatcgttttcctggaaatctcctgaaagatttttagggttcaggggtcctttctttgggaaaactgcctccggatcatcttccatccggattgccagctctacctgtcgtgcttcgttcagcagttctgcctgaatcgtcacgattcgtttccgcagccgcttccggatgatctttggcagcatctcaccaagcactccttccgcccattcgatctcccccgcgtcatttgcccgcaccagaaaccgccggacggtgtgagaagaatcctcccgaagaagttctttcagaaatttctcttcctctttttttaaggggactgccgttccatatagatgcgcttccgaaccagcattcagaaatcgaaccagccccgccagacatttcactccgtcttccaaaaccggctcatccgccgtgtccacaaacacatagcccggaaacatgacttccgtatctacatagtagacaccgcccatccgccaggtccgttctttggacaacacaaaacaaggcttttcagccttatcccgataaaaatgattcagtttttctgccgcttctgcctcgcgtcccacaggtgtctgcaccacgtaccacatacaggcgttctccctttcatgtttgcgattttcgcagaatatctagttctgcgaaaatcttcaatcattatacgatactttcaaggttaattcaatagaagtttctcccaagaatctcttatgaaattattaagtcgtcatttctgaacaaaaatttctgaaattctcatataatatttccctttgcttttgaagtttttgtcaatacggcatttgggttctgcatataaaaccttttattttcgcagaactagatattctgcgaaattttttattctgtttttttcagctacaagctattatgttgcatttatgatataagatttatcttttgaattggtagactttttagacaatttcatcgaacgatagtactccacgccttcgctctctcccagaagcttcatgtggaatgtttcgtatagacagcaaaaaagcattccaaatgagtttttcctcatcaagaatgctttttgcattcagggctgattgaaatgccgaattgtccaggttgacaaatattcccatattcaatttaattttatcatttaagaaatcaaatagcaggcacgtgaaaaaggagcgggcaaaaaaacagcggccacacagtttttctcccctgtatagccgctgaccttatctgcatagaaaagtcacagattcttctgcttcttcccataccatttttatttatttcataacaatattcacaatccgtcccggaacgtaaatttcttttacgatatttccagtcagcttgtccttgatagcctctttaccagcggcgatagcatcttctttggagatgtctgccggtacggtgatggtcgcacggactctgccgttgatctgaacggctacctctttctcgtcatccttcatcttctctgcatcgcactccggccaggaagcatggaagacactgtcggtgccgccgagctcctgccacagctcttcacccagatgcggtgcgaacggtgccagcaggatagtgaaggtcttgagggtttctttgtcgatgccaccctctttcttcgccagatcgatgagcttgttgttgtactccatgaaaccggagataacggtattcaggctgaactgctcgaaacgctgctcaatgtcgaataccagtttgtggcgcagtttaaccatttccttggtctctttgatgtctttgtccttgctggtcataaccaggttgtagaaacggttcaggaaacgggatacgccctcgataccgcggtcatcccactctgcatccagttccggcggtcctacgaaaagctcatagagacgcagagaatcgcagccgtagtcgcgtaccagatcatccggggatacgacatttcctttcgacttactcattttgataccattcttaccagtgatcataccctggttgaacagcttcttgaacggctcgtcgaagtcaatgacaccgatatcgcacaggaacttagtgtagaaacgggaatacaacagatgcagtactgcatgttcaacaccgccgatgtacatatcaaccggcagatatttgtctgctttctcacgggataccagttctttatcgttcttgttatctacatagcgcaggaagtaccaggaagatccagcccactgcggcatggtgtttgtctcacgttttgccggagcgccgcagcacgggcaggtggtgttgacccactcgtcgatggctgccagcggggattcgccggtaccagtcggctgatagctttctacctccggaagttttaacggaagctgatcctccggaaccggtacgttgccgcacttcgggcagtgtacgatcgggatcggctcgccccagtaacgctgacgggagaatacccagtcacgcagcttataattgactctcttgtgaccgatacctctcttctcaatcatttccggcgcttcttttttcagtacggaagattccataccattccactcgccagagttgatcatcgtgccggacgcctcggtatacgcctcagtcatgttctcgatctctttgccatcttttgcgataacctggatgatcgggatattaaatttctttgcaaactcgaagtcacggtcatcgtgtgccggtacgcacatgatagcgccggtaccgtagtcagctaatacataatcagacagccagatcggaaccttcgcaccgttgatcgggttgattgcataagttccggtaaatacgccggtcttttccttatcctgcagacggtctacgttggaacgcatggatgaatcgaaaatgtatttctctactgcctcgcgggtctcatcggttgccaggctctttgccatcgcgtgctccggagccagtaccatgaaagttgcaccgtacagggtgtccgggcgggtggtgtaaacggtgatcttctcatcgcgtccctctacgccgaaatcaacctctgcaccgtaagatttaccgatccagtcagtctgcatctttttaaccttctccggccagtccagtttgtccagatcatttaagaggcggtctgcgtacgcggtaatcttgagcatccactggcgcaggtttttcttggtaaccggggtaccgcagcgctcacagcagccgttgacaacttcctcgtttgccagacctgtcttacaggacgggcaccagttgatcgggaattctttctcgtatgccaggccttttttgaacatctggacgaagatccactgggtccatttgtagaatgccggatctgtggtatttacttccatatcccagtcatagatggctgcgatctcgttgatctgacgtttaatatttttaatgttggactcggtcgagatagccgggtgtacgcccatcttgatcgcgtagttctctgccggcagaccaaatgcgtcccagcccatcggatggatcacgtatttgccgcgcagcagctgataacggctccatacatctgaaataacgtagcctctccagtgaccaacgtgcagaccacttccggacggatatgggaacatatccaggcagtaatatttttctttctttccatcgtttacattgatgggatgtttttcccagttctcgcgccattttttctcaatggcggtatgattgtactgtgacatctttgttcctcctgttttctgcttaacccacgctgattttttgctatttcctgtcaaaatccggctccagtctctaaaatgatgattcattattgcaatcgactggtccgttggcagttgcataacatccaacccttgcggacattctttcaatccggtaacgtcaaaaacgccctgcgtctctacattacctgtatagagacgcagggcgaaaattccaactgcgcggtaccactctatttcacacggaatccgtgtgctcctcatcgtcctgtaacggcggatgaccggctctgtctactcgggtattcaaaaacacttctttcaacaggctgctcccggaccagttcggcggcttccttccgctgcctcacaccatccggcagctctctgtagaaatttcgcggcttactacttccgttcattgcatttgtgctatctggtagaatagcataaatgggaagaaatgtcaagtaacgtgaccttctcaaacttgcacgtgacagatccgacgttctttcaatacatgacattttcgacaatctttcaatcaccgtcaaacctacacctgaatccgctctgccacttcatcgcccagtgccagccgaacctttccatttccgatgatcagaccatccagcacacgtccaaggacccggatacggcttccttctttgattccatagcgctccaaaaagttcatcacatccgcatttccaaacatccacttgatttcacaggactctcccgcctgcacctttgccaacgactgcatacaacgacctcctgactgatattccgctttctgtaactgttcagtaccttcacagtcacgcgcaaaatccattaaaaattgcctacggcaatgggatttttgtctgctggtccatgttttcgtacggtcagcgcagtaaatgcgcagacctactgaacagttactgctttctttactattattatatgcagtcagactattgttagtcaatggtaataattgttagttaattctaacagtatttagccgttaccgtgaaccatctccacacttctccgtccatctcccggcggattctgccgcgcaggcggaggtagtccagatgcgccatgcactcgcccaccgcaaaccacttctgggacggtggaaattcttcccagctggcggcacggatcttccagcgcatctttccagccgtctcatatgccgtcatacccggatgttcggcaagcagcgcctccgtctccgccagacgccgctcatggtgtgccagcagcgcctcgatgcgcgctgcataatcgcccgtcttccggtgtcccggcaaggcaaggcggaccggatattttctggcgaggcgcaggctatcgagataatcacctaatgaatcctccgattccagccaggaagtaatattcggcgatatatcaaacaggatatgatcgcccgtgaacatgatgccctgtttctttgcccagaacatcgcattgcccggcgtatgccccggcacggagatcatttccagcgtgtaatctcctaccgtgtatttccagcctgcctcaatcggaacaaaacggtcatcaacctgatccagcttatagcggactgccggattgagcgcctgcgttttcttcatttcatcctccggaaatccaccggcacggaattgctccgccagccgaagcggacgctctggtgtaaaaccgtcctttaagattgccagatcggttccgctgatatagatgtggctgtccgtccctgccgcctccctggcaagtcctgtgtgatccgagtgcaggtgtgtcagaagaatatccagccgctccggactgctgccaagtgcccgaagcccggcaaacagcgcctcccggcattcctcgcgccgaaatccggtgtcaatcagaaggtcgcgcccgttttctttccccttgatcaggtaactgttgagttcccgcaaaggattctgcggcaattccacaccgatccgccagattccatctgccacctgttctacaagggcttccctcttctctatgttctttgtgatttcttctcttttattttctttaagcatatttttccttattgaatctattgaatcttctcagccttctgctttctcttctctatgatccatcgtccggaacagatgtgtgcaaatcaaaatcgccaccacaatcgacagataatccgccgccggctgtgcatagataactccatccaggccaaacatcgcattcagcacgaaaatcagcggaataaaaatcagtccctggcggcagatcgtaagaatcagcgacggaagcgcttttcccattccctggatcgtattgatgcagaggaataagataccaaggagtggcgcagaaagctggagcgcaaccaccatctgaataccatactggacaacttccgcatcattaataaacatctgaatcattgtctttcttgcgacaatcataatcaatgtcagaatcgttcccataataaccgatacaagtcctgtaaatttgaataccgacatcaggcgtttcttgttgcgcgctccataattataaccgatcagcggctggattcccacgcagagaccaatctgcagcaggacaacaagcatattggatttcatcgcaacccccatcgccgctaccggtgtgtcaccgtaaccgaccagcgcctggttcaggataatattggcaaagctcatcaggatgttatttaaggatgccggaataccgatccctgccacgccggaagcgattccatctcccatcttaaaatcacggaaatgaatcgacagtgtcgattttccccgtagataataagcaatatagtaaagacaggccgcaatattgccgatgatcgtcgcaagcgctgcaccggtcactccccagccaagcaccaggatcatgatcggatccaaaataatatttactacggtacctatcaggtttccgaccatcgattctctcgatgcgccttctccccgcagaatattcgcaaatgcagttgaaaacataataaacggcgcgccgattgcaataatcgccaggtactgtctcgcaaaaccgatcgtatttacactggcaccgatgagatgcagaatggtttccattccaagtacagacaggatagccactatcacgcccagccccagggatccatagcagcagaatgaactgatatgacatgcccgatctttatggcgttctcccagtgctctcgatatcgctgagctgccgccgataccgaacagatggcctaatgccataaaaatcataaagaccggcgttgccagcgaaactgccgccacctgcagcggatccttcgtctgaccgatgaaaaatgtatccgccatgttatagataacaaccaccagcatggaaatcatggtcggaaccgccatggttgcgaccgccttcggtacgggtgttttttcaaataaatccgtatttgttttcatttgtcgtaactcctctctttctatatttgttgtattctttacagtcacattctcgcgccgagcgcggtcgcttgcgacatgtttctgcttcgcgcaagtgcacatcattggcacgttagtgcctttttgtgtaataggggattccaaggaatttcctattacataaaaatacaggcacttctgcctgctgtgtaaaagatcaactcttatttataaacacttaattttatcataaacacctattttgtcaactatttccgtattaaacttatcttaaaacccagcttaaaaattgtcttttggaattgtctttggaagttgcaaaaaagcgctttctgggatatgatggaaactagaaaattatgaatttcataccgatggaggatttttactatgtctaacaattacgcaggcaaatttgtaagtgctgagaccgccgtcaaggccgttcaaccgggcgactgggtggattatggctttggtgctggatttccggagcttctcgaccgtgcgctggcagcacgcagggatgagctgaccgatgtcaagatccgcggcggtttagtcatccacccgcgcatcgaggttgtcgaaagcgacccggagcagaaagcattcagctactacagctggcacatcggcgattatgagcgcaagctgcagacccgtgggctctgcaagtttatgccgatgatgctgcgttccctgccggaaatgtaccgccaccacattcgcgtggatgttgcctttgtaccggtttccagaccggatgcggacggctactgcggactgggtatttccaactatgcatggcgcaccatctttgagaatgcgcgcaccgtcatcttcgagatcaatgagcgcctcccgcgcttacagggcgtcgatggttcccaccgtgtccacctctcagaggcagatttcatcgtcgagggcgagcatgagccgcttccgatccgcacctaccgcgatccgagcgccgttgatattgagattgccaaacgtgtcgttgaggagatcccggacggcgctgtcctctccctgggagtcggcggcgttccgtttaccgttgccaatatgctggcacagtccgacaaaaccgacctcggctgccacaccggcaccatcagcgatgcttttttagccctctataaggctggcaagctgaccaacaagaagaaggagattgacaacggttattctacctggaaccttgccatgggctctcaggaattatatgactggctggataatgagccgcagctcttccatccggctgacgtcgattacgtccactccccgtaccgcatcggtgagatgaaaaatgtcatcagtatcaacggtggggtcgagctggatctgatgggacaggaaaatgccgagtctgccggcacccgacagctctccggtatcggcggacagatggatttcctggagggcgcattccgctccgagggaggcaagggctttatctgccttgcttccacccacaagaaaaaagatggctccttaaaatccaacatcgtaccgttcattccgggcggcagcaccgtatctgcaccgcgtaccatgattcagtacgtggcgaccgaatacggtatcgcaaaactgaccgggcttaccttaaaagaacgagcggatgccatgatcgccatcgcacacccggatttccgtgatgagctgcgccggtatgcggaggagaattttaaataaaaattggaaagatacatcggaaccgaaacatcaacattccatgttatctttgattatttgaaaaccagaattttcaacatagaaaagccgtaaccttatactttcgctcatgagtttaatcccatgggcgagtatatctgattacggctttttattttttatgcctctttcttcgcccctataacaaccataaccaccataaaccggcagaccagaataatcatagacgcaaagagctgccacagcgcgatatgcagaatcaggctgactgcgtacccacacagtgctgctcccattaccatagcatatccacagcacagttcggagtgataggaatgtctgggcgaacctgcggtgtagctttccatcagtccatagagcaccacatattccagcatacacggaatcagcgaccagatggttccgtccggccgcctccagaacatggacagaaagctagaaaaagcagtcaccagcacaagcgccgcccctgctgcccggtacactctcatctcttttacatccatctggaaaaatccagcctgccgctctttctggagaatcccgatatataaaatcagaaacccgatgcagggcggcagcagcatcacatggaacagattaatatgaatcgaagcaagaatcagaccggctaaaatcttatgatctcccgttttcacttaaatgcctcctctttcagcagatatttccacacatcaataaagcgaagctcccttctcttcctgtattcattttcaaatgaaagaacctgctccccgccatctttgccgatatatgaaagcactgcaactcctgaatgaaatacctgcggcgactggtcttcctctttgccaatccaatggctctggaacgtcaggacatcacccgtttttactgtcagccgtttcggctcttccccttctttttgggctgggataggctctccatttaaggtcatcgaaaaattttccatctccccggctgacgcaatgcagccttttacttcgatggttccatctttctgaacggtgtaaacctgtgtggccgttccatctgaattggcgctggaacttggattttccagggcgctcccgccctccggatttgcaatcagtaccagattaccaatttttacgtccgctgtgtttccatctgaatagagcacctgcgcccgcgtcaggattctccactgactgatcccgttatgctgcggatcttcaatcgaaagcgtagcatccaggcgatgaagcgcatactgtcccgctgactggactgtctcccgcatttcctgcatttgaagttcaggcaactctgaaaaacgaatttctctcacacagatctcatccgtcacatccgtcagataggcaaaatttacctgtgtataccatacatccgaagtttcatctgtctcatccacactttcttcccccagtgcatacaaagacactgtattctccaatcccatatccgcattcaggtctttcataccttcgtctaaaactccaactttcacatcggaatcggtactttcttcttcaagcgcctcacttgacacagatgaaacgattccatcctccgaagtttctactccgtccagcccacagcccagataagccgactggctgtagtgcagaaacagcggttctttcagccggaacgtatactgggcgatcagacccgccagcagacaaataagcgccagcaccagccagatatgcacaatcatccgctccgggtgtttccgaactgtttttgcctgttcttttacttccatgagttccccgcttttctcatttttctctatcataaaaaggccacccacctgtctgtataagttgttctctttgcaacattatacctttttacaggtgggtagtcttttctattttcttacaatttatagccttctttttgaaaattgcaaaagaacgcaattcgtagcaatttggcatccgcattcactgccttaacttctcgcctgtcccatcgataacattcgcaacgctttgttcaattcaagcacagcctataaccatatcgatccgaaagaccttccagaaagagaaagccgccgctgacagccttgatgaatcggtatcgatccactcagccgcctgcggcggttttctgcttatttatataagaatatcatatttttgaccgaaacggtaagcacttcatctgccattattcagcttctgccgctctcgcctccacttctctcttctgtacatcgcccggagcctgctcatagcggctgaactcataggagaattcgccgataccgccggtcatggaacgaaggtcggtattataaccaaacagctcggacatcgggatatctgcctcgatgatctgtttgccgtgatggttggagttcataccgagaacacggcctcttctgcggttcagatcgcccatgacgtcgccggtaaatttatccggaacggttaccttcagggatgcgatcggttcaaggagaactggattcgcttccatgaacgctttcttgaatgccagcgtcgctgccatcttgaatgccatctcggaggagtcaaccggatgataggaaccatctaacagggttgccttcacaccgacaaccggatatccagccaacggacccttctgtacacattcctgaacacccttctcaactgccgggaagtagttcttcggaacggcaccgccaaataccttttcttcgaatacatatggtgtctccagatcgccggacggctcgaaggacatcttaacatcgccgtactgtccatgtccaccagactgtttcttatatttgccctgtgcttctactttcttgcgaagtgtctcgcggaatgcaaatttcggtttgctgagcacaatgtctactttatatcttgtctgcagcttgctgacaacgacttcgagctgctgctcgccgatgccgtaaagtaaggtctgacggttctcggtatcgctgacgcttctgagtgtcagatcttcgtccatcatctttgccagtgcactggagatcttgtcctcatcgcctttggtcttagctgcgtatgccatgtaggtatacggggtagaaatcttcggtttgtggtatacaatcggagccgtgcggactgcgatggtatcgccggtctgagtaacgtttaatttggcaaccgcgccgatatcgcccgcctttaattccggaacctcgatgacatccttgccgcggagaacatatactttctgaactttctcttcagcatctttgtttacattgtagataacggtatctggttttaaggtaccggtacaaatcttcatcagggagtatttgccgatgaacgggtcaaccacagtcttgaaaacacgtgccgacagggatacatcgtcattatatttagcggtaaagcgctctgcggtcgatacatcgacaccgacacactcgaacttgtccggtgacgggaagtatttatcgatcgcctgcagcaaatatgcgaagccctgtgcattgacaccggaacccatcataaccggaacgatgttgccctcacttacgtgctcgcgcagcgcctgtgcgatctcttcctgtgtaaattcttcaccggagaaatagcgctccatatattcttcactcgtctctgccactgcctcgatcagcgcatcacggatgatgccgaggttcttcttggtgtactccggaatctcgcatttctcatattcgcttaaatgagtgaaacggcggccttccatctttaccgcattgacaaagccgacaaatttttcattttcacggatcggcacctggaacggcgcgatcttacggccaaactgtttctccagttttaagatcagctcacggaagcttgcctgatcgtcatccatgttggtaacgaagaacaggcgcggcaggttgtactcttcacagagttcccatgccttctcggttccgacttcgatgccagccttgcagtttacaacgatgattgctgcatctgctacactgatagcttcctctacttctcccacaaaatcaaaatagccaggggtatctaacaggttaatcttgatcggtccatcttctccctgatactccaacggaatcagcgtggtggagatagagaactgtctcttgatttcttctttatcataatcgctgatggtggttccttccggaacttttcccattctcttggtagtacctgttaccagtgccagcgcctctgctaccgttgtcttgccggcaccgccgtgccccagtaacactacattgcggatttgttttgtcccatacacgttcatagttaagtcctcccgtctatttattttgatgtttttttcttgtattttaacctctgttcatattgtacaagaaaatagagaaaatttcaagcaaaacaacacctttatacaaaatttattcgttttattttgaaaagcattgaaaatgcgacaatttccctgttcaaaggcggtgaaatcaatcgcattttcgcaaatttagtaataaacagatgtaaaaaaatttctttttcacttcaacgcgtaaaatcgttgacaagtgacttgttctattctacaataatttctagtttcattttttactatactacctatgaaagagagcgtaattgctatgaatacaccgattaatcatcttaccgccggtttcatcggactcggtctgatcggcggctctatcgccagaggtttgaaacgcagcgccccggatattcagatcatggcttatatgcggacccgcgaaaaattggaacaggcacatgcagacggcattgttgacctgattctggacggcgtggacgagcatttaagcgagtgcgacatcattttcctgtgcacaccggttgaatttaatgaatcctatctgcgccagatccggccgttcttaaaggaaggcgcggttgtgactgatgtcggaagcaccaagaccagcattcatgagaccgttgccgcgcttggcatggaaagctgcttcgtcggcggacacccgatggctggctcggaaaagaccggctacgagagttcaaccgaccatttgctggaaaatgcatactatatcattaccccgacaccgcacaccccggcttcccacactgaccgtatggtgaatgtggcaaaggcgatcggtgcgctgcccctggtgctggattaccatcgtcatgatttcattgtcgcggcgatcagccatctgccgcacctcatcgcctccagcctggtcaacctggtacacgactgcgacagtgaggatcagatgatgaaacggctggctgccggaggtttcaaggatatcacccgtattgcctcctcttctccggtcatgtgggaacagatctgcatgacgaacacaggcaatatcactgaggtgctggatcgctacattgattccctgacgacattgcgggaagaactgtccgaccaccagtctagagccatctaccagctgtttgagtcctcccgcgactaccggaattcgtttgcagaaactccaaaaggatcgatacagccggaatacgccttctccgccgacgtggtggacgagccaggtgctatctccatcatttcctcgatcctctccggtaaaggaatcagtatcaaaaatatcggcatcagccacaaccgtgagcatggcgagggcgcgctgcggatcagcttctacgacaaggcttcgatggaagcggcgtgggcgcgtttgaagagatacaattacacgctgttcgcgtagactgcaatgtatgtttcaaacttaactttcaacattaatgtttaggcaggtacaactatgaactcaatgaaatttacccatacatcttctctccggggcgaactgaccgttccgggagacaagtccatctcccaccgcagcgtcatgttcggcgctcttgcggacggactgaccgaaatccacggcttcctgcagggcgcagactgtctctccacgatctcctgtttttccaaaatgggaatctcgatcgaaaatcagggcgagaccgttctcgtccacggacgtggactgcacgggctgactgccccagactccgttttagactgcggcaacagcggcaccacaacgcgcctgatctccggcattctctcggcccagaaatttgacacaacactgaccggcgacgcttccatccagaaacgtccgatgaagcgcatcatcgatcctctctcccagatgggcgcaaagatcgagagtgtcaatggaaatggctgcgcgccgctccatatcaccggctcaccgctgcacggcatccattataattctccggttgcctccgcccaggtcaaatcctcgattctgctggcaggtctgtatgccgacggagaaacccgtgtgaccgaaccatacatttcccgcgatcacagtgaacggatgctgtccgcattcggcgcagacatccacacagaaggaaccaccgcgattttacagccggcaaaacagctctatggacagaaaattctggttccgggcgatatctcctccgctgccttttttatcgcagccggactcatcgtaccggattcagaaatcttaattaaaaatgtcggtatcaacccgacccgcgacggcatcctgcgcgtctgcaaggcgatgaacgcggacgtcgaacttctcaatgtaaacaccgcctccggcgaaccgaccgccgacctgctcgtccgctccggtaagctgactggaaccgcgatcgagggtgcgatcatcccgactctcatcgacgagcttccggtgatcgctgcgatggcgtgctatgccgagggaaccaccgtcatacgcgatgccgcggaactgaaggtaaaagagtcaaaccgcattgctgtcatggtagagaatttaactgctatgggcgcggatgtgaccgagaccgaggatggcatgatcatccacggcggcaagccgctgcacggtgctgtgatcgacagcaagaaggatcaccgcatcgccatgaccttcgccgttgccgcactcggcgcttccggcgagaccgaaattctggatgcagactgcgtgaacatctcctatccgggattctatggggatctggaacggctgtgtaaataaaatgtgactatgcatatttgagacaaaaagggcaggaaaagcttcaaatcgctttcctgcccttttcttttgtcctactgcccatatttcgcaaaataccgatccagcacctgtcttgcgatcggcgcggcgaccgcaccgccggaaccggactcttctgccagcacgcagatcgccaccttcggcttgtctgccggagcgaaaccgacaaaccaggaatgtgtctccttacctgtctcaaactcggcggaaccggtttttccggccaccgtataggatgccccccgcatcgcggaacccgtaccaatctcaaccacctggctcatgagatgcgtcagaaattgtgcgtcattcgcagacatcagggttccataggcggacggaaggaacttcttgaccgtctgaccacccacattttcaacatgatcgatcatatatggcttcatcagcgtgccgccgttggcgatcgccgatacgatcatcaggttatgcagcggcgtaatctgggtttttccctgtccgatcgcggtctgaagcttttcccagtcatccgaactgccgtcgagcgaaaacgtgctctggttgtacggaagtgtgtacggaagctccgaattaaagagcatctgatttgccagcgcccggaatttttctgaattaatctgcattccaatctccgcaaacgcaccgttgcaggaattggcaaatgcctgaatcagattctgcgtcccgtgtgccgtcccgtggtaacatttaatcgtataatcgccattctggtaagaaccattacaattatacacatagtcctgccaggtattcgggttctctttcatatattccagcaccgtcagcatcttgaacgtcgatcccggcggatataagccctgcgttgcacggttgactaactgcgccttcgtgttgtccggagacaccagctccgcccagcgctcatcgacgagatttgcattaaaattcggctgggaaaccatcgtcaaaatctttcccgtatccggttccatgacgatcactgcgccccggtattttccgatcgcgtcggatgccgtctgctgcagatccacatcgagcgtcgtaatcacattgtcgcccagatttttcttcccctgaaattcattgatcgttttctcaatcagattcacatgggaggaaagcaggtagaaattcgccagcgactccagacctgtttttccatttttgccggaatatccgaccgaatggacaaacagataatcatacggataatagcgtttctcgcttccgtcacttgcaacgttcgtctgcgccagcaccgttttatcattgctcataatcgaaccgcgggtcacccggtctgagaggagatcgagcctcgcattataagagctgccgattacattttcactcttaaactggataaaccagccaaaataaacggccatcgcgataaagagcgccgcaatcccataggtcagccacagaatatgacggtttgaacgcgctctcgcattttcagttctttccatttcatccttctgcctcatcaaactgctgctcctcctcttcttcctcattccgtttcaggacatatagtccctgtatcacgccaaacaggataaatgtgctgagaatcgaactgcctccataactgacaagcggcagcgtcacgccggtagacggaatgaatttcgtcacgccgccgatcgtcaggaacacctgcaccacatactcaattcccagaccaaacgcgatcagcttgtaaaataatgcctgcatccgggtcgcaatcagcatgaactgcatgaaacagcccagacagatcaggagaatacagagcgcatagatgccgcccagctcctccgagatcgccgcgaaaatgaagtccttctcaacaaccgggatcttcttcggcatcccctggtaaagtcccatgccaaaccagccgcctgtgccgatcgcaaagagcgcctgcgtaacctgatacccttttcctgcgatgtcactccacggatcctgccatgcttccacgcggacacgcacatgcgaaaacagcttatacgccagcatcgcagccgcacagccgcttccaagaccgcctgccagatacagccagttggaggttgcaataaacagcatcaggacataggcgaggaaaaaaatcagcgcacttcccagatccttggataacaccagaatcaacacgtgcgccgccgccacgccggtcgtgatcgccacatttttaaactccgttgagcggtaaaacatcgtcgctacgaagaatacaaagctgatcttaacaaactcggacggctggaacgaaaatccgccgatactgatcgaaagctgcgcgccgaagctggtattgccgatcacacagacaaccagcagcagcgccagacctatcaggccgtacacccacggtatcttagcgagctgccaggttctatctatcacatatggtataatcattgtgataaccgccgcaactgccatgatgataaactggcggaccgccttgtccatcgagatgcgcgtcagcatgataaaactagtgcacagaagcatacacgtgttgttcagcaacagtctcgacgcattccggtaaaacagccggtataagagctggtacaggacaaaaaagacaagctgcgcgccgaaaaacagcacaactgcctcatcctcggtttgtagataaatgatcgtacccgacagaagaaatatcaaaaacagcggtacattctgcagacggcagagccggagtttcgactcgtcatccggcagtgaaaaaaagcggaaattgtaatatgtataaatcagtatcagcaatatcatcagatacctggacatcgttgtcacaagatttatcatggtgatcctccttttcatgtgtacccggaagattcccggtacacacgctactctacgcccctcttaaaatgacctcttgtaaattcgccctccagctccaccggttcctgatggaggaaggtcttcacgtaggcatccagcacttccccggtctgtgccgcactctccgacgtaaatgccagacgcagcacctccggctgcaggcggtctatctgctttttatccttcaaaagcgacagggggctggaattgtagatcgtattgcagcagaaacggcactggttccttaccggaaataccttctttttgcgatcccgcagatacagatattccggacatttactgcatccttccactgttttccggatgcactgggcggttaccatgaccgggatcgaaccatatacgagaagttcccgttcccggctgtcgcgcgcccccaactcccggctgttgagctcgaccggaagggtaaaacgcatcgaaagctccggcgccatctcccgcacaaaatcctccgcccggtgattcatcgtataaataccataatccatcacaagcggaatggaaatcttccactcgcgcaccagttccagctcttcccatgcccggatgacaagaccgtcaaatcccgccgattccagcctggaacgatgcgtttcaaaatattcctttgcccgatcgcggaaaatatgcggcattaccaaaagacactgcttgtctgcctcatggcagcgtgatacccattcgttccactgttcggcgccaaattcagcgctatccagatagatggcgccgacttctggtacggataacgccacttttaactgtgccgggtgttcgaccgaaacgtggatgtggtacagagctgttttattcccttttttattctcaaacagcgttttctggctctgtacaggtaaatctgctgtgagttcaacgtcctgagccgggctggttttttctgattccgaacctgtctggttattttcttccagattcttttcttccggattttgccatccttttcctgtcccgcacgccctattttccggtatctcccggcggtatggacgcagtatctcctcggtcagctgctcaaacgcagagcggcggagttcatttaactcctgcaccggcacaaaggggctgccgcctgtctccacttccagattttcaaaataatacggcgtatttcccgtttttccgagctgtttctcaatccgttccttgctcatcggctgtttcactgccgtctggacaactgctccgattccgcctgccatccggctttctcccgtcagcggatcttcgtattgaagcgtcagctgcagcggttcgccttcacagacacgcgcaaacccctgaaccggttctttcacctctgcttccacatacgttttgtccagatactggtaaagttcccggttttcctggcggaatgccggtttctcatggcagaccaccatatcgcgtccattgtgctcggtataatagcctaacgtctgaccgccgcggtcaaacagatccagcagctccttccggtctttcgggtcaacccggtaaccttttctgccattctttaaatataaatctacatatttccggtacaggcgcaccacgcctgccgtatagcgcgaactcttcatgcgcccctcgattttcaaggaataaacgcctgcttccagaatatccggcaaaatatccagcgtacaaagatccttgagactgagcacatacttggaatcacccggatttaacacgccattttctttctttttgtttttgttttcattcgggttgttctcatccagccgccgaaggacatcaaacggaagccggcaggtctgagcgcatcgtccccggttgccgcttctgccgccgatcaggctgctgaacaggcattgtcccgaataacagtaacagagagccccgtgaacaaagctctctatctccacgcccgtctcctgataaatgcggcgtatctcttccaatgaaagttcacgcgctgtgacgatgcggaccgcgcccattctcgtcataagcgccgcgccctccggtccggtaatcgtcatctgtgtgctcgcatgaaccggcaaatccggaaaatgctcccggatataagaaaatacgcccatgtcctgcacgatcacggcatccagtcccgcctggtaatacggaagcagatagtcgtataagtcatccatctcgtcttcctttaccagcgtattgaccgtcatataaagctggcgcccatgcagatgcacgtagttgatcgcttccagcatccccgtttcatccggattttccgcatatgccctggctccgaaacggctgccgcccatatagactgcgtccgcccccgcagcaaccgccgctttcatgctatcgaaggaacccgccggtgccagaatttccaccttttttttcatatcatttcacccattataaccgcagaattgcatctttcagttccaccgttccctgtctcttgggaaatggcttccgcttcatatatgcctccacctgtgcctgacggacagctgccagttcctcacgtgctgcccctgcctcctggaggctctcttccagatctttctttatcgtctgtttttcctgctccagctggctcagctgctcttttacactttgtttttcctgttccgtctgcatcagacgtgcttccagctgcgatttttccgtctgcacagctgtcgccgcctgtcttgcttcttcaagctgttgtttgaaaatctccagcttgtcctgcaaagaagcgatttcactctgggatgactcgaccgccagacgctgatcttctgcctcctgtttccaaacctctgcttctccacggaaatcgtttgcttccttctttgcatccgcaatctgttccaatgcctctttctttgcagcttctgcctgctcccgggctgtctgctccgccctaacagcgcgatcctgggctgctttttccgcggattccacgcgatcctgtacctctctcttcgcacgttcaatctgctcctgcgcttcttttcttgcagactcaacctgttcctgtgctgttttcttcacagcctcgatctgtccctgcgcttcttttcttgcagactcaacctgttcctgtgctgttttcttcacagcctcgatctgcccctgcgcttcttttcttgcagactcaacctgttcctgtgctgttttcttcacagcctcgatctgctcctgcgcttcttttttcacacgctcgatctgtgcctgtacctcatttttagcagcttccgcctgctcagctgcctcttttgccgccttctttgccgtctccagttcttcctcgctgacggtgcgctcattgcggagactctcgagtttcatctgggtgctgaccatctcatgtttcagacggtatgtctctttttccatgctctctttgtcagatgcaagtgccttcgcactctctttttctttaaaataatcatccgccagattcagataagtcataatactctggtagtcttccggcatttttaaaaatcccggctgcgccttgagctggaaaatcttcccattcagatacgtggcaatctgctgtacatatccttccgtctcactgccgcccaggctatacacttttccatcaattaatacatctatatactgttttgccatcgcattctcttctttctatctataataaatatggttcgacgttgtcacgtcacccacacagaaataccaccttcaaatcaatcaaatatcaaatctcagaaataccgttttttgcttgattccaggcatacccgagatgccgatacgctgcttcggtcgccatccgcccacgcggagtccggttgagcagaccgttcatcagaagatacggttcatacacatcttccagtgtcccagcatcctcgcccagcgctgccgccagcgtctccagtccgaccggaccgccggaaaacttgtcgataatcatatgtaagatcgcacggtcgttgttgtcaagtcccagcttgtccacatcaaggatatccagtgcaaaatccgcgacttctttcgtaatcacgccgttgtacttgacctgtgcaaagtccctcacacgttttaacagtcggtttgccagacgcggcgttcctctcgaacgtctcgcaatctcataggcgcccgtcttatcaatctccacattcagaactcccgccgtccgcaggacaatcgtctgcagctcttcaggcgtataaaaatccatcttctgcacgatgccgaagcgatcgcgcagcggcgccgtcagaagccccgcgcgtgtcgtcgcgcctaccagcgtaaatttcggcagatccagacgaatcgagcgcgccgtcgaatcttttcccaacatgatatcgatcgcatagtcctccatcgccggataaagcacctcttccacctggcggtttaagcggtgaatctcatccacaaagaggacgtctccctcctggagcccgttgagaatcgccgcaatctcccctggtttctcgattgccggaccggaagtaaccttcatacgggttcccatctcattggcgataatgccgctgagtgtcgtctttcccaatcccggcggtccatagaaaagaacatggtcaagcgcctcgccgcgggatttcgccgcatggataaatacctttaacgtcgatttgatccgctcctgaccgatatattcgtctaaggtctgcgggcggagacttccctcaatccgcttatcctcctccgtcacctcggttgtaatcgtccttctgctcatacttgtttcctgtctttcctgtttttctctctcattcaattaagccatgacagttccattttctcatatctgccacacattccaaattttcatctgacgcacaagcaccactattttttatgatccagcaatttcgaatgtccgacacataggttgttttacaaaaacgccagatatttcagcgatgccttcaataccgcctcggaatccatctcttccgtcacattggcgctcttgaccgccttcaccgcctcggcattcgtatatcccagcgccaccagcgcctccacggcttccttcaccgcattgcctgaaagcccgttttccgcagccggcgaaaccgccgcactgccatctaacagcggtgtcagcagatcctctgcctgtactttatccttcaaatcgagaatgatccgctgtgccgtctttgccccaacgcccggtgcacgggagatcgccttcgcatccccagtcataaccgcaagacgcagatcctccggacgcagcgccgacaagatgccaagtgcccccttcggaccaatgccgttgacccccagaagctggcggaacatctccagatccgaacggcttaaaaagccgtacaggctcatatcatcctcccgcacctgcaggtgcgtatatatctttacctcttccccgagcggcggtaaaacttccagcaccgacatcgggacaaaaatcccgatccccatcatgccggactcgaccacgatacggtcctttgctttctccgccaagatgccttttacatacgaaatcacggtaaattccttccttttctcactggttcaagatctggttcaaactaaaaaaagaacgcttcaaaatgcctccaaatcttcttttcagtataccatagcacagttttcattgcaaggaaagtgcggaatttcgaacatatattctgcccgattgattgaatttcatttttacacattatcgggaacctataaatgaaaaagcttttcaattgtaatatcaatgattacagtcaaaaagcctttccatatcttttatttacttgttatgcttagataaactatgtaatatttcctgattacacctatataattcatcaaatagctttctaaatggcttgtataactcatgcctctctaaatccggcttataaatacatttcttttggattacttggcgcaaatctgaaaaaccttggtagaatccgactccaatcgctgccatcagtgcatctccataagctgcccctatgtcttcctttggtgtttctaacgatacccctgctatatccgccaccatctgcatccaaactgcgtttttcgttcctccccccgccgctgcaatccgttttacaggcaaaccattttcacggaatatgtcaatatgctgtgcaactgaatacccaattccttccaatgccgagcgatacaaatgtctttttgtatgactcaatgaaagtcccacgatcattcctcttgcgtccggatcattcagcggtgtcctttctcccgcaaagtagggtaaagttatcaaaccatctgatccgggtgaaatctcagaaattcctttcaccatttcttcatatgcattcaatcctgctgttttttccttttccaagcattcagaaaataactgttccaaataccatttttgaagtgtgcctccattattagttcctgctgctacactataagtttctggaattaaaaatggatttccgcgcactcgctcatcctgaatcagccgatctgcacaacaatagaaaaataaggacgatccaaactgtaccatcagatcgcctggtgcaagtactcctacactgattgcctcagctgctgaatctccagttccagtaataactggcgttccttctttgagtcctgtctccttagctgcctgctttgttaccgttccacaaatatgggtaaccggcattccttctgccaactgctccggcatacaaatcggtttacacatttctttatggagtttcccatagttaaagataccacaccaaacataacaacaccacgcttatacgggacttagcacaccccaaaagaacatacagaaatcccccataagcaacaaggtttgctttatgggggatttcttgttttaattgtcgtttttgatattattcaacagtctcaatagaatccacaatgctcattcttgcaatagaacgcagaggaattgccgttgcaagcaggcaggcc

SEQ ID NO: 11019 - DNA, 2226 bp, Unknown
  gut microbiota DNA sequence
ggtggtgctttttcagaatcatcggaattcgttccaccgccatttgttgcaggcggttttggaggctttgtggagtgcctgtctgcgaaaccgtcatcctgatcgtcggtatcttcaggaggcggttgaatgatggtatcgggaggatttccgcctgcatcccctccatcccggtcgccttcatggtacccttcaaggacaatttcgtctgcgtaggtaaaggagaggatgccggtctgtccgccgtcataatccacctgaaggcggtaactgctgcccggcatcagcagacgggtagcaatcgagagcatttcctgacccacataaacgccactttccagacggttccatgaaccgttgtttttggacagccatatactgaccttgtccagattccccggcggtgtgacccagggaaaataaaggcttcctctgcgaaccaggaagcagttgatgtctgggctgcccggagcctgtacagaaacaggaattgaaatttcaggtaaatcgacacgatctgcaaatatggtattttccggtgcagtcagccttcctgctgcatggtacagtcccacagtattcaaatcaataccagaaaaatcccattccaccacagcggtgtagctggttccattttccgcatagcattccagatagtaaggggaaaaggcaaacaaattttccagcgtttcggtttcgctgccctgttgaaccgcaaacgcgtccgtataaggataccattgctctatggaggtaatgacagcaggcggcatttcttccacccggacggaaatctgaagctcctgcaagacagcttcaccaaaggcatacccctccggcagttcaatccggcctgctgcggtatatttgcctggagtggtctggtcaatggccgaaaaatcccatgcgacagaaaatgtttcctgccggatttctttacctgctgttacagtggcgcagacggtttgataccgaagggccagctgataaatgtcctccaggtcatcatcagacggtgtggttctaaggggcagggtgaaatctggcagggagagcagttcgtcttccttttgtatttctgtgacaaggacgagggatacttcttccgatgcttccggtgtttccggggttccgctcttcagtgtctccgaagcctcgctttctaaacccggcggattctcccttctttcatcggcattggatggggttgcagtttcggcggcaaatgctgggatactgcaggtgaagcagaggagacaggccagacagccctccagaatacgcctgtgcatttgcttcattctcatacgataccccccattccagagaaaacatattgacggtaggtttcccgcagctgttttccattgcggagggcaatcggaagttcctccccgtttatcaaacggaaggtctgactgtcaacctggctgatgtaatccatgttgattaaaatgccccggtagcagggcaaaaaacgcttgtccttctgcaatgcggcagtaacctcctgaaagcctccgcttaccggtatcacgcgttccgccgtatgaatccgtgtcatacggttttgataatctatgtatagaatcttctctgtgggaagttccagcttttgacggtcagccataaccgaaagtgtcatcacttcatagggcggttttagctggcacagttccatcgcttcttcaaaatctgcctgatggatcgaaagcggcttcagcagataatagctggcggacaggctgtaccccatccgggcataatcttctgtaatggtcagaaaaacaatcttacaaagcctgtttttctggcgcagccttctggcggcctctattccatccatgttctccatatagatgtccataaagacaagctgaaaattgacctgggcggcagctttcagaaaattctctccgtcctcaaattctgtcagcgtatagtccagctgatgctttttcatataattttccaggcaggcagacagttctgctctgtcatctgctctgtcatccacaatcgcaatctgcatcgtgccatctcctttgcacaaaaatccaataatagtataacataaaaccacaggaaaaaacttgcgtcttaaacaggaaacctgcgtcttaaacaaagtcggttgcatttcccttgacaagatgctactctaattatactaccagactttccgatgagaaggtctggtttttttatgtcataggaacatcctat

SEQ ID NO: 11020 - DNA, 49688 bp, Unknown
  gut microbiota DNA sequence
atgcccgtagagcctataaaataaggctttgcggacatttaagaagatataaaaagatagtcaaaaagacatatatgatttccaataaatactttacttttttctgtctctttttttttccaatacacagggacgagcccgcgaggtccgaaccgcctttcatatatctttgtacgcatcttgaacacaggtgtccgaacagggcggacgcagtccgtcatgggcgaacatctgtagtgaaagcaagcgaacaaaggtatatcgaaagggcggttcggacctcgtgggctcgtcccgtcattttcacaactatgtgcaaaaaaacctcccctgacagccctaaagccgccagaagaggcattttcatcatcacgaacaaagctcccgcttctccttataatgatgcttctcctccagcatcatatccttcaccttcatcaggcggatctgcgtgcttctctcattttcatccagcttcatcgtgatatatttgatatttttgcgcgcctccggaataattacgtgttccagcgcattgactctccggcgcgttttctcgatctcggctgccatgagctggcaggctttctctgtctcggacagccgcagcatatccggcagaatgtccgccagcgacttgactgccccgtccagatcgctcgaagtaaacgcaaatccatacgagtaaatatcgttctcatccgccgtccgggtcttataatggaacaccggaatatcgacgctcattacatttttcttgtctgcctccagataaaccgcctgtttcggcgcggcaagcgcggtatttaacgcctgctcggacatcccggctttagcgatgacgaaattcacattcgcactcctgatgcccgcctccactttctggcgcagcgccatattttcccggaccagatccaggaactggcgcatcagctcatcccgcttatccttcagcagtttatgtccccgcgtggctgtcgccagcttctttttcagcctcgtaagctccattcgggtcgggttgacctgtgtcgatgccatgcgtaccacctctctcctgcaatcactttgtcacgacagatccgccagctcccgcagccgcgttatgacacgccactttcgttttcaagcgcatccgccatgcacaggcatttttactctttcccataatacagatccagatacttctcatcgatacgtttcagctcgcttctcggcaggatggaaagcagtttccagccaatccgcagcgtctcctcgatatcgcggtccgtattgtagccctgggaaacatattctttttcaaaggcgtccgcaaattttgcatagattaagtcaacatcggacaatgccgcctcgcccaggatcaccatgagttccttcgcttccttgccgcgcgcatacgccgcaaagagctggtttaaggtgttcgaatggtcagcacgcgtcttgccctcgccgattcccttatctttcagacgggacagcgacggaagtacgtcaatcggcggtgtgatgcccttgcggtacagatcacggcttaagataatctgtccctcggtaatatatccggttaagtccggaatcgggtgcgtcttgtcatcctccggcatggttaagatcggaatcatcgtgatcgaaccattcttgcctctctggcgtccggctctctcatacagggatgcaagatccgtgtacatataacccggataaccgcggcgtcccggaacttccttgcgggcagccgaaatctctcgcagcgcatccgcgtagttcgtgatatccgtcaggataacgagaacgtgcatatttttctcaaatgccagatactcggcagccgtcagcgccatacgcggggtcgcgatacgctcaaccgccggatcgtttgccaggttgataaacaggacggtacggtcgatcgcgcccgtctccttaaagctctcggtaaagaaatgcgcttcctcaaaggtgatacccatcgccgcaaagacaacggcaaacggttcgtccgtgccgcgcaccttcgcctgtctcgcaatctgggctgccagattcgcatgcggcagaccggacgccgagaaaatcggcaatttctgaccgcgaaccagtgtattcagaccatcgatcgcggaaacacccgtctggataaactcctgcggatagcttctcgccgccgggttcatcggcagaccattgatatcgcggcgttcctccggcaggatctccggaccgccgtcgattggattgcccagaccgtcaaagacgcgtcccagcatatcctccgatacgccaagttccatcgttctgcctaaaaaacgcaccttactatttgaaaggttgatacccgtggaactctcaaaaagctgtaccagcgcattgccgccgtcgatctccagcaccttgcagcgtctcttttcgccgctcgccagctcgatctcacccaactcgtcataggtaacattttccacgccctgcaccagcatcagaggacctgcaacctcctgtatggttctatattctttcggcatttagaatgccccctttccagccgcatcggcaacctctttcgcaagttcatcgaggaccgcctgatactctttctccacgtcttctgccttcgtatatttaaaacgtcctatctgctcgcgcaccggcatcttgatgagattctggatggaagcgccgccttccagcgctttcttcgactgctcatagaacgccagcaccagcttcatcatgcggaactgtttctgcagtggtgtatacgtgtcaatctcatgaaaggagttctgatgcaggaaatcctcacggatcgagcgcgccgcttccattttcaggcggtcgatcggggacagtgcatccatgccgaccatctttacgatctcctccagctctgcctcttcctgcagaaggctcataagaccctggcggcagctcatccactcatccgatacattctcatcaaaccattttcccagattgtccacatacagggaatagctggtcagccagttgatcgccgggaaatggcgcttgtatgccagcgctgagtcgagtccccagaataccttgacgatacgcagcgtcgcctgggaaaccggctcggaaatatcgccgcctggcggggagacggctccgattgcagacagcgcgccctcgcgtccgtccctgccaaggcagatgacatgaccggcacgctcatagaactgtgccagacggcttcctaagtaggccggataaccttcctcgcccggcatctcttccagacgtcccgacatctctcgcagcgcctccgcccaccgggaggtggaatccgccatcagtgccaccgaataacccatgtcgcggaaatactctgcgatcgtgatacccgtgtaaatcgatgcctcgcgggctgctaccggcatatccgaagtattggcaatcagcacggtccgctgcatcagggagtgcccggtctttggatcctttaactccgggaactcatttaaaacatccgtcatctcgttgccgcgctcaccgcagccgatgtaaacaacaatgtccgcttccgcccatttcgccagctggtgctggatgacggtcttgccgcttccgaacggtcccggtacggctgccacgccgcccttggcgatcgggaagaatgcgtcaacgacacgctgtccggtgatcagcggttttaccggcggcagcttcgtctggtacggacgtccgcgccgaaccggccatttctgcatcattgtaagctctttttcaccgttttccgtctcaatgaccgctacagtttcctccaccgtaaattcaccgctcttgatctctttgacggtaccttttacaccatacggcaccataatcttatgctcaatgatcagcgtctcctgcacggtaccgatgatgtcgcctgcttccacgctgtcgcccgctttcacggtcggcacaaactgccatttcttatcacgctttaaagacggaacctcaacgccgcgctttaagttgttgctgcccgtctccttcatgatatcgtccagcggccgctggattccatcgtagatactcgtcaggagtcccggtcccagttcaaccgaaagcggcacatccatcgactctaccggctcgccaggtcctaaaccggaagtctcctcatatacctgaatcgacgcttcatctccgtgaatctctatgatctcgccaatcagacgttcgtcgctgacgcggacgacgtcaaacatattggcatcccgcatcccgctggcgataaccagcggtcctgctaccttctttatcgttcctttgctcattggaaggtttcacccacctttctatcatgcatctccaaacagaatatccgatccaactgcctgttccaccgaatgcttgaccgactccacgccttttcccgtattcccggaaatccccggaatcaggatcacggacggaagcggctgttcccggtagcggtcaataactgtctcaatcccggcagccgccgcctcggtgatatagatcaccgcgtaggaaccagaagccagttccagaaatactttctccgtctcttttacatcggacaccggaaatgtctccagtcccagcgccgcaaatccgtagatgctgtcgtaatctccgactactgcaaccttatacatacatctcccttatcctttcccgaatctgttcctcctcaagaccgttcagacgggcggtcaggatgatacggaccgttttaatctcattttccttcgccagcacataggcaaccagcggtcccgccgtaaacgggttgtatttctgcggcttgatcgtctcgatcaactgattgtcacaccaccgctcaaacgccgacggcgattcctttaatgcctgcgcgccgcccgcatagcgggttccttccagatactcgcagatcgcgccggcgccaccaagagccgcctgtgacaggcgctcgatattcaagctatcgcacggtgccatcgcacgccgcataaaatccagatgttttcctgtcttctgggatcgcaccgctatcttgatatccgccaccgcgaccgtcgtctcggcataatcgcggatgatcgcgtcggacgcattctttccgcactcatagatagctgcgagcgccgcccggtcaacgatgatatcgcagagctgcccgtcgctcgtgtgcagaaatgtctcactggcttccttcgccgcctcccgcatatgtgccggaagcgcctgccagtccttctccgccacgatcttcgccatccgcacgccgtccacctcgcagtcgtcaaaatagacattgccgtggctgcccggcgccgccgcatccttgatcgccgcctttaaattgtggtagagatccccgtaggaaagcactgccaggatcgcgtcgtcgcccttcaaaaggtcgcggaccgtctcccaggttttcgtcttctcccgggtcaggatcgcctccgcgctgagcggtgtatctgcatccccccagccgtgttcggtcaggaaacgcagtgccccctcgtagctttttacggacagcagctgttcaatctgtgcggaggaaaaaagcccattttccagcgctcggatccgggcgaccgcgtaggcatattttgtatcagacatataagccctccttaccttctcccgccgttatccaaacagcatcgcatgtaccttgtccgccagctcatcccgctgcgacgcaaacaacgccccggcagaacaattttcctcgacaccgccatacaccagaacaaagcccccgtcgatctccctcggttcttttttcagtaccagacttccgcccttttcctgcgccgtcttctctatctttgccggaaaatcatccggcatccgctctaaatcacgttttgaaacatagatttctcctgcccgatccgtcacgaaccgggaaagaagctgctccatccatgcaaaatacgcctcatccggctttgccagcagctccttgtgtgccgccgcaagcatttcctcgatgatcgcctgctttgccgcaaggattgcctggcgcttctttagcgccgccgaagaacgaagccgttcctcatagcttttttcacgctgcgccgctgatttcgcctgctcttcctccagcttttttactttttcaccggctgccgcaagggtcgtctccgcttcaccggctgctttttcctgaatcgcaagcgattcctgctttgcatcgtcaaggatctgagcaataatcttatctaatccattcatacgcttcactccttaactgattttgattctttccgccgtgccagattacagtgcattgattgccagaatcgaaaccagaagtgccagaatcgcataggtctcaaccatcgccgggaacagcatcgctttaccaaactgttccggtttcttcgctacgataccgatggaagcaaccgacgttcttccctgatgtctcgccgataccagaccaaccacgccgatcggaaggcatgctgccagatataagagtccctgggagatcgacatgctcatgtcagcgccgccgccaagaagaccaatcttagaaagagcgatgaaaccaaccagcagaccgtagataccctgggtacccggaagaagctggagcagaagcaccttcgcgaatttatccggatcctcggttacgactccggctgctgcctgacctgccacgcctacgccgtaggctgaacccatacctgcaagaataaccgccactgcaactcccaacaatgcaaatacaattccgctcatatttaatcctccttgatttccacgtattttgttatctgcttaaacggacggaatgcctttccgccaccctcatagaactttccgaaaaactcgacgtactgcagacggcaggtatgcacatacgcaccgagcaggttgatcgccaggttaaacaggtgtccgaagcagaataccagtataaatacaatcacgccaaatacattatttccaaccatacttcccatctgattgataaccgatgcgataacgccggttgccagtccgagcgccagaaggcgcgagtaggaaagcacatccgacacccatccggtaatattgtacaaatcatatgcgccaagcgccagccgcaggatcggattcttcttgtcgcgcgccgacatcaccagaattcccagcgcgcccacgatcgccattccctttgccagcgaattaagcaccggcgggaatacgatattcatctgcgcgatggaaccaaacagttccgtcggaagcagcatcaggatcagccccagaagcaggaggtaccagagtaccacgtcgcagataaaatccacaaccttgccatcctttaagagcatatatcctttcagtcccagccccagaaataagtgaatcacgccaaataacatcgaataaaccaaaagcttcatcgggtcatttagcgggacaaaccagagcgccggtattgtcaccgtatgtccaaaatacgtccggctcacgatgtccaccgcatctccgaaataaccgccgaacatgacgccccagaacagggtcgaaagtccacagtacataaagagccgcagtgatttccgcaggttttcttccatccttgggaatttcttaagtgccaggaagcacatcaaaaatacaataaatccgtatgccgcatctgaaagcatcagaccaaacaaaaatacatagcacgctgccatgatgccggtcgggtccatctcccccttcgccggtaagccaaaggacgcggtcacgccctccgccgacgccgcgaaggttccgttggagagaagcaccggtgcttcctcatcctccggcacatccgaactttccactgcaagttcaaaccggctattcagcttctcctccagtcctttcgcatcgcgcttcgggataaatcccgtgatcatacacgttttttccgactgtaagatctcgccgagcgcctcatacttctgtgccctcaggcggtaatagtcggataacaatttcaaatcttcccgcgccggagcgcactgtttcagttcttcttccgtcgctgccgcgcatccctcatgctctgccgcctgcgctttgagtttcttagcgtaagctgccggaacttcctccaccggacgcgccggacgggcaaatccaatcgaccggagtgctgtctccagcttctcctcgtcctctttcaggcaaattaccgcaatgcaggtctggtcggcgtcgcttccgacaacctccagctcccatttttcaagctgcggctcctgttttgccaccgaagcgtaaatttcttcctgcgtataagcgcctccgccgaccgcgccggctaagatagcacaccgtttcgtctcctgatacgcaagtggaatctccagcttctgccacggtttcaggctttccgcctccgccagcagtctaagcgccgcagtcttttcctccgtgatctgcttttgcaggttcaaaatgcgttccgcctgacctaaaagcgcctctgcgttcgcctccgtctcccggtacgcgcctgcctttgcaagcggctttccggcaagcccagcaagcatcgatgtttcctccggaaccaccgcggcaagcacttccaatgcgcggtccgccgtcgccgcattccgctcaaacttctgccgatcctccagcgtgtccgtccgcttaaatacctcgtccggctccgcctccgctgtcagctccagcactccggcagcctgcagaaactccatcagggacttacggtccttcttcagggcacagatacatagcttttgcatctgcaatactgccatatctacatccctccattcactagaccagttccgctatgagccggtcaaccacctctggtttccgtctgtccgccgtctctctgagcgtctgacactccgcctcggcttctgccagtgcctgttttacgtactcctcccctctgagagtcagttcttcttcctgcttcacagctgcttctttcccccttttctgtgcatctgcgagcattcgatccgcttctgcctccgcctccgccttaacgcggcgtgcatcctccgaagcctgcgcgaccagttccgatgccttcgcctctgcgtcctcgaccgcctggatcgtctccttaatcattgaaccacctccttttcccctaatttttttcagcaataatgcaatatccttattatgtttcacatcctcccattccatacaattcgctgattcgaagcatcaaaagcacatggaaaataaataagttttctcgcatttgtatactattataactttttcaatcagttttgtctattaaatgttttgattttgaaaagattatacatacaccttaatttatgaaaaaaattttcggttttcatgaaaaacagtgtttgtttacacaaaaaagctgccagacaattgttgctcttccacaaaccactgtctggcagtcccctattatatatttatttttatgcgagccatccgatcgaattaaggaaatagacccacaaaaagatcgtcacaaccgaggcgaccgtgctcagcacgacaaactgtcccgccagctcgccgtcgccgcccatgttctgcgccatcgcataggacgccgtcgcaaccggagtcgcgtacatttcaaagtaaacaaaacgttccacaccggaaaagccgagcagcgtcgcaaccgccagaatcactgcgggcaggatcaccatcttgaaggtcatcgacggaaccacatatttcagattgccgccgatcgcattgaaatgcagcgttccgcccagtacgaacagtgccagaggcgttgtcagattggcaaactgcttgatcggtccttccacggaaaccggaagtttaattcctaatatatgaaagataaagcccaggagcgcgccgcggatcatcggatttttcaggatattcttaatcaaaacggaaaccgggaccttgccgccccggaacaattccagaatcacgaccgccgttatgttgtagaccgggatcacgatcgccaccatcatcgtcgccagcagtgttccctcctcaccgaacacgctggttgccagcggaatgccgaacaggacgaaattgctgcggtaaatcgcctggatgataacgccgcgccgctcattttcctttaccagacgcggaaccacagcaagcagaaccgcctgcaaaagcagcacgctgataatggcgactgccaccagacgcagatttaatgtcattccctccggaatggaatacaggttgttaaacatcagaatcggaaagaatgcctgaaagatcactttattcaggcgcttcataaaatcctcatccgccagccccgacctcctgactccatatccaaatgcgatatagagcagaaacggaaggactgtattaagtgcaaataaaaaattttccatataattcctgccactttcttcttaattgctttgttctggacgcggtttctatccagtcaggccgcacccctttaatcaccagatttattatataccccatccaagaaatcgacaagaaaaattcaagcgtgccagcctcataaacagttccgaaaaagtttcgaattatgtaatactcgtttagatttattttagatattggtcaaaatatggacacaattatccagtattataatggcataatatcaatgaggcagatgacactacaagatgcgcgcaatcgttatctggctcgactaacaacaatttcctttatatagatatttcttcgcagtcttttatcccccttcggctgtgaagaacacccaccttgggtacaaaaaagagacggtttgacgccgtctctttttatgtactctgcaaactaccaggaaagcacctcatggccatcctcggttaccagcacctgaatctcccactgggcggatgcttttccatccttcgtgtatacactccagtcgtcatcgccgtccacgaatacttcctcggttccctcgttgatcatcggctcgatcgtgaacatcatgcccggtgcaaacatcatgccggtgcctctctgaccaatatatccaacccacgggtcctcatggaactcgataccaacgccgtgaccgccgatctcacgaaccacagaataaccattttcttccgcatgcttctggaccgcttccgccatatcgcccatgaagccccacggttttacctgctccagacctaattccacgcactctttgacaacgtccaccagttttttatgttccgggctgacatttccgatacagaacatacgggaagaatccgcataatagccgtgataaatggtcgaaacatccacgttgatgatatcgccatcctttaatacgacatccgctgacggaatgccgtggcagacctgatcattgatggacgtgcacacgctcttcgggaatccttcatagccaagcggcgccgggattccgcccatgcgggtcgtctcattatatacccactgatcgatctcctcggttgtgacgccggccttgatatgctcagccacataatccagaactgccacattgatcttgcagctctcgcgaatcccctcgatctgctccggggtcttgatcatgtcgtgatccggaatctggtgtccggcatccgccgcctccatcagcttctcatcaaatgcctcatggcaatgtttgtacttctttccacttccacaccagcacagatcatttcttcctaattttttcatcttattttcattcctttcgccctgcactccggcagcccgtttgtcactttctaacaggcgggtcagcctgcttccctcattcgggagactgtttggagtttaacacaccgacgctgaaaatgcaatgaaatcgcccttatccagccagattctcaataattgtgttactgtttttatcccaaattttcacgattttttcaactttttaacagtcttcctctctatttttcagaagaaacattgtataatagaagcatccatatgaattttttgaaaggagactttctttatttaaatgaaacattcaagtaaaccttctgtttctggaacttccaatgaaactttcctgaaaacagaatcagccagcagccttcaaggttcagccgaacccaactctccggataccagcacttccaatggcagcgaaacatatccacacaaaattgacgccttaaaaaattggttccggacccgcccgatcgttgaaaaattctgtgcgcttccgacatacatacagagctggggacttaccctgtttttcatgggtaccgccacgatcatcgcgttctgcttttttcatgcgctcaaaaatccgactgccaacatcgcgctaacatacattctggcggtctttttggtagcgcgttttacggacggatacagcttcggtctgttctcctcctttgtcggcgttgtctgcgtcaattttctgttcacgtatccgtatttcgcgctggatttcacgatggccggctatccgattaccttcgtggcaatgttttcaatttccagcattacaagcgccatcacaagcaacatgaaaacacaggcgcgcgtgctggcagaacgtgaaaagatgctgatggaagcggaaaaagaaaagatgcgggcgaacctgctgcgggcaatctcccatgatctccgcaccccgcttaccagcatcatcggttccagtaccgtatatctggaaaatggaagcagcctcccggaggttgagaaaaatgcgctggtgcgccatattcttgaggactctaactggctcttaaacatggttgaaaacctgctctccgtcacgcgtatcaacaatgagacggcaaaggtaactaagacctcagaaccggtcgaggaagttctctccgaggcgatgatccgcttaaaaaagagacttccagatgccaatatccatgtgcgcgtgccggaggaattcctgatggtcccgatggacgccgtcctcatcgaacaggttctcatcaacctgctggaaaatgccgttgtccatgctgaaagcaccgagccgatcgagtgctatgtggaatcactttccgactatgcgattttccacgtgcgcgattacggcgtcggcatcccgccggagaagctggcaaccatctttgacggctcttcttcgacgaccagcacttcgccggatggacgaaagggcatgggaatcgggctttccatctgtaaaacgatcattctcgcccacggcggcgaaatcaaggcaatcaaccacacgcgcggtgccgaattttactttacccttccaaaggaggacaaataacatgacacataaactttctattttattagtagaagatgaaaaaaacatctgcgacttcatctccacctccctgtccgcacaggattaccgcatttccaccgcacacacgggaaaagaagcacttccgatcatcacgtcccagtgcccggatctgattctcctcgacctggggcttccagacatggacggcatagagatcatccgccaggtccgcacctggtccagcgtcccgatcatcgtcctctccgcccgcacgcaggaacaggaaaaggtacgtgcgctcgaccttggcgcggatgattatctgaccaagccgatcggcacctccgagcttctcgcgcgcatccggactgccctgcgccacagcaaccgcttaaacacagcttctccgctttataagcgcccattccatgcaaagggactgacgatcgattttgaaaaacatctggtatcggttgatggaagggatgtccatctgacgcagatcgagtttaagattatctccctgctggcacagaattccggcagagtcatgacgtatgatacgattatttcgaatatctgggggccgtatgcggacgatgataacagtattctgcgcgtgaatatggcacatattcgaaggaaactggagcagaatccagcggaaccgcagtatgtgtttacggagatcgggattgggtatcggatgattgaggatgagatgcagtaatagatagattgattgattgattgtcgtgatgcaaaaagaggcgtctgggaatctgcgccgcctgcgtctccaattatcattgttcgcttgctttcgctacatctgttcgtctggatcggacaaaaatgtccgccccagccggacagctggcgtgggatgcgtacaatcgataattggaacgctggctctacagattcccggacgccactttcctcttgttatgttatggatcgcttttgcctgccagcctttgctttgctcggctggcttttgattgtctatttttgtttttgtctgttttttattctacttcgctttcaatgactccatcgtataaaccaattaagtcttcatagccatccgtggatggaagtgtcactacgaccggctcgcccgggttctggacttcggtctccatcagagtaatgcaggtcatcggctggtcgaggacttccatgttgtatacgatatagtttgtcatatagataatgtaatcgttgtcatccagcacgtaagcgcctttcatttcctggatgttcatgtccagattgacatcggtgccgagtgtgttcatcacggttccgagggcttctttgacgttcttgtttagcttctttggatttgcctcatatgccagcacacgttttccattgacctcgtttaaggaaatgcccttcatatagctggattccatattgctggtgttgactccggtctggacggaggatatgatctgctctaatggcatcgggtatttcagtttgacaccgttggcatctacgtaatagtagccgtccgtataaaaaacctgtgaatagctgtcctgtcccagaatcgaggaagcgacctgtgccaggtacttgagatcggtggtatcctgcatatccatctctgcatgcatcgccatatcaactttcatctgaccgtccggaatgacatcctttgcaagtatgaccgaatggacgccgctctgaatctccgcggactgaatcgtattgttcttctccatcacccggtcaaatacctccgccggattttcggctgcaaatgcggttgttgacattgtcataatggctgctgcactcacaagtgcggttgctaattttttcattcctattccctcctgtaaaccatttttcgaaccatgtcggcaatccactttattccagaactttattctctgaaacatggaactcacaccggctttatctccagtatatataatttgacaacgcttgtaaagcgtatctacgggcacttttccttccgattgttatacacaaacatgaaaattgccatcaggcagataattccatatcctaggaaactccagccgtccggcacctgcccgaagatgaagaaaccgagcatcgtcgagaagatcagctgcgaataatcgtagatggaaatacggctcgccggggcatagcggtatgccgccgtgatcgcaaactgtccgcccgccgccgcgcagcccgccaaaagcaggatccccatctgctgccaggtcatcggatgatagtcaaaaatcagccacggcagcacaaccacacaggaaaataccgagaaaaacagcacgatcaccggtcccttttctcctgcctctcccagtttccgcaccatcgtgtacgccgcgcccgcgcagatgccgccgaaaaagcccagcagcgacggcacaagtgccagattggagaatgtcggctttaccacgaatatactgccgagaaacgcaccgaagatcagcgaaagctgaattggcataactttttcctttaagatcagccagctgaacagcactgtaaaaaacggcgacattttatttagaatcgatgcgtccgccagcaccagatgatccaccgcataaaagttacacagcactcccatcgtgccgaaaattgaccgcatcagaaaatacggcagattttccctgcggatacgaaacggctctcccgcccgcaaaagcaaaacaaccgctgccagcgccgccacaagattgcgaaaaaaactcttctgcatcgacggcagatcgcccgccaaatgtacaaacatactcatcagcgcaaaacagaacgcagacagcaccaggcaggcaattccgcggtattcctgcttccgggtgtccggatgattttctaccatgttttcattcccctttccgtcttcctatcttccagtatacgcacatcccacatttttgtctattcttgacacaaatttgtttccatactaaaatagagaaaccattaacaacactatcatttgtaaggagcctgttattttgctgaaattattccattccctcgatttaaaactaaaatcctgcctgattgcactgtttggaagtgcatttctggcatttggcctgtaccatgtccattccttttccggtgtcaccgagggcggtgtcttaggaatgacgcttctgctcgatcactggttccatatctccccatccgtgtccggcttcatcatgaacctcgcctgctacgcgatgggatggaaacttctggggcggcagttcatcgcctactccattctttccagcgccagcttctccctgtcttaccggatctgtgagcagtttccgcccctgtggccgcagcttgccgatatgccgcttgccgcatccctgctcggcgcggtcttcgtcggcatcggtgccgggctctgcgtgcggatcggcggtgccccgggcggagacgatgcgcttgcgatgagcctttcccacgtgacgcacatcaaaatccagtggatctacctcctgtccgattttgctgtactggtgctttcactgagctacattccgttaaaccgcatggtatattccatcctcacggtactcctgtccggacagatcatcgggtttgtgcagaccgcgggaacacatccagtggaaaatatggaaacttgatcgttttcatacggttctcccggtttcaaacgtgcctacccgtgaacagtaatgaattttctatattttttgattttttttaaaaaaacgcttgccaaatcaaccgacctatgatattatataactcgttgaagcgatgcttcagaaatgcgcgagtggctcagttggtggagcgcgaccttgccaaggtcgaggccgcgggttcgagtcccgtctcgcgctctttttattttatagcggaaaccttttcattttcatgagggtttccgctattttcgttactggtcacagttacactttttcttttcaagggagtattttaccatgatacaaaaagtaagttcttttctcaaaaaggataccgttttaaccatcgccctggctctggctgtcctttccatgtttatcataccaccgtccgccggatacctgaaatatctggatctgcacacactgatcctgctctttggcctgatgacagcaaccacaggcctccaaaacatcggtttctttcgacagctcggggaattactgctgcttcgaatccattcactcaggcagctggaacagcttctgattcttctgtgtttcttttccagcatgctgatcaccaacgatgtggccttaattaccttcgttccatttgctctggaactactgcggatggtaaaccgcaaagaccggatcgttccggttgtcgtctgccagacactggcagccaatctcggcagcatgacaactccggtggggaatccccagaacctgtatctgtattcccactttgagctttcacttgatacatttatccggagcatcggtccattttcgctgctttcattggttttgctgctgctcgtcacaatgtttacaccaagggagactatctcactagatacagccggtagagatacaacctccgatgagacctttcctaaacgctgccttttctgctgtctgggaatgtttttcctgtgcctttgcaccgtagccggtcttctgccgcttccaatcctgtttatctgcattctggcgattggctgtctggcagacccgaagatcttctgtcaggtggattactctctcatcctgacttttatcggattcttcatcttcatcgggaatctgaaacacattcctgcggtaagctccctgctttccagtatgatcacgggacacgaagtgatagtctccgttctggccagccaggtaatcagcaacgttccggccgccatcctgttgtccggatttaccgaaaaaggagtttcccttctgatcggaactaacctcggcggtctcggcaccctgatcgcatccatggcgagtcttatttcttacaaatatatcgtccgctcctgcccagagaaaaaaggaatctacttccgctggttcacgattgcaaatgcgggatttctagcagtcctgatggcggtatattttctggttttttatagcatctgataaaaaagaatgtgccttggcacatccgggcgtctcgcgcggtcgcttgcgacatgttcctgcttcgcgcgagtgcacatcctcgcggagcgttttttgtttcataggacgtaatttcctatgaaacaagaaagcccccagagcggcaactctgggggctttcttaattttaaacaacaaaaaagcgggtgatgggaatcgaacccacgtatccagcttggaaggctggtgttctaccattgaactacacccgcatgataaattatgaaattgtaatgcccagaaccggaatcgaaccagtgacacgaggattttcagtcctctgctctaccaactgagctatctgggcatcctgaggaatcctgtgattctcatgttcgctcttgttcagcgacatgagttattatactagagagtcttttaaatgtcaactatttttttctacttttctaaattttttcaaaaactttttcaacttgctgttcctgccgcacagccagcgtccacatcttcatctccaaattttccgtaaacaatggaaaaaccgactctttttcattttcctgcatctttttgattttgatggttgacaaatccttttgggtgtgtttataatgcatgtaacgaagaacacagataaaccgatgaggaagaggagtatctgacctatgtatcgccacagagagttccggatggtggaaacggaacgccttaccgtcagtgaatggacttccgagggcagccttgaacgattgtttcagtaggggctgacgggaccccacccgttatccatcggggcacgtatgatggtacgtgtaagcgagtggacattttcacaaatgtcaatttgggtggtatcgcagaagtttacgcttttgtcccatgtatggggacagaggcgttttttagtttctggaaacattctcagtaaaatctttcatcacggcgcgcggcgccaaaccaaagagaatcttctttccagacacattctttactctgctccggcaaggcagactgatacatctgccatccaaaacaaatatcaaaataagaataaagaatggagaaaatgactatgaaaaagaatctgaaaaaattatttgcacttggatgcaccgcagccctgacactgacaaccgcaggatgctcttccagcacatccagcaacgcttccgaagcagacaccaccgccgaaacctctcaggaagcttccgcggacaaagaaatttataatgtagcgattgtcaaacagctcgaccacgcttccctcgatgagattgcaaatgcagtcgaggcagagttagataaaatcgccgaggataacaatgtaaccattcactacgaactgtactccggccagaatgaccagacaaccttaaagcagattggtgatcaggcggttgctgacagtgttgacgccatcatcccgattgcaaccctggctgcacaggtagcgaccgtatccgcacagcagacccagacaccggttgtctacgccgctgtttccgatccggaagccgctgagctgaccggcatcgactatgtaaccggtaccagcgatgcgctgaacactgagaaaatcatggatatgatttttgccgcaaacccagatgttaaaaatgtggggcttttatattccttatccgaggcaaactcaactaaaccgatcgcggatgcaaaggcatacttagatgaaaaaggtatctcctacaccgagcagactgcaaataccaacgacgaagtaattaccgctgcctcctccctggttgctgacaaagtagacgctgtcttcactcctaccgacaatgtcatcatggcagctgagctggctatcttcaaggatctggccgatgcaggcatcccgcactatgccggcgctgattccttcgtccgcaatggtgcatttgccacctgcggcgtcaactacacggctcttggtacacagaccgctgaccttgcttatcaggcaatcaccgaaggcatggacagcatggaagactactacaccgcagaaggcggcatcgtaaccgtaaataccgagactgccaaagccctgaatatcgacacagctgtattcaaagattttggcgatgttgtagaggttacgaccaccgaggactaatacccctcatccggcggcactttgattttcatttgactgactttcatgtactctcagaaccgtaagacagaccagacgccagccgcatcccccgcttaccacgcggctggcgcatctgccttatgaacgctctgggagtacaaatcattctacggaggtaatttcccatgcttcatattttacaaaccgctctggaactgggatttctgtatgcgctggtgccgatggcgctgttcttgagtttccgcatactggacatcgcggatatgacgacggacggctgtttcgtcctcggcacagcggtatccgtcacaatggctgcggcagggcatccattcctcgcggttccggctgccatgcttgcaggcatctgcgccggatttgtcaccgcatttcagcagacccgtctcggcgtgccgtccattctcgccggtatcatcaccaatatgggactctacaccatcaatctgatggtaatgggctggagtgccaacgtgagtcttttaaagacagagaccatcttttccctgcttcagaaaaccggtatcgggggtgactggtatgaagcacttctggcaatctgcgtaactgtgcttgcgggcgcactgctcgtctattttctcggtacccgtctgggactctccatccgggcaaccggcaacaacattgacatggtgcgcgcctcctcgatcaacccgacatttaccattacggtcggcttatgcatcgccaatgcgctgaccgcactctccggcgcaatggtcggtcagtaccagaataccgccgacatcaacggcggcacgggtatcgtcgtgatcggtcttgcctgcctgatcatcggtgaaaccgtcctcggacgccgcggcgtggcaagaggtgtcatcgccaccgtcatcggttcgattatttaccgttttatctacgctatcgtcctgtatacaaaaatcatgcctgtacaggggctgaaactggtcaccgctgtgatcgtagcgctggcaatcgcatttccgacgatccggaaatgggcggcattccagacacgtaaaaatgcagcggcacgccggaagggaggacacggagcatgttaaatattcagtcgatatcaaaaacctttaatccgggaactgtcaacgccaaacaggcgctctccgggctgtccctgcatctggatcacggcgatttcgtgacaatcatcggttccaacggcgccggaaaatcgaccctgttcaatgcgattgccggcagcttctacgtcgatgacggctttatcgagctggacggcgaggacatcacctatatgccggagcacaagcgcagcctgatggtcggccgcctcttccaggacccgttaaagggaacggcgccgggcatgacgatcgaagaaaatcttgccctcgcctatctgcggaccgcaaaggggaaatcgccattttcccgcatttccaagaaagataaggatgcgttccgcgaacgcctctccctcttaaatatggggcttgaagaccggatgacccagccggtcggacttctctccggcggtcagcgccaggcgctcaccctgctcatggcaaccctcatcacgccgaagcttctgctgctcgatgagcacactgccgccctcgatccgggaacagctgaaaaagtactggagctgacgaaaaatatcgttgctgaggagaaaatcacctgcctgatgatcacccacaatatgaaccaggctctggagctcggaaaccgcacgctcatgatggcaaacggaaatatcgtgctcgacgtcggcggcgcagagcgcgcttccatgactgtcgaggatctgatcgcccgcttcaagaccggcgcaggccacgcgctggataatgaccggattttattgtcggaataattttaaaaaagcaaaaaattcaaaaagtcccatcctttcagatttgaatctgcataaggatgggacttttttatatttctcttatccaatttctatttcccaagcacatccgaaagcgctgcaaactgcgccagcgtcagcgtctcgccgcgcacggacggggaaagtcccagcgactcgattgcggctgcgatctcttccttgctaaaggagagatcctgcgcgttggaaagcccgttctgcagggttttccggcgctggttgaaggacgcgcggatgaggcggaacattaaatctttatcctttacctccaccggcggcttcgcatggcgggtcaggcggatgaccgctgagccgacattcggacgcggaatgaagcagttcggcggcacatttgccacgatgtacggctcggcataatactgaaccgccagcgacagggcgccgtaatccttcgagcccggacctacctgcatccggtctgcgacctctttctgcaccataaccgtaatgttgtcgatcggcgcgccgctctcaaacagccccatgatgatcggggtcgtgatatagtacggcaggttcgccacgaccttaaccggacgtccgccgcctttttcttccgccattttttttatgtcaatctttaaaatatcttcattgataacagttacattttcgcagtcctgaagcgtatcttttaagatcggaatcagatttgtgtcgatctccacggcgatgacctgtcctgccgcctgtgaaaggcgctgtgtcatcgtaccgatgccaggaccgacttccaggacggtgtcctccttggtcatgcccgccgctgagataatcttgtccagcacgtgcgtatcaatcagaaaattctgaccgaattttttctggaaagcaaaattgtatttctgtattacttcgattgtattcttcgggtttccaagatccattccgaaaatcctttcccgggtgtccgggacacccctttttacggtaaccggtacagcctccgcgcattctcttcagtcgcacggacgatctcttccggtgtacatttcttgatttctgccagcttttccgccacatatggcaggttcagtgaggagttgcgtttgccgcggttgggaaccggagcgaggtaggggcagtcggtttcgagtaccagacggtcgagcggcgccatctcggctacttccagaagctttttcgcgttcttgaaggtcagtacgccgccgatgcctaagtaaaagcccatctttaaatactctgccgccatctcttttccataggagaagcaatgaatcacaccgcctatctccccggagtgctcttccttcatgatatcgagcgtatccttcgccgcgtcgcggctgtggatgatgactggaagttttaattcccgcgccagatttaactggcggtggaaccatttcttctgggtctcatgatccggctcttcccagtaatagtcgagaccgatctcaccgatcgccacgatcttcccggactgtgccagcacacggagttcggcaaatttttcctcgtcaagctccgccgtgctgctcggatggacacctgctgccccatagataaacggatatttttccgtcagggcaatcgtcgtcttcgtgctttccatatccgcgccgacattgacgaccgtgccgatcccgcctgctgccagaccggaaagcagttcttcccggtccccgtcaaacgcctcatcatcgtaatgagcgtgtgtatcaaatatcatataagttatatcctttttttcttagcagatctccgcacccgccggcatctctttctccgttgtcatcagggacagctttccgtctgcatcctcggcacacaaaatcatgccctcggagagcagacctgccaatttcgccggttttaagttggtcacaaccatgactctcttgccgaccatctcctccggggagtaggaatgcttgatgccgctgatgatctggcgcactttgcttccgacctgaacctgggagcagagaagcttcttggacttcggaacagcctcgcaggagaggatcacgccaacctggaactgcagttttgcaaaatcatcgtaggtaatctctgctttcggctcgatatcgatgccctcggctttctcgtcctcttccttctccggctctgcctttgcagcaactgccttcttctgctcttcctggataactttgactttcttcatcacatcgtcgagtttcaggcgggcaaagagaacctccggctcctcagtcaccttatttccggacggataacggccaaattcatccatctgtggcagttcacgttttacggtatttaactcttttaagatcttctcagaggtctccggcatgaaggattcaagcagggacgcaccgatcgtgatagactcaaccaggttgtagagaacagtcgcaagacgatcctgcttgtcctcttcctttgccagaatccacggggttgtctcgtcaatgtatttgttgctgcggcggaaaatattgaagatctcggtgatcgcatcggcaacgcgcagcttatccatcttctcatcaaccttgcggactgcttccagcactaccttcttcagatcctcgtccaccggctccgtcacgcccttgtcggctaccacgccgccaaagtactggttcgtcatcgataccgttctctttacgaggttgccgaggatatttgccagatccgagttcagtctctctaccatcagctcccaggtaataacgccgtcgttctcaaacggcatctcatgcagaacgaagtagcggactgcatccacgccaaagaaatcaaccagtgtatcggcgtaaatcacatttcccttggatttactcatcttgccgtcgccctgtaacagccacggatgaccaaatacctgctttggaagcggcaggtcgagtgccatcaaaaagatcggccagtaaatggtatggaaacggataatatccttaccaatcaaatgcaggtctgccggccagtatttcttgaacagctcgccgctctcaccgtcgcagtcatatccaagaccggtgatatagttggtcagtgcatccagccatacatatacaacgtgcttcgggtcgaaatcaaccggaatcccccatttaaaggaagtacgggaaacacacagatcctgcaggcccggaagcaggaagttgttcatcatctcatttttacgggaaaccggctggatgaactccgggtgctcattgatataatcgatgagtctctgcgcatatttgctcatacggaagaaatacgcctcttccttcgccggctgtaccgggcgtccgcagtccgggcatttgccgtctacgacctgggactgggtccagaaggactcgcacggggtacagtaaagtccctcgtagcagctcttgtaaatatcgccctgatcatagagcttcttgaaaatcttctttacctgcgcctcatgatcctcgtcggtggtgcggataaatttgtcgtaggatgtattcatcagatcccagatcgtcttgatctcacccgccacgttatcgacaaactgcttcggcgtgatgccagcctcatctgcctttaactcgatcttctgaccatgctcatcggtgcccgtctggaaacgcacatcgtagccctgcgctctcttgtagcgcgcaatgctgtccgccagcacgatctcataggtatttccgatatgcggtttgcccgatgtataggcaatcgcagttgttatatagtaaggtttcttacagttctgacacatttatcatgccctccttattaaaattgcgctttaaattgtgttcttcacaaaaaaagcctctaaccgcccatggttttccatctgcgattaaaggcaagccaccttcttttctctgccttttcttcatatataaatatatagattaagtctatctgttttgcatccctttgtcaagtatggtatacttgcagacatatatatttgttttggaggtattatattatgcagaaacgcttttccttcccgcccctgccgcgcacagcgctcgcgatcgctgcagctgctgccctggcgctctccggatgcgctggttcttccggctcaggaacccccgccgaatcctacgccgcttccgggcagactggttctccttccaatgcatcgtccgatgctgccagcgaacaggcgcgttttgatgcgtttctggcacaccagtttcaagaaagcgtgcaggacgatccgctctcccttcattttcttgtccgaaatccggaaaattacggtatcaccgaaccggagatgaaatttccagaatattccctggaacagcttcaaaaggattccgaggaaaacgcggccgttcttgagaaactttcttccttcgatacctctctcttgacctccgaccagctcttcacctaccggatgatgaaggacacactggagacggaagccggctcgaagggactggaactctacaatcagccgttaagcgccctgatcggcacgcaggcggaacttccgaccttattagccgaatatacattttacaaccgtgccgacatcgaccattacctgacactgctttcgcagatcgacacatattacaagcagctcgcagcatatgaacaggcgcaggcagacgccggtctcgcaccgtccgacgacaccatcgaccggattttaaaatcctgtaaaagctacctcatccgcccggaaaacagcctgctgacggaaacatttgcctcccgcttaaatgcggttgagggcttaagcaatgcagaaaaggcatcctacaaagcaaaacatctgaccattttaaaggaacactttatcccggcatatacaaacctctctaaagcactggaatcgctcaagggctcccatccggaggcaggaggacttagcacctacgaacacggcagggagtattatgcctatcttgcggcggcgctgaccggcacagattcttcggtcgatgcgctcaaaacgcggattgagaagcagatgcaggcagatttatccgaaatccgcgtccgcttaaaggaacatacggaactcgtccggcagatgaccgactctgccatcacactctccgatccggatgagatccttcagaatttacagacgcagattcaggatgatttcccggcgcttacagatacctcctacacgctcaaatacgtcccggaagcgctggaatcctccctgtccccggcatttttcctcgtaccgccgatcgattccgacggttccaacaccatttacatcaacgaaaaagcaagcactgagcagaacctctacaccatgctggcgcacgagggctatccggggcatctctaccagtcggcttatttcaatgaccgggagccggttccggtacggcggcttcttgcctgcggcggctacaacgaaggctggggactctacagcgaactgtacgcctactccttcgacaacggactgccggaagcggtcaaaccactgatgcgctgcagcgaagccagcagctacgggctgtacgcgcttctcgacatctgcatccactatgatggctgggatctcgccacaacaaccagttatctggaaaattcctacggatttacggatccggaatccgcgcgcgagatatacctggcaatcattgataatccgggcaattacctgaaatactataccggctatctggaaatcctgaccatgcgccaggaagccgaggaggtacttggaaacaaattcaacgccaagaggttccaccagttcatcctgaacatggacggcgcttccttccgggtcatcaaaccgtattttcaaacatggctgatgacggagaaattacacgtataagagaaaaagagcggtatctccctgtatgcatccgcagacttcagggatcccgctcttttcgcattttcatgctttagtttactttcttgtaattcttctcaaagctcatcggaccgtcgccgatcttctcgcctgctacgctcaactccagcgtctttgcctcgtagttctggataaatgtattggcaatggccatgacaaccagcttgtcagaggactcctttaaggaggagagatccagcgtcagggcgccgtccttctgctcaaatttatccacggtgattccctcttcaatgacgcccacctctgccatcttatcaagcagttcctgtgcatccagctcatcgccgtcaatgccatccatattctgttttaagccgctcttatcagattttacagaatatacgcaaaccgttaccgtcggatctgcatccgttaccaccatgctttctttctcagccacgccgtctacagtctcctgctgcgccgcacctgccggggcagttccatgttcgctggtttctcctgtattccttgccgtcggcgcacatgcgcccagaacagctgccatcataagaccagctgccattaccataaatttcttcataatgtacctccttgtattctcctcgcagcagttgcttcacggttttcgcaaccgtttttgtctttcacacctgtttccatccagtgcagactacatccattctttttaccgctgcccatccttactcctaaaccactgattcagcttcatcagcgcctttactaacgtctgcatctcatcttccgacagatcgcttgtcaggctctcgatcatctcccgatggaaccgggcgtgatgcccatacgcttttctgccccgctctgaaagagaaatatatacgacccgccgatcctcgagtccccggcttcgttccacatagccctttttgaccaggctgttcatggcaatcgtgagcgttcccaccgtaacggacagttctctggcaatcgatgacatatttttcggttcaccaatcccgatcgcttcgatcacatgcatatcgttattcgtgatgtctttaaactccggcgtaatgattaccttctgttctatgtccatcacatcgcggaacagcgtcaccagaagctcattcagcgtctcataatttcccacagttttccctctcatccttggtttcagcgcgcaaaacggcaatttaccctaccgattatacaatattctgtgcggcaagacaactagcaaatttcttacatcttctcttataccatagcacttgttactgttcacgcacacgtgcccagtaacggaatttgccgtggcttcgcatttaaatacggcaaattcctgctgccaccacgttttcttacggcactttcggttccaaaagtgcctacccgtgaacagttaccatagcactacataagatactcgccacaagccccgcgaacgttgcaatcagcgcccccgcaagcgtccatcgcgtctttgagatccgcacggtcagatagtagacactcatcgtataaaaaaccgtctccgtgcagctctcaagaaccgacaccatcatgccgagccgcgaatcgggtccatacgttttaaaaatatctaagagcagccccgtcgccgccgaactggacaccagacgcaccagaagcagcggaaccacctgcgccggtatatgcagaaatgccgccggtcccgccagcaccccggagaggaaatcgagaaaaccggaggtccgaagcacgccgaccgccgccatcagtcccaccagcgtcggcaggattccagccaccgttttaatccccgcaagcgccccttcgataaaatcatcaaaaaccgggcgtttctgaagcaccgcaaacccaacgatataaaacaaaacaaccggaaccaggtattcagagaggtaattgatgcagcgcatttgacggctcccgtgtctatacttgttttatatgtatggtttgaatccgcgttctatgataacggatctgtttccagagccccttattttaacaagggcattataggggataaatttgttttttgtgtgaaatttttcccctacatgacgccaaattgcgttttctatttccagccatccttttttattgatttatattgctttctcctgcacatcacgcggcacaccgccactcctgccagcgtgctgacacaggtcgccaggaacgccggaccggccactgccagcggatgcgccgatccgtactggctccggtaggcgatcatattgataggaatgagctgcagcgatgaaatatttacgaccagaaacgtacacatttcatcgctcgccgttccctgtgtgaccgccgccgtatcccctgccgctctccgttcctcctccagttcttccagctccttcatcgccgtaagccccgccggggtcgccgcccagccaagccccagcatattggcaatcatattggcggccatcgaagaaagcgccggatgacccgctggaatgcgtggaaagaggaaatgaagcaccggacgcatccccgccgacaactgctcaatcagccccgcccgccgtccgatctccaaaattcccgtccagaacgccatcacccccagcatcgtgattcccagcgagactgcatcccccgccgctgcaagcattccctccgtcaccgtccccagcatcccatgcaccgccgcccagccaagccccgtaagcatcataaacgcccagagtacatttaacatgcatctacctccctgctgtcatatggtacgctcagaacattttatactcagacaagtataaaaagacgccaaacatacaccataaataaatacaattatatcatttcttttcgtccattccgcttgcatttcagaatttggatctttaaaataagaactatcatctccttcacatgacagacattctttgaaaaaggtcattttatatggattctcctgccaaaaaccgtgaagacattgaaatatgatttaatattatgaaaacgaggtattcagaatgaaacaatccgcagatttaaagcgtctcctcacctccatcgatcacaaaagctatccggcttacaaggacgtgcgcggcgcttatgattttaatacgtatattttatccatcgaccatgtacagggtgacccgtttgcgtccccttccaaggtcagtgtccaggtccgccacgcgaaagccggatttccggcagaactctttgatacgccgtggaaaaaaacagcgcttgaagattacctgctccgctgtttttcccgtgaaatcggtcgtctttctttcaaggcaaaaggttctggaaaaagtggtctgatcgccaccagccgccccggtcaggaggtcctctcccggaccgcctgcgagatcgggagaaatgagattacagcccgttttgaggttggtttcccggcattcgggcgcaccatcaactcaggtgaactgatccggattttctttgattttcttccaggctgtgtcgaaaacgtctttttctaccgccgccagaacaacgccgaaatcaaaaaacgcatcacgctggcagacgaccagcaatttatccgcaatgagctgaaacgcttggacctcgtctccttcgtcgcagacggctcaatcctgccgcgtgaaaccggcgtctccgaccgtccgatgaagggcagtgtggcgttccattctccagattccttaagaatcactctgaatcttccgggacacggtccgatctccggcatggcaatccaccgcggcatcaccctgatcgtaggcggcggctaccacggcaaatccacactgctaaaagcgctggaatccggcgtctacaaccacattccgggggatggacgtgaatatgtcatcaccgatgaaaccgcagtcaagctgcgcgccgaggatggacgcagcatcaaccacgttgatatttccctctttatccgggatctgccgaacaaaaaagacaccacctacttttccaccgccgatgccagcggcagtacctcccaggcggcagccgtgatcgaaagcattgaagcaggagcccgcgctttcctgatcgacgaggacacctccgctaccaacttcatgctgcgggacgacctgatgcagcgcatcgtcagccgcgataaagagccgatcaccccgttcatcgaacgcgcccgcgatctctacaagcaggcaggcatctccaccgtcctcgtagctggaagctccggcgcctacttcttcatcgcagacactattatccagatggatgcataccgcccgtttgatatcacggagatggtaaaaaatgcctgcgaacaggaggcttccaaacccgccatccaggcgcctgggttcaagctcccgacagctggacggaagctggcggctggcggaacagggcgggctgtgggcgcgatggcgctgaattttggcgacagccgcgcagaagcaggcggtgaatctcaggaagagggcgaaaacagcagtcgttctggacggtttggcaatcgcggcggcagcgcctccgatgcaggacgctttgaacgcggtcgcggaggacgccgcgaagctgatcgaaattccgaccggaacacgcgtatcaaagtccgtgtccacgacaaacactctttccaggttgccaaagagccgatcgatctgcgcttcgtcgaacagcttgccgacagcgagcagaccgccgcacttgcccagatggtgcgctactgcctggaaaaagggcttctggagcgctgcaccgtacaggaaacggttgccacactcttaaaagcctatgaagcagacgggctctctgtgttcagcgatgcttcatatgccgccatgggactggcaatgccgcgcgtgcaggagatttatgcttgtttaaatcgttttaggggatgattggatacacaaaagagggctgcattttgcaagccctctctttatatttttgcattttacactgaactatttgcaaatttcatcttggctcatccctgaaccctgccaaaatctatcctacccttcgcacagcgcccgcatcacgtcctcaaccgtctctatcttctctgctctccacgcgtttccgccgcagaaaatcaacgcatgatcctcatcaccgcgggctgcattgacgagtgcctgcgtgatgcagtatgggatcttcgccggatcacagtgttccagacactggtaacagtgtgtcactgcctgtcttcctttttccagttcttttaagaacgcattcttgatcgcacgtcccggcatgccgaccggacttttgacaatcacgatgtcctcttccttcgcatccagatatgcctgcttatatgccatcggtgcatcgcattcctcggttgtcacaaaacgggttgccacctgcacgccgtccgcgccaagctccatctggtgcatcacatccgcatggtcgtagatgccgccagccgtcacaaccggaatcgatttgccatatttctgcgcgtattttttaaccagcgcgataattccccgcacttcctcgtcatattccgcctgatggaatgtctcggctgcgtgcggcgtgtctacctccagctcagtcagcttctcacggtcaaatcccagatgtccgcccgccagcggtccctcaacgaccaccagatccggtgcggtctggtacttgcggtcccacatccggcagatgaccgtcgccgccttaacggaggaaacgatcggcgcaatcttcgtcgccgtccctttcacatactccggcagggaaactggaagtcccgcgcccgatatgatcaggtcagcgcccgccttgaccgccgttttaacgtactccgcatagtttttcgtcgccaccatgatattaaagcccacgatgccgcccttcgcgatcgcgcgcgccttctgcaactctgaaccgatcgcgcgcaggtttgcctcctgcggatgctcagcaaaatccggctcccggaaaccgatctgggcagtggaaataatgccgatgccgccagcccccgccacggctcctgccagcgaggacaggctgatgccaacccccataccgccctggatgatcggaagcttcgccgtcagatcaccaattttcagcggttttaactgtgataaaattgtactcatacgatctcctatattcacaaaggggaccgccgcgcggcaaccccctttcaatatctattttttagatttttctaaaacgttcataccgctgctccgcgatctcatccggtgtcttttccgcgcaggactggaagaactcacgcatatggcggtcgatgatgcgtccgatctcctcgatgttgtcatcggttgccggctcatcctcgcagataatgcgctcgatcatgccaagctcatacagatcctctgccgtcatcttcatgaccttcgccgcctcgctggctctcttggcatctttccacagaatcgaagcaaagccctccggagaaaggatcgagtaggtcgcattctccatcatccatacctcgttggaaaccgccagcgccagtgcgccgccgctgccgccctgaccggtgataatcgccagaatcggcaccttcatatccgacatctcaaagaggttgcgggcaatcgcctcgccctggcctctctcctctgcctccatacccgggaatgcacctggcgtatcgacaaaacagatgatcggacggttaaatttcgccgcctgtttcatcagacggagcgcctttctgtatccttccggagacggcatgccgaagttgtgcttcatgctgtctttcggggatttacctctctcctgtccaatgaccgtgaccggcattccatagaaagatgccacaccgccgatgactgccatatcatcgccataataccggtcgccgtggaactcggtaaaatcgtcaaacaggatccggatataatcgctggcgttcagacgtccggcgctacgggactggcgtactgcctcccaggcgtctctctctcgacctgcgatcttatttaaggtcttctggcgcatgataccggagaacggtgctttccggctctttaacttgccttccgccacagaagctgctttttctgccttggatgcagatgccgcttctgtgtggttctccgcctcgtcgttccatttctcccagccatgctcctggctgtgaagcttcaaaatctgtcccagaacacgcttctgatcttttctttccacgatctgatccacaaaaccgtgtgtcagctggaactcggctctctggaagccctccgggagcttctggccgatcgtctgctcgatgacacgcggacccgcaaatccaatcagcgctcccggctctgccaggatgatatcgcccagggacgcaaagcttgccgttacgccgccggtggtcggatccgtcataaagcttatgtagagaagtcccgcctcggaatgacgttttaaggctgcggaagttttcgccatctgcatcagggagatcatgccctcctgcattctcgcaccgccggaggccgcgtagatgataaccggaagccgttcctcggtcgcacgctctaccgcacgggcaatcttctcgcccatgttgtgacccatgctgctcatcaggaaacgggagtcgcagaccgcgatcacagtctcataaccgtgaatctttcctttaccagtgacaaccgcctcatttaaatcagttttctctctggctgcctcaaccttgccctcatagcccggaaatgcaagcggattgaccacagacatctccttatcccactcttcaaaggtaccttcatcgatcagcatctcaatccggcggtacgcatgcatccggaaatatccgccacagcgcgggcacacatacaggttgtccttgacatcctgcaccagaattggtttctcacatttattacacttacgccataaagaacgcagactttccggcgtcatcgccgtcggacggctcggaatcttctccggtttttcctgtgctgcctctgccgcccttttatctgctttcgcgctctccgcacggcttacgccggcagaaccgtggtcgtttgtattgatcgaagtatacgatttcttaaacagatttttaaacatctcttattcaacctcacttattagccaatcataaacgtcagctctgcggaaacagccagcttgccatcgacggttgccgtcgcacttccgatgccgaccggtccttttctcttgatgatatggcactccagctttaacttgtcgcccggaactacctttttcttgaattttgcgttgttgattgccccgaaatatgccgtcctgcccttatttccttcttcacttaaaatcgcaaccgcgccgacctgcgccagcgcctccacgatcaggacgcccggcatgaccggctcctgcggaaaatgacctgcaaaccacggctcgttgtatgttacatttttatatccaaccgcgccctcgcccggtgtcacttcctcgatacagtcgatcaaaagaaacggatgacggtgcgggatgatctcctggatctctttaattcccatcataatttcagttacctctttcgctttcccagacatcatttttgtatgctgcaagtctcttccgccagctccagtgcgccgcttccaatcattcaatcatccacacaaaaacgtcctcaaattatatttagtcctcaaatttcttgattaccaggctggcattgacaccaccaaatcccagggagttggtcagggcatagtggatatccatcggaacaccctcgcccatcgtgtaatccagatcgcagccctcgcctgcctcttttaaacctgcggttgcgtgtacaaatccatcctcaatggatttcacgcaggcgataaactcaacaccgcccgctgcacctaaaagatgtccaatcatcgacttagtggagttaatttttaccttgtaagcgtgatcgcccagcgcttttttcactgccatcgtctcgaagagatcgttatggtgtgtactggttccatgtgcattgatgtaatcaatcttctccggtgcgatacctgcatccttgagcgccatctccatcgcatacgctgcgccgcttccatcctctgccggggaagtgatgtggaatgcatcgttgcttccgccgtagccgactacctctgccagaatctttgcgccgcgcttctgcgcgtgctctaaggactccagaactacgataccagcgccctcgcccatgacgaaaccatcgcgatccttatcaaacggacgggatgccgtctccgggtcatcattggtagaaagagccgtcaaagccgcgaaacctgccataccgagcggtgtgatcgcagactcggtaccaccggctaccatcacgtctgcctcgccgtactggatcgagcggaacgcctcaccgatagagttcgtaccggtcgcacaggcagttaccacgttgatggatttgccctttaaaccatactgcattgccacattgccgactgccatgttgctgatcatcatcggaacgagcagcgggttcacacggttcggtcctttttccagcatttttttgtgctcacgttccatcgcctgtaagcttccgataccggaaccgatgctggttcccacgcgaaacggatcctctttttccatatccagacccgcctgtgcgatcgcctcaccggctgccgctaccgcatactgggaaaacggctccatacgtctcgctgccttcggatccatgtatttcttcggatcaaaatccttcacctcgcctgccagctttgccttataatcggttgtatcaaaatatgtgatcggcgcgataccgacttttttatcctttaatccctgccagaagcttgctacgtcatttccaatcggagtgatcgctcccagaccggttactactacacgtgtcttatttcccatctaaaaacctgcctttctatcgtcacagttcacacgttgtgcaaactgcgacacgattttgccgatgcttcgcattccaaatcggcaaaatctgctgccactacgttatcgtacgccactttcggttccaaaagtgcctatctgtaaagcaccttttccctacatcgccattccgccgtccacgcacagaacctgtcctgtgatgtaagctgcgcggtcagaagccagaaatacggctgcctgcgctacatcctcggtcgtaccgaaacgttttaacggaatctgctcgcccatcgccttcttcacatcgtccggaagaacggcggtcatttccgtatcaataaatcccggtgcaatcgcgttgaccgtgataccacggcttccaatctcccttgccacggatttggtcagtccgatcacgcccgccttggacgcacagtaatttgcctgtcccgcatttcccatcacgccggaaacagaggaaatattgatgatgcgtccgcccttctgctttaacatctggcgggatacgtgcttaatgcagttaaatgcgccctttaagttcgtatcgatgacggcgtcaaactcttcctcactcatcttcatcagaagattgtcacgggtaatgcccgcgttgttgactaaaatatcaattctcttatagcggctgataatgtcctttaagaacacctccgccgcgctgtaatccgaaacattgcactgaacggcttccgcctgtccgcccgcctcggtaatttccttcacaacgtcctctgcttttgccgcagagccattataattgacgatcaccacagcgccctctttcgccatcgaaatagcgatctgacggccaattccgcggctggcacctgtcacaactgctacttttccatttaacatccaagcgcctcctttactttgtcgatatcttccagtttctctatattgaacgccttcgcgtttttgtcgattttacgcatgaaaccagtcagggtcttacccggtccgatctcaataaatgtgtccacaccgtctgctaacatcttccggatcgtctgctcccagcggacggaggaagaaacctgcttcatcagaagcggctttacatcggctgcatcggtcacataatctgccgtcacattcgcaatatacggaatcttcggtgtatgaatctcaacggtatcgagtacctttccaagcttctcgccagctcccactaacatcttggaatggaacggtccgcttacctttaacggaagaacgcgttttgcgcccgcttccttcaatttctctcctgcctcggcaaccgcctctgtcttaccagagataacaatctgtcccgggcagttatagttggcaatctgcacgccctcgatcggcgcgatcacctcttcgatcttctctgcatccatcgccagtacggcagacatggcgccctgaccaaccgggacttcgccctgcatcaggatacctctctgccgcacggtacggatggcatcttcgtcagacataacgcctgcagccgccattgcaggatattctcccaggctcaggcccgcagccacatccgggcggattccggtacgttccatgaatacacgcatcatcgcaaggctggcggttaccatcgccggctgcgtatactccgtgatattcagacggtccgtctgcgccggatcaaagcaaagatcggtcattgaaaacccaaggatctcgcttgctttctcaaacatctcgcgtcccgtttccgtttcctgataaaaatcctgtcccatgccagtggtctgtgcgccctgacccggaaaaataaatgcaattttgctcatagcgttacactcactctctactttctgcccaaaagcgcctccgcctgggccatcatttcttcaatcatttccttacaggtctgctctttcttcaccatacctgcaatctgtccagccatcacggttccgttgtccacgtcaccttccatgactgccttccgaagcgttccaagtgttaaatactccagttcctcgaacgggcgtccctctttttccagcttcagatactctctcgtcatcttatttctaagacagcggatcggatgtccgtgactcataccggttacggtcgaatcaatgtccttcgccttgatgactctgtccttgtaagcctggcttacgatagattccttcgatacgacgaagcgggttcccatctggaccgcctctgcgcccagcataaatgccgccgcaatgccgcgtccatctgcgatacctccagccgcaatcaccggaatcgaaaccgcatcaaccacctgcggaacgagcgtcatcgtcgtcgcctcgccaatgtgtccgccggactccatgccttctgcaacgactgcatctgcgccactcttctccatcagacgtgcctgtgcaaccgaagcgacaaccggaattaccttaatgccggcttccttccacatgcccatgtatttgcctggaataccggcgccggtcgttacgaccttgatgccttcttccacaactacctttgccacgtcatccgcatacgggctcatcagcatgacattgacaccaaacggcttctttgtcagctctctcgccttgcggatctcctcgcggacaacctcacctggtgcattggcgccgccaattaagcccagaccgccagcttcagaaacggctgctgccagatgatgttctgccacccatgccatgccgccctgaataatcgggtattcaatccccaacatttctgtgatctttgttttcattatgcctctacacctttttcttttaagtagttcataacatcgcctacagttgccaggttctgcagatcctcagccgggatctctacggagtactcgtcctccagagccataaccagctcaaacagatccagggaatcagcacccagatcatccttgaaagaggaagcctcggtaatggaatctgcgtctacgctcagctgctctgcaataatttctttcattttctctaacatcgtttcaatctcctttttaaatgaattttctttttgtgaccgcaaaaatgcaatcactgttcttatattttatcaaaaaatgggataatgtacattagttttgctatatatttttttgcctctccagacacctaccaggtcatcaatgccgcgccccaggtaagacccgcgccaaaacctgccatcaccagcgtatcgccgcgttttaagcgtccgtcccggtgcatttcatccaggagaatcggaatcgaagccgccgacgtattgccgtagcgctcgatattgaccggaatcttgtccatcggaaccttcagacggcgcgacgccacttccagaatccggatattcgcctgatgcagcagataatgctgtaccgcctcgcggtccgttccggtctcctccagaatcgcattcacaatctccggtaccttcttcaccgcaaacttgaagacttcctgaccgtccatctgcataaaaccaagctccggcttacctcccgtcaggcagttttcaagacttctcgcctggcagtacagaacgtcgttcttcgttccgtcgctgccgaccagcgtcttcaccacacccgtctcgtccgcccggacaaccgccgcgcccgcgccatcgccaaacaggatgcaggaactgcggtccgtccagtctaacaccttgctcaatgtctccgcaccgatgatcagcgccgtcttatagatgcccgcctgaataaatccctgcacaatatgtaaggcgtaaataaatccggaacatgccgccgtgatgtcaaacgccaccgcatgtttcgccccgatggctccctgtacatccgccgccgcactcgggaacgcccgatccggggaagaagtcgccacgatcacgatctcaatctcctccggagaaatgcccgcgtccgcgatcgcgcgcttcgccgcctctgtcgccaacgccgaggttccctcgctcgtcgagacatgtctggctccaatacccgtccgttcccggatccaggcatcatttgtatcaagaaatttcgtcaaatcctgattcgtcacaacctgctccggcgcatacgcgccaattccaatgattctagctgtcattttctcgtttaactccgcttcttctataaaagatagttttaatttcaaatggtttgatattcaaattaatttagagtgtagcggagaatgtggggtttgtcaagggtaacttgtaaatgaacggcaggattctggtgagaagacgcaacccggacagagaagagccgcccccaatcttccggaaaacgctctcgctcttgcactcgctgcagcggacactaagctcgaaaaaacctcgctaagtgccggcgcgagtgatgtttcctacagattgggggcggctcttctcctgaaatacgcatcacttgaaatacataaaaattaggataccgcggtcttctttttcgttgtataattataagacataggtatctttattgtatctatacagaaatttgtatactatattatctatatattaccctattaaaaggaggagttgctatgcagagtattcttgtatgtgacgatgataaacagatcgtagaagcaattgacatatacttaaccggtgagggatttgaggttatcaaggcgtatgacggcgcagaggcgctggagcttttgaaaacgcacaccgtgaatttgatgattctggacgttatgatgccggggttagatggaatccggacgacgctgaaggtgcgtgagaccagcagcatcccgatcattattctttccgcgaagtctgaggatgcggacaagattctgggcttaaatatcggggcagatgattatatcacgaagccgtttaacccactggaactggtcgcccgcgtgaaatctcagctccgccgctacacgcagctgggaaatatgaacaatcagatgggcaaccacgtattcaaatgcggcggcctgcagatcaacgatgaaaataaggaagtaaccgtggacggcgagctcatcaagctgacaccgatcgagtacaacatcctgcttctgctcgttaaaaacgccggaaaagtcttctccatcgaccagatctacgaggcgatatggaatgaggaggcgatcggcgcggacaatacagttgcggttcatatccgccatatccgcgaaaagatcgaaattaacccgagggagccgcgctatctgaaggttgtctggggtgttggatataaaattgagaagcagtaaaaatgtgaatcatccatctaacagaagttaggagttgcaaaatttatgacaaaactctcacatattccgatgcagatccagaaatggatcgccagcctcgcgcatctgtttttcctgattctgggactcatcggtatcagcctcatgtatatcaatggaaatttcgggctggggctgaccggcattggctcggttccttatgaggacaccgcggaatttaacacacaatttaataacgatctgaacgatatcttcctatatatggaatatcaggacgtcttcggtgccgacagctcgatcgacctctcgcgccggatgctcaaaatgacctttggaccaagcgagaccgaaaatttctccctgtcctccctgatttcctatctggaatccatggggtaccagctcgacgacgactttaactgccagaaagtttctgaaccggcagacggcgtcaagagccgcgaaggctacgtcgaatggtcggttcaagagccgcagcggatctacagctaccgttctgccagccggaagcgcagcacattggaggatgcggcggtcgagatcatggacacactgcatcgttattacacagtgtataaccgtttcgtcgccaatccatccaacctgcattttaaaatccagtacacggagccagattcggatcagagcgaaacaacccagtttacaaacaccgattccctgacaccggaaaatgtcaaggaatacgggcgctacgcgtacctgccgggcaattccgttttctacgacaccaacatgaaagcgatcccgctcagcagcatttccgcactggcatccaataacccgtacaccggcagcgactattatctgctgatcggaatcgatacaaattatccagtcactgacctttacgcgcgcacgcataccgcatacctgcaccggcagcacctgtatctgaccggatttgcactgacaatctttgcaacgatcggactgcttttaagcttcctgtttctgttccgggtgtccggctaccagagttaccgcagcttcgacgtgacgctgcacggcttcgacaagagcggcactgaaaccggcatcgtcttttttgccgccatgaccgcgatcgccctggttgtaagcgacctgattctcatccgcatcctgcatctggtcattccatcgcagtattggtacttctccgatcacagcctgcaggcgctggtcctgtatctgggcggactgctgctctttttcagcctcctgcgccgctaccgcgccggtaccctgtggacctccagcctgatctgccggattcagaagaaaatgttgatcctcaaaacacggcagaacttccgcagccgcctaggcatcggatttgttctctatcttgcaatcaacacagcgcttatcagccttgcctggtatttctgggaccgcgtgtatgcaaatttatacgttgtttacctgctgacaggtctgactgtgctggtatttctgctgtttaacctgtggatcttttacatactgttccggcaggcaagcgaacaggaatccatccgcgatgccgtccgccagctctccgccggggagaccagctatcagcttgatctcgatgaatttgacggtccggagctcacgctggcagagggactcaacaacatcagttccggtcttgaaaccgcccttcaggagaaaatgaagagcgaacgcctcaaaaccaacctgattaccaacgtttcacacgacatcaaaacgccgctgacctcgattataaattatgtaaacctaatgaaacgggaacatattgaagatgcgcggatcaacgcctatcttgatgtgctcgaccagaaatcacagcgtctcaaaacactgattgaagacctcgtcgaggcatccaaggcaagctccggcaatgtgaagcttgaatttaccgacattgacctcgtccagatggcatttcagaccaacggcgaatttgaagaaaaactggatgccagacatctgcagctcatcatcaatgccccgcgggaaccgctgatgatccgcgccgatggacgccgcctgtggcgcgtacttgaaaacctgtacaacaatgtctgtaaatatgcgatggagggcagccgcgtctacgtagacctcgcccgcgttcccggaaagccagaaaccggtactgctggccaggcagtcttcaccatcaaaaatatatctgccaatccgctcaacatccgtgccgacgagctgaccgaacgtttcgtgcgcggcgacgtcgcccgcaccaccgagggaagcgggctgggactatcgatcgccaaagatctgacggaattgcagaacgggcagtttagtttgtatatcgatggggatctgtttaaggcgcaggtaacgtttgatttggtggagaaaacgacggagaaggcggtggaggacgcagaaataatagaagaaaccgatgcttccgaagcggctgaaaagccgaaaaaggacgatgaactgaaaaaaacaaatataccggaagaagctactattccaaaagaggtaaacggcgaatcttccgaaaatgctatcaatgaaaccataaacactacggaaaattcaagaaatgaataaaaatttatgaattgaggactttatcctatgaaacgcactcatatcatgatcgcagtcttcttcgcctgcatcctctcccccaacctgctgtttcctatcctgaaaaccacagccgatgagggcaccggcgaaaaccgcagtctggcggcatttccaactctgtcgctggaaaccatcgatacctttccatccggtgttgaggactggatcaacgaccacgcggcgttccgcaaccgcttcttaagcctgaacgcccgcttaaacctctccttattccagttcggagactcgcaggacgtcatcaccggaaaagatggctggtacttttacacgctcggaagctctgtcgaggacttcctcggcaccaaccgtttttccgccggggaacttcgtatgctggccgaaaaactccagaccgttcacgatgcctgggaaaaacagggaactgaatttatcttcctgtgtgcgcccaacaaagaaggtgtatacagcgaattcctcccggatggcttcaccgcaccggacggacctacccgccgcagtgaactgctcgattatctggaaatacacacaaatgtcccagttgtcaatccatacccggagctcaaaaaccgccgggactatcagtggtatttcaaaaccgacacccattggaacgatgctgccggatttctcgtctccgggcagatcatcgatgccgctggcggcacctccacgccgatcgaggacgtcactgtcacctatgagccacgcgatccgggcgatctggcgaacctgttccacatgccagaatccatgtgcgacgataccaaagcagatgtatccgggtatcgaaacaacgtaaccatccactacgacagcgcctccgacaatggcaacatcgcccacatctcagcagaccaggcgcccgacccgcgacgcatcacgatctaccgtgactccttcggaaccgccctgttagcaggactgccgaaatacttcgcgcataccgatttctatcactggcaggcattcgagccggaatttttgaacgaaaataagccggatgtgctggtgtatgaggtggtggaacgggatttggggagaatgatggaggatttggagaaattgatgccgaatcaatgacgtgcatagtttgtgcattttcaaaagtatcatttgcacagtttagatgtgtttttttattgatctcacattataattatgataaattaaaattatggaaagtcagagcatatgaaaggcggcctgcccctacttttggagggcttcccctccagcatctcgtcataccaatgacagaaaggagggcgataacaatgtatattacatattcggatttaattcagtctggaatattcattgtcgctctcgtaggattgtgttatacaatcttcacgagaagaaaatagccgccactactgcaataggggcggctggtctcataagagattaactgtttcatttcggcaggccgtatgtctctggctttcctatttttactatagcatatcttttttctgtattcaagatgttttattatgccttatttttgaaatactaaattttgcaattttcatttcaccattttatctgaatcagcaggtagcttcccatctaatccatgattccgaaaccatccgccgatccgaataaaaatcaaaaattctcctacagctctttcttcaccagctccaacgccgaagcaatcaccgcatccatatcataatacttatactcgcccagacgtccgccaaagattaccttctcttccttcttggccagctctttgtacttctcatacagcgcaccattcttcgcatcattgaccggataatacggctcatcgcctaacttccactcagaactgtactcacggctgataaccgtctttggcagatcattgccatccgcatccttgccaaactcaaaccatttatgctcgataatacgcgtccacggagtctccgcatctgtatagttcactgccgcattgccctggaaattcgggatatccagcacttcggtatcaaagcgcacagaacgatactccagaacgcccagcgaatactcaaaatacgcatcgatcgcgccggtgtaaactactttctttgccatcgcatcccaatcagccttattctcaaaataatcctcttccaggcgaacctcgatgccgtccagcatattggcaaccatcttcgtatagccgccaaccgggattccctgatacagggcgttaaaatagttgttgtcaaaggtcagacgaaccggaagacgcttgatgataaaggacggaagatccttgcactctcttccccactgcttctgtgtatatcccttgatcagcttctcataaatatccgtaccaaccaggctgatcgcctgctcttccaggttcttcggctcggtgatgcctgctgccttgcgctgttcctcgatcttcgccgctgcctcctgcggagtcacgacaccccacatcttgttgaaggtgtacatattaaacggcagggaatacagctcgccgtggtaattcgccaccggagagttcgtaaaacggttaaactccgcgaactgatttacataattccagacttccttattattcgtgtggaaaatatgcgcgccatacttgtgaacctggatgccctccatcggctctgtatacacatttcctgcaatattcgggcggcggtcaatcaccagaaccttcttgcccgctttcttcgcctcatgggcgaatacggcaccgtagagaccggcgcctactattaaataatcgtacatgttggttttctccttgttacgtgttgttatacttgtgatttatttataacatacaacgacaatttaaacaagaatatcccgtcagcttcaagcattccccaaaacaaactctcaatttggacacaataccttattaatactccattaggatacatgagtcctatggagtacagacgtagacttggattggctgtttaacctgtccaagaaaatgtccgcaccctcccctctcagggcgagtccaaaatcttcaagaacacttttactatgtattatccttcaacccataacactggtacaacatatctgtcattttcttcttatctgttcctcttatacccaaggactttaaatccactgtttcatcagctatttcagataagaactttttcatatcctctgctatttccggactgagaacttgccttgtattggctgtgattaactgtgctaatcggaacacatcgtttttatgtttctttatatttttgctgtcaacctgctctccattcagcttgcgttcctttaaatccagccacgctttcgccttaaatggtatcagacaagtcggacttaataccggaatgccatcaaccatcaattgtccggtttttagcaattcataatacgcttcatttaaaaggattgccgacaagctggagatttcatcgtctatcggaagcggtgtgagaactgcatcatcttccaatataagaaaatccggatttctggaaaatatttctatcatatatggatattctttgcttttcggagatgtgaaacgataaaactgtgcatttccggtacttttattcaaatgctcatatcctgcttccttgacatactcccagaactgcctgccgaactctgctgttatggattcgacaatcaatacaatatctacatcttttgtagcacgaaacggtaattcttcattttccataatcaaatcacaagctgtcccgccgatgataacatattgattttcaaaaccctgaaatctttccttaaattttgtaaatccgctgaccattactccttcaaccttct

SEQ ID NO: 11021 - DNA, 285 bp, Unknown
  gut microbiota DNA sequence
acttgcgttcttttaaatccagccacgctttcgccttaaatggtatcaggcaagtcggacttaataccggaatgccttcaaccatcatttgtccagtttttagcaattcataatacgcttcatttagaaggattgccgacaagctggagatttcatcgtctatcggaagcggtgtgagaactgcatcatcttccaatataataaaatctggatttctggaaaatatttctatcatatatggatattctttgcttttcggagatgtgaaacgataaaactgtgcat

SEQ ID NO: 11022 - DNA, 767 bp, Unknown
  gut microbiota DNA sequence
aaactgcctgccgaactccgctgttatggattcgacaatcaatacaatatctacatcttttgtagcacgaaatggtaattcttcattttccataatcaaatcgcaagctgtcccaccgatgatgacatattgattttcaaaaccctgaaatctttccttaaattttgtaaatccgctgaccattactccttcaaccttctttcctgcaattcatctactgcttcttcaattctctcatcgtttgtatctccaaaagataaaacaatggaaatatcgtcagcactgttatcctctgaaaattgtttcgggttgtatgcccataattcaagtcttacctgcttatctgggtctatcaattcatcggtcagtaaagttttatcataatccttctcactgattgcataggtagcaactcggcttggatttagcattgttttttcagaaagtgccgttccccctgcaaaaaccatattttctgtaacttgcgtcttatctatatatcctgctttgcggacaggtgttgtcaaatatacttttgctttttcaaataattcatctctgttatattttgactcaataaacttgttgacaccgtcttttgctacaagaaacaaatccgtcgcttccaactgctttactgctctggtcaaggtcattgctgtaaatggaagtacttttccggcttctgaaatatacaatcgttttttcttactatacagataaaacaaaaacaactgctgtgttgagcaaacaaacttatctgtcag

SEQ ID NO: 11023 - DNA, 80885 bp, Unknown
  gut microbiota DNA sequence
tttaatattttttattaacacatcttattggttgctgttccaacgtccctgtctcattcagtgcaagcagctttcccatccccgtcgaacggtcatacgaaacaaccgacagactggcattcgccacaatgatctcctgcggatcccgatggaaacggagcagataattcatcaaaaagacgaggatcccaccgtgcgccacgatcaccgcatccccggctgtctcctccaaaatctgtcggatcgcccgttcactccgcgcctcgcaggattttcttgattctccgccggacgggatgccgaccatcggctgttccctccacagatgaaattcatccgggtactctgcttccacctgctgccagcttttgccttcccagcatccaaaatcgcgctcccgcagccccgtcaggcggcggagcggtaattttccttcctttgccaggatctccgccgtctggaatgcacgcgcaagcgggctggcatagaccgcatcgatccgcgtttccgccggatagccgctcctttctttcaggacagtggcaagctgctccgcctgctgccgtcctgtttcgttcagcggaatatccgtcgttccctgtatctttcccgcccggttccagtcggtctgaccgtggcgtaccaaataaaacagcattttctattactcctgttcatctatctctttctgagccatctctgccgcctgaccgctgaccttcatcgcgtccatcgtcagcttcatgatgtcacggatctcatcctcgctcatcttcatgcgctccgccaattccgcaagggtcgcctcacgtcccagctcccgcgccatgctcgcagaaatatccttgaggacattaacacgcgccgccatctcctcctcgatcttcgtctcgcggttctgaatctgcagcgcatcctcgatcgccgcacgcacctttttctccatctgcgcgtcgaaatcaccgttttcgtactcgcttgcgaacagaaacagcgccatatttgcctcctgcaccagatcgcccgccggaagtccccgatcgtggtactcctccgcgatctgaaccgccttcgccagttttaactccgtcagacgggaagccgctgtcttgtccccctccgtcagttttttcagaagcgctgtttcctcctccggcgtgccctgcgggagatttttcagttcctctaagtaaatatcataaaatgtattagattccatgtggtattccctcctaaaaaatacatacttctaagatgattccgtcattttatcacaaacaagacacagatacaatcattattgactccgccctccaatcatgttacactgaatacagttctataaggaggactaataaatggatatcaactatgaattatataaagtattttaccacgtagcctcgacgttaagtttctccgaggcatctaagcagcttttcatctcccagtcggcggtcagccagtcgatcaaggtactggagaagaaactgaaccagactcttttcatccgcagcacaaaaaaagtacagcttaccccggaaggcgagatcctactcaagcacgtagaaccggcgatgaacctgatccgtcagggcgaaaaccagctgctcgactctaacagcttaaacggcggtcagctacgcattggcgcaagcgatacgatctgccgctattatctggtgccatttttaagcgaatttcacaagcgttacccgaatatccacatcaaggttaccaaccgtacctccatcgaatgtgcgcggcttctggacaacggtcaggtcgattttattctgacgaactatccaaactccgggctcggtggaacgcagaatatccatgtgctgcgcgaattcaacgatatattcgtcgccaatgagacctattttccgatgaaagaccgcccggttacactgcgcgagctgcaggcactcccaatcctcatgctggatcgcaagagtaccaccagcgaatttctgcacaacatgttccagaagcaccagctcgacctcgtaccggagattgaattaagcagcaacgatctgctcatcgatctggcgcgcatcggtctcggcatcgcatttgtcccggatttctgtctcccggctggcgaaaaagaactttatgccctgaccctgactgaagccctgccgccgcgccagctcgtcgtcgtccacaatgagacaatgccgatctcacaggcatcgcgtgaatttattgaacttctggaaaacggctccaaaatgcctgaagctcctgctccagagacgaaagactgacccgtttgacatcgctccattcccttggaaataattcccgatactcccgacgccagaaccggtcatccagtaaaaggatgacgccctgatcggacgcggtccggatgacccgccctgccgcctggagtaccttattcatgcccggatactggtaggcatatgcaaatccatcttttccctcttcttcaaaatatccctgcaaaattttctgctccgtgcataccatcgggagcccggttccgaccacgatcacgccgatcagccgatcgcctgtcaaatcgattccctccgaaaacagaccgcccatcacgcagaacgccaccagggaggtatcacgttcagctgttcgttcgggagaaaatttctgtaaaaatgcttcccgttcctcctcggtcatgtgagaatcctggaccaggatttccatgctttttccgtttttcccggaatgatttttcattttttcattatcatccaattcaacattctgatacgcatattccccttcacacacctcacgtacccggttcatatactgatacgacggaaaaaacacaatataattgccctttttcacacttgccatcgtctggatgtaccgcagcacccgccggtattccgtctcattgcgccgcgtataccggctcgtcacatccgtcgccgccagcagaagacgccgctcctgcggaaacggggacgccacatagaccgtatagtcctcctcctgatccgacagaagcatccggtaataccggagcggcagaagcgttgccgagaaaaagaccgccgctttcccctgcgacaggcactgcgccagattttcaatcggattgacacaataaagccggatgacaaattcgccggacggcagaagttccgtataaatcctgtaatgctcatcgacccgctcatacatatttaaaaaatgtcgcaccgaaaaataaaaatccagaatcgtgtcccgcccatcttccccgcccggcttttccagatacttttccatttctccaaaaacaccgtttaacactgaaaccagatgtccggcatccttgagcacctggtagccgctgcactcccgcttcatccccagaagcgccttatttaaccttgtaagctgccgccccaacgccggcgcacgatgtcccagtacctttttcgtcaaaagcacttcttcctttataatagaagcactatacatttcccgcgcgcgcgataccagattgtgggcttcatccatcaggaagaaatagtccccctccgccccatccgcaaaataacgtttcaagcgcacatccgggtcaaagacataattataatcacagatgatcccatccacaaacgaagaaatatcgaggcagaactcaaacgggcagacctgaaatttttccgcatactctaaaattaccgaacgcgtaattccaaattcctgatgcaaaatttcatacaccgcatcgttgacacggtcaaaatgccctttcgcacgcgggcacatttccggattacacaccggtttttccaaaatacacaacttttcctttgccgtgatcgtgaccgaacgaaaatacagcccgcgttcccgcaaaatcgccagcgcctcttccgccaccgtccgcgtgatcgtcttcgccgtcaggtaaaagagtttctgcccatgtccttccccgatcgctttaagcgccggaaataccgtcgaaagtgtctttccaatcccggtcggggcctggacaaacagcctgcgcccgcgctccagcgtccggtaaaccgccacagccagctcccgctgtcccgcccggtacggatagggaaattcgagcgctttgattgattcatcacgtcgcagcccgttgtgatagaggtaacgcgcccatttgacatattcatggatcagaccagcaaaccattcagaaagttcgttcatcgtctggatctcctgaaagcggcggatctcctccgtctccagattacagtaggtgagctgcagtgtcacttcgtccagcgcttcctgtaatccatagatatagccataacagcgcgcctgcgccatatgcacgccaaccgcttcttccagacagtttacatcctggtaaacacacttgatctcatcgatcgtgacatcttttccatcccggatgattccatccgcacgcccctcgaccacgatctggaatccgtcctcctccaccgaatggcgcagcgacacctccgcctgataccctgatcccatccgccgctgtatcttccggtgcatccgtcctccagctaacatcgcctctttctgtgcacccgccgtgcgccggttatcaatatcccccgaacgcagaacgaactcaaccagattgcggacggagatccgtatctgcctgccggtcagctccatgtgtggttcctcccttccccgtacatgtactctcggaatctttctgtgcttgattttgtgaaatgattttttgtcagttgtgcccaaatttctgaggcgtacgcggtgcgtacgttgatgaaattcgggtgcggctggcggaaaatcagccacaaaagcacgtgcagaaagactccgagagtacatatatatgtctatcaaaaagactgcagacaccatcttctctccggcacccgcagtctttctttattttcgtactatcaacttttctttcatcatgccgattcgagccatacatatccttccaaaatatctatgatatctatgttccacttgaaccagccttccagcccttttatgccgctgtcacattgtccgcttccatcgtgtcaaggaacgcctcatactctgcatcctcgcccgtgtactcaacggtcagaatctgtgtcagatccaaactcataactcccagaatcgacttggcgtcaatgacaacacggttataaaaaacatcaatatcaaaatcgcatttcatagaagcattgacaaatttctttgcatcttctatcgttttcagcataatttttctctgtttcataataaacaactcctttttcctgaatgtaccaacagaatttttccctccgttttttaggcacatttaaaaccataaagatttattcagtgtttatagcatgatttttgtcgaatgtcaatttgatttcttttataccgcatatttttaatacatgatttttaccaaaaaagcagcgtgtttcttggtaaaatattccgacgtctagaactatcgtcgtattcatttcatgatatattgtcattatttatatacatcaaatggtttagcggattgtttttgggcagttgaactaaatattcattgtgattttccacccagcatgagcacacaaattctcttttaccaaattatcctgatctctagtttccatataaaatgatgaatgatacttaataaatggaaaaaaatatattaaatcaaaaaaaatgaaaaattataaaaaaattgttgacttttcgttatggctatgatatcataactgagtcagcagcgaaggggaatagttcaatggcagagcaacggtctccaaaaccgttaatgggggttcgaatccctcttcccctgcttctaaaggcgtcagtgattcagagatgagtcattggcgttttttgtttttttaacattcaagtcgaacgtccatgagacttgacgcgtgattccggtcagagaagctgacatattcctatcagaatcactgcgcatcctcgcggagcgtttatctcagtcggagacctaactcccactgagacaaatttgctgttactcacattacgctaatattatttttcttaaattttcccaaaatccaagcaacctacagcagtccaatcgcctcccgcacatttgccaccccttccagccggatatccgaccttggtttcaatttactgacattgaccatcggaagaatgcatcttgtaaatcccatcttgactgcctcataaactctctgctctgccatcgagacggcgcgcacctctccggagagtccgacctcgccgaatacgatcgttttctcatccagcggacggtctttatagctggaaatcagcgccatcacgatcgcaaggtcaagcgccggctcgttcatcttcatgccgcctgcaatgttgacatacgcatcgtacccggacagggcataacggcatcgtttttccaacactgccatgagcaggttcacacggttgtaatcgacgcccgctgccgtccgccgcggcagtccgaaattcgtctttgacaccagcgcctgcacttccagaagaatcgggcgggttccctccatcgagcaggcagtcaccgcaccggatgcctccgccgggcgcccttccagcataaattcggatggattcggcacctccgccagtccttcctcccgcatctcaaacacgccgatctcattggtcgaaccgaagcggttcttcactccccgcagaatccggtaggacgcatggcgatcgccctcaaaatatagcactgtatcgaccatatgttccagcatacgcggtcccgcaacaacgccctctttcgtcacatgaccgacgataaagactgtcacgcccagtccttttgcgagctgcatcaggacgccggtgcactctcttacctggctgacactgcccggtgcagaacctgccgcctcgataaacatggtctggatcgaatcgatcacgaccacatccgggcgtacctcccggatcacctccgcaatcgtatccaggttcgtctcgctcaagaacgaaagtggtccgcgcaccgtcccaatccggcttgcccgcagtttgatctgttttaatgactcctcaccggaaacgtacaaaaccttctgttcctgtcccgccaggtttcggcagacctgcagaagcagggttgattttccgattcccggatctccgccaaccaacaccagggagccacgcaccacgccgcttccaagcacccggtcaagttctgcaaatccggttctcgtccgatccgtatcggaaagctcaatttcatctaagctgaccggctttgcctgcgcgccagcccgtttccccggtgccgccgtcagcgaagccgctgccgcataccgccctgctgccgtaccggatgatgccggtgcggacggcgcttccaccatcgtattccacgccttgcacgccgggcactgccccatccatttggaagattcataaccgcattccctgcagaaaaatcccgttgattttgcctttgccatgctgattcctttccaaacacttcttctcatatttcttattacacaaaaagccgctgcatggcggaaaccggcttccggcgcacacgcccgccattcctgccatgcagcagctttcatctcacgcattgtaacttgtacgtaacgttttgtttttcttttccttatctggcttcaatccggattgcggttgccttgcccgggttcagctccacgctcagtaccagtttgccgctgacgttggtcttcatgccgccgaccgatacaccgtctacatatacctcatactcacgctcatcctctaactgaatggtaatctgagcatccttctcgccctcaaccgaaaactgtacggaagtatctcccgcctggaaatgattgactgccgtgcccggtaccgactcatatacgaacattccgttgcgctccagcttggtaatctcgccgaatgtttttaccttataaagatcgccctgaaattcaaaatcctgcagcttggactttgctgctaacatataattgccaaaactgatggttccgtcatcctcgatgcggattaactcgctaactactggcataatgctttatcctcctagtatccttttaatcaatatcgcaactgctccgcacttacacagttactcagtagtatcattttaacacacttcgaccgggtttaccagtcttttcgtttcctgccctttatcctgccctttagaccgtctcaaatttcagctggtcgccgtctttttcaatccgaacctctgtttttttccggatcgtgccttccagaatcttctcggaaagctgatcctcgatctgagtctggatcgtccggcgcaacggtcttgcaccatatttggaatcatatcccttgtctgccaggaaatcgatcgcatcatctgtgatcgtgagcgtcatcccaagctgatccttcgtccttttctcgatgccgcgcagcagaatgcccgcgatcgtcttgatattctccttcgtcaaaggatggaatactaaaatctcgtcgatccggtttaagaactccggcttaaacatccggcgcacttcctccatcacgcgctctttcataaacgcataatccgctttctcaccgctctccgacgagaatccaagccgcttcggggaaataatattttcagcgcccgcattggaggtcataatcagaatcgtgttcttgaaatccaccttccgtccctgtgcgtccgtaatgtgtccgtcatcgaggatctgcagcagaatgttaaatacatccggatgcgctttttcaatctcatcaaagagaataaccgaatatggattgcgacgcaccttctcgctgagctgtccgccctcctcgtagccaacatatcctggcggcgaaccgatcatcttggaaacgctgtgtttctccatgtactccgacatatcaacgcggatcatcgcattttccgtgccaaacatcgcctccgagagtgccttggaaagctctgtttttccgacacccgtcggccccaggaacagaaacgaaccgatcggccgcttcggatccttgagtcccacacgaccacggcggatcgcacgcgccacggcggatacagcttcctcctgtccgaccacacgctcatgcagaatggactccagtttcaacagccgctctgactcttcttctgccagcttgcgaaccgggatcttcgtccagtcagaaacaatgtccgcaatctcattttcaccgaccactaacttgcgtgaatttttctctttttcccatttttcacgaatcttttcaatcttttcctgctttttctgctgcttcttcttgatctcaccggctttctcgtaggcttcagccttgatcgcctcttccttctggtcttcgagttttttgatctccgcttcgagctttttgatctcctccggctccgtatatacagtcagacgcagcttcgaggatgcttcatcgatcagatcgatcgctttgtccggcaggaaacggtcattaatatagcgggcagacaggcgcaccgctgccaccagcgcctcatcctggatcgttaccttgtggtgctcctcatagcggctgcgaagccccttcaaaatctcgatggattccgcctccgtcggctcatctaccataaccggctgaaaccggcgttccaaggccgcatctttttcgatgtatttgcggtattcttccagcgtcgtcgcaccaatgagctgaatctcgcccctcgccagcgacggtttcaggatattggaggcatcgatcgcgccctccgcgccgcctgcaccgatgatcgtgtgaatctcatcaataaacaagagcacatttccactctcccgcacctcggcaagtaccttcttaatccgctcttcgaactcaccgcgatacttggatcctgcgaccatgccggacaaatcgaggctgacaacccgctttttcgcgatcgtctccggtacattgccggaaacaatgaactgtgccagaccttccacaaccgccgtctttccgacgcctggttccccgatcaggcacggattattcttcgtccggcggcttaaaatctgaataacacgtttcatttcccgttccctgccgatgactggatcgagctttccgtcccgcgccatctgggtcagatcccggctgaaattgtccagattcggtgtattgcttttctccgggcgcacccgtcctgctgccgcatcttccgctgcctcggacggcgcatcatcgcccatagcccccatcagatccacatataatttctgaatattaacattcattgtattgagtaaacggcacgcagttgattttccatccttgatgatggcaatcaggatgtgctccgttccaatcagaggcgctttgaaaaaaaccgcctcatcataactcgcctgcagcacggcgcgcgcccccggcgtatactcaatctgtccctctacctgagtcgccactgccgggcttatcagacgctccatcagttccatgacacgctcttctgtcacatcatgttctgccagaaccgctgccgccacgccagttccctcttttatcagtcctaaaagcagatgctccgtccccacatagccgtgttccagctcctgcgctgtctcgactgccagacggatcgcttctctggctttctgagtaaaacgatcgatcattttactgttcctcctgtttctttttactttacaccagcttcggcagttcctcccgcagataccgcgcccgctctgcctccaattcctcacgtcccagcggcttgctcgaacgtttctgtaagtttgccggctggatgccgatcatcaggcggtaaatgctcacaaattctgccggttttaacagcccgtccgcgatgcccgcccagacatgagatagaaatgtcatcgcttccttgagcgtcatccggcgcgcatatttcagaacgccgtaggacttgtacgcctcatcctcccgctccaggcggtgcctcgacagagaaacctcgcggaactgattttcctgcgccgagagctgccccgccacgttggctaccagctccagaatctcttgttcggtgatgccgagtgtcttctgattgactacctcgtacagatcgccgtagttttcattgcctctgccataaacgccgcgcacggtcgtgccgaaacgtcccatatcgcccagaagttcctgaaatttcttattcatcgtcagagacggcagatgcacgaccacagacgccttcattgctgttccgacattcgtcggataggacgtcagatatccatatttctcattaaatgcatacggaatcttctcgttgatataatcatccagcgcatccgcttttgcataacattcttgcagatcgagtcccgatgccagcacctgtaaacggatatgatcgtccgcatttaataccatgctgacccgctcatcctccgaacagaggagcccgcccggcgtcgtcttctccgccagcgtgcggtttaaaagccgccgttcccgcaatgcggtgcggtcaagcttctccatcaattccagatcttcatattcataaaactgaccgtcccggtcacccagatcgcggaaattctgttttaaacgggcaatcatcgtccgcgcctcatccggctccagacggttcggaaatttatattcttcccagttccgagacagacgcacccggctggaaacgatattggacgcatcattcgccacttcctcaaaccatttcgtcatgtctcatctctccttccagactgtgtatcttatcccggcaggcagcagccgtctcatagtcttcttcctgcaacgccgcttccagcctgcgtttcagctgcttaatctgctcttccgggctgaattccagttctcctttcttcgtcacctctgcagccgcctgactgcgcggctggatcttcggatgtttgccggtatggctcgaattttcctgcaatttcttaattttctctccaagcaacggatcaaacacatgataacagtccgcgcatccgaaacggctattcttgataaattcttcatacgtcgtgccgcaggtcgggcataccacatcctctttcggtgcctggctggcagacgcatccgtcagtcccaaaaggctcgaaagcagttttccaagcggaaattctccctcaatcagtgccgagtacggtcccagatccatctctttcgcgcactgggcgcagagattatgctctgtcttgacgccgttaaacacttctgtatatttaatattcgcttcgcgaatcccacatttctcacacagcataatttatcctcccaacatacacatcccgcaacggttccaatacacaaaaaccatcgcccgcagccggaacctgctattccgctgtaaatgcgtcataaatggaatccaccagattgtgaacctcctcgcggctcacatttttacagacacctcttgccagaattacactgagatcccggcgcatctccgagatcgtccgcatcttatccgtgtcaagtgcaatcactgccccgcggcggcggtctacccgcagaaagccttcctgtttcagtacagaatatgccttgttgaccgtgtgcatgttaattccgatgttatccgctaactggcgcacggatggcagcgtatcgccctcccggatctggtcggtcgcaatcccgatgatgatctggtttatgagctgaatataaagcgcttcctcactgttaaaatcaatctctacaatcatactccaccatctttcattctgacggcagaccccgtttctaaatacagtcagccgcctgttttatcatttgttatatagattgtataacaaacagatgttttcgtcaactgtaaaactgtgttaattgtgtgaacttgttactgttcacggataggcacttttggaactgaaagtgccgtaagaaaacgtggtggcagcaggaatttgccgtatttaaatgcgaagccacggcaaattccgttactgggcacgtatgcgtgaacagtaacgtgaacttgttacaaaaaaatcgatataaaagaaaagacagatacccaccagaaatctcctggacagatatccatcttttcctcttttatttactgcggatcgtcgatatactcaaatccatcctcatcacgccgatcccgctctaaccgggcttttgcctcgcgggcgcgtctggatcgctctgattccgactcatatctcgttgggcgatcaccgtattcctcccgttccagcgtgtagtaaagctccgagcgggatgccgggcgcacatgaatcgccgggcgcgcattccggcggtctcccgatgctgcagactctttcgccgcacgatgcgccgatgcaggcgtgtaatcgcgctgcaggcggctttcttttgctgaaacggcacgttcccgttctgtgcgtcggctttctgccactgcctggcgttcccgctctgcacggcttccgtctgccgaagttctgcgaggacgctcagtacggctttcctctgccgcatctctgcgggtgcgctgcagacgttcttcttctgatgcctctctgcggacacaagccggactgctttcttctggcatttctctacggacgcgttcggaacgattttcgcttcctgcttcccggcggcgtctttcctccggcatccgttttgcgcggtctgccgatgctgctgcctccatactccgctcccggcgaaccggctgggacgcgtgcccctcatcccttgtccggcggaccggcggcgtctcgcgctcctcttcccgctcccggcggaccggtcttgtctccagcgtctcttgggttcggcgcgcactccgccgcccttcctccatccgctctgcggacgggcggcgtctgtcatccgctgccatgcgctccttctcactccgcgctgccggtcttgccggcatcatttccccatcttctctcttgtcgcgcccagtgcctcgttttacccgtgcgtctgccgccggtcgtgcattcggcgatgacggacgacgcttggacctctgtctgcctccggctgcctgcgcttcctctctccactctttccgcttgagcagaagattgatcacgataaagaacaagattacacacgctacgcccagaaccgcaagcatgacaaagcgaatattataatccctgcaaagtgcgttgtacttatctacaatctcttccacttgtgcatcatcgtatttagttgccagagacgggtcttcaaaatatcgttggaaggtcttttctgcaatatcataccgatacagcgacttctcgccgctctcattcataccatatacgacacaatacttctgctgttcatcgctcttccacacccaaccctgcactttatacgtgccgtttaactgaatggtcgtctccataaatccatccggaatctgaaccgactcatccggtggaagcaccagaatcgactttgctgtcacatcgatcgtcacatacggcgataacacaccggattccggtatataaatataaaatgcaccatttccatcggcaccctgcaaatacaaaagcgtcaggtcattgccatttccacactggacctctgaaccgccataagtacaggtagactgcgtatatccttccggaagcagggaggcatcaaattccgtcgccaccgtataggaaacgccgtctatttccacatccagcccgtttttcacaaccggcgttgtcccaactgcctctgtttcagcccctgtctccgcctctgacggcacatcgaccgtatccagcttattgactgtgatcgtgtagctcttagttgtctgtccatcctccgccgtcaccttgcagacaacggtattagcacctacctttaagccggaatcaccgctgacaaggactttcgccttgctgtccttcgcactcgcgctgaccgccagcttatcgacgctggctcctacctgcgccgtataggaagtcacatttggcgaaaatgcaggggaaagtgttcctggagaaatcttcaaggacgaaagcgccgcttccgccgaggaggttgccggtgcttttactttgacgctcgccgttcccgttttagaaactgtgactgcctgtgcatctgagtcatagacttcataacttcccacagagatcgacgtatttcccgcctgcactgccttgaatttcagcgtataggaaaatgccttcgtcgaattggaatccatcgttccaaccaggcggacggaacctgcaccgccgcttgcgttatttccgctcacaaactcaatgaccgacggatcataggaaagtaccacgtcggatgcccctagatttccatcctgagaggagatcttcacattgacgctgaactcctgccccaccgtcgcactcggatcggaaaatgaaatttttgcgctggatgcataggcgctgatcccaccaaccggcgccgccaccgtcagcatacctgccacaagtatacctaatatgatatttttaaaccttttcattcaactgccctgtcctatattctttattggtaacggtcccatatctgcaccgttccctttctttacaaattttcacgtacccgctgccatctctcaagaccagccgcaggtacgtgaaatatccctacagtcccagaatcttcttctgcatcagaagaacatccaaaatatctacttttccatttccattgaggtcggcgcgcgcgatttcttccgctcttaactttccaagtcccagtatcgaccgctgtgccagcaggatatccatgatgttcagcttaccgtcgccgttgacatccccgcgcaccaacgatgccgcatgcgttcccgatgtggactgggatggtaccgccgcgctggtcggcgactggctcccctgcggactgccggcgctcccgacagactccccatttggtgcaatcagggttccggaactgccgctcccaaatccattcacattcgatcccggtgcagactgcccggaaggagagcttcctgaactgcttcccgaagaggtcggaccgacaatctgcacatccgaaccgccggaggaagaatttcctgaactgcttcctgaagacatgcccggtcccgtcgccggaccgctagagctgcttccagaggaaacgccgcttccaatcgagcttgagtaggtcggaccgcctgactggcgcactacgtgaaggacgtaatttcgcagatttccatttgccgctttgaccgtcacggtgatctcattgacaccgctctgcagatcgaccgttcccgttccggcaatcgttgccttggaatcaatcgcgctcgctgctaccgtcacgcttgccaccgacggatccacgatcagatcgtaggactctgtatctcggttaaaggtcggtgtcagtgcaaatccatcgacacccagcgccgacagcttgttgttcgggctgccgtccagcgtcggtttgacgcaggcgcccgccggcatatttttatacaccggaatcgagaactcaagtgttgtatttgccaatgccgtgatcttcgaaagcgtcagtccttcggcagctgccgcctgcacgttcgtcatgtactggtgtttataaaggttgctgccctgcacattaaatttctttaagtacagcgtatcctgcccttttttcacataattctcgccataataaaccgaaccgccgcggatcgatttctcgatgctgttccacgggcgcagatagcttcccgactgggatgcccaccagagtccgcgttctaccgcactcatcgagccggactgatatgcctctatattaaagaagttataatatccctgatagccagacaccgttccggaaatactgcgtccggttccctggctgccctgttcctgcagaatcatcgacgccagaatatatggattgactcccgattcggatgccgcattcatgatgatatctacataggaagtgccgattgcagactgctgcgccactcccgtggaagttcccgaactgctggaagtgccacttcccggtgcacttgttcttccgctgctggttgaaccagaagttgttccggttgtgctgcttcccggtgcgcttgtgctgccactggtggttccagccgtgctgctggttgtccccgatgacttattcgatgtgccgctgctgaccggcgccgtctccccgtctgcattgttggaagaaaatccatctcccgccatgcccggtccattggtcgctgccacccgctccgtcttatgatcgctgatcgaagcaatcggagacgacagaccggcgctgcttccgctcgaacctgacgaacttcccggtcccgtcgctgaaccggaagaagagcttcctgaaccgcttcccgtaccggccgataccgacgagccgcccgacaccgtgccggaaaggaaggttccgctcaccatgttctgcagccccgtcttcgtgtgaagcgaactgtcatacgactgtttcatgaactggtaaatatatttatcatttaagaaattccgcggatccatataataggcgataatatccgaagacgcctgtacccaggagcttccgtcaaaacccggccaggttccggttccccagtcatacgcacctgtctcggtcgatttccaggacgaaatgctgctgctcgcaaccaggttccgcccgatcacgctttcatttttcaacgctgtgttccaatccagatttgtctggaacgccgtgaacgtccaattcggatattgtgcatgcaattcccggagtccctgtttatagctctctggaaatccctgctttgtcagatagctttcaaaatccgaatccgatttgatcgcagtcggaaactttatgtatttgctcgaaacataccccgtctgctcaccgccgcttccgctatatcgtatctgataccatacgacgccatccgttcccgtctgctcaccaagtactgtaaccggtgcgcccttggacagcttcgctagtgcctgatacgaagtgcccggaccactccggacattcaggtttgtcgcattgaccgacgcggttctctcttccgcatagctgacgatccccagcaaagactctgctgcagtacctgccagccctgggttgaccgccatcacagcgcccagcagaaacgccgccgcccgtttccccaataacttccattttttcatccgtctatctcctcattctgctgcgttttctgcaattcatcccccgcaacggaattcttattctgtctgccgccgcatttccagacagccgctcgactgttttccatctttttcacgtttttacaatcgtatctattataatgaaaaaagaccatatgtgtcaaccttaccgaaaaaacttcgcaaaatttggggtctttgcgtgaaattgtaagattttcttaatttttagaagcagtataggttggcttcgaaatgttttccggatacatgatttttgaatgcatgaccgcatgaaaaagaatgtgccttggcacattctcgcgccgagcgcgatcgcttgcgacatgtttctgcttcgcgcgagtgcgcatcctcgcggagcgtttttttgtttcataggacataatttcctatgaaataaaaaagggagtgccaacccggtacactctaccgattctggcactccttttggctcaaaatccttaaattctttttagcttagatctggtaagactcgctttttcttccagcccaggtattgatgccgtttccatccatctcctcagtggacaccggtgctttctttacttccggtgcagccgctttcaggatctcacgtttctcaaccggcggtttctttgccggacgggactcgaagaactcttttgccacctgtgggaacagtgcataagtcaggacatcctcatcctgctgcttccactgcttcatctccgcctcaatcttctcaagctgcggctcgatcagatctgccggacgacaggtgatcggttttgcatcgccgattgctttcttctgaacttctttgtcgaacggctttacagtctgtccgaactcgcccatcagaagtttcttggattcctttgtgaacatcttgtagcgctcgcccatcaggacatttaatacagcctgcgtaccaacgatctgggaagacggagtaactaacggcggctcaccgaagtctttgcggactctcgggatctctttcagaacatcgtagtatttatcctctgcgcgcgcttctttcagctgggaaaccaggttggaaagcataccgcccgggacctgataacgcagggtattgatgtcaacgcccagaaccttggtattcatcagaccactctttaacgcttcctcacgcatcgggcggaagtaatctgcgatctccgccagtttttcctgatccagtccggtatcatacggagtacctttgaaggtctcaaccataacctcggtcgccggctggctcgttcccatcgagaacggagacatcgcggtatcgatcatgtcagcgcccgcttccactgcctttaggtacgtcatggatgcaacgccggaggtgtaatgcgtatggatatcaatcggaagatcaactgcttctttcagtgctttcacaaggatctctgcattgtacggggtcagaagacctgccatatccttgatacacagagaatcagcgcccatatcctcgattctctttgcaatgtctttccaataatccagtgtatatgcatcacccagtgtatagctcagcgctatctgtgcgtgtgctttttctttgttggctgcctttaccgctgtctccaggttgcggatatcatttaaacagtcaaaaatacggataatatcaataccattggcaactgatttctgtacgaaatattctaccacatcatctgcatagtggttataacccagaatattctgtccgcgaaacagcatctgaagttttgtcttcttaaaaccatctctcagctttctaaggcgctcccacggatcttccttcaggaaacgaaggctggcatcgaatgtcgcaccgccccagcattctactgcatgatatccaacctcatccatctttccgatgatcggaagcatctgctccgttgtcattctggttgcaatcagagactggtgcgcgtcacgaaggacagtttccacgatcttaaccggctttttcttttcatttgccattctaaagatacctcccaatacacttttattatgagtcaactatctgcgacctggctgattaaataattcacagccatatttttatctattataccacaagttttccgatttctggatagtttttttaatataatttcataagtaaattctatatcgtgggaatgtgggttgtgatttttgctgatgtcagagagctttcctctgcgccgcgtgggggcggctggaggaaaaaagtttcttggtcacctctttctagtccgcagtgcagcagctcgaaaaaacttcgtttttcctcgctgtcgggcattcgccctatgaaaaaaagaagccgcacacagctgcttttgtgtaaacacaacgcttctgtgtgtggcttctttttttcgcactgctctttgcttacgcaagtttggacttagccagctctgccagttttgcgaaaccttctgcatcgttgatagccatgtcagaaaggatcttgcggttcatctcaacaccagcctgctttaagccgtacatgaacttgctgtaggacagaccattgatacgtgctgctgcgttgatacgagcgatccacagctgtctgaactgtctctttctctctttacgaccagcgtaggagcttgtaagagctctcattacggactgcttagctacacggtactgtttggaacgtgcgcctctgtaaccctttgccagctttaatactctattgtgtttctttttagcgtttaatccgccttttactcttgccatcggttatttcctccttcttaatcctcgaatcttataagtacggtaaaatcttcttcattaccttgctgtttgtagcatcagtaacgatgtcttttctaagatttctttttctctttgtagatttcttagttaagatgtgggatttgtaagctttatttcttactaactttccggttccggttgttttaaaacgtttagcagctgctctgcttgttttcattttaggcatggtgtagtcctccttaataatagttatgtccttatatctagcgtttcgcagaaaggaacagtacaatacttcttccttctacttttgccggtttatcaacggctgcgatatcggcaagcttctctgcaaaatcgtcaaggatatactttgtctttgacatatgtgccatctcacgacctctgaaacgaagtgtaacctttactttattgcctttttccaggaattttctcgcattgttcatcttggtattcaggtcattttcatcgatattcggggaaagacgaacttccttgatctcgattaccttctgtttcttcttagcttctttttcttttcttgcaagctcgtatctgtatttaccgtaatcgataatcttgcagaccggcggcttcgcagtcggagcaatctttactaaatccagttccgcttctttcgctaacttgtaagcatcctttgcggacatgattccaagctgctctccattttcgccaatcaaacgaacctctctgtctctaatctgttcgttaatcattaactcgctaatagtcgtgcacccccatgatatgtgatgattttggttgattcagtgtcaaaaaaaataagtgaacagtacagaccatccacttactcataataggaaatccaatataggaaatttctcaaatttatgaacccacagtcacttgctcgtgctgaggtgaggtagataacctgctttcctgtcttcgtaaagttgtttcctcacaacttttgttagtatactatggtttctttggaatgtcaaccggttttttcgagatttttgagaagatttttgagaagatttacaaatgatttttaaatatggttcacgtgttgcgcaaatgacggcaacgtacgcaaatacatttacggacatactaaaaactaccgccggatatcattacctctgcccggttttgcttccttcctgacagaattttccatatccggcggcattttttatttcgaatatttatgcagtctttcttctattaaaaaagaaaaccgcatcagtcaccgtttctggaaactcgaacattccgtctgcatagaaactgtcgcattgcctccggtgattccgatgtgttccgcgctgcaccggcggtctgtattataaacacagtttgttgcctcgcactctacttcgagacggctctccggtgttttaaaaaggttgcggaatgtgccgcctttcttctcgtcgaagctgccacagcaggtatcgcatttatcctgcgccgtctttccttctaccagaatggtatttttacagcagcagttttccgcattgtgcatacatccggttacactacaatccagttttgtcatgatttttcctcctgttttctgacatgcatcaccgaaagtctcctccggcatccagccgtcaaacttttcagcgatacacttttcaatgtgtcatggttttcgttgctgttcacacatgtatgaccagtaacgggattttaccgatacttcgcattccaaatcggcaaaatctgcaaccagaactgtatcgtacggaattttcagttcagaaaatttctgcctgtgaacagttactggtttttagattcaggagtagtatctgcttcttttttggatttattcgtgtaaactaaaacaaacgcatccatgattttatctcacagatgcgtctgcctgattttttaatttttcaaaattatttagcttcgtctgctttcacagtctcacgcaggtttttctcttcgatctccttctggatggactcgatgaagctctctacactgcttgcaccctcgtcacctgcaaaacggctgcgaacggaaacggtcttctcttcttcctctttctgtccaacaaccagcatgtacgggatcttctgggtctgtgcctcgcggatcttatagccgatcttctcggaacgtgtatccatctctgcacggatgccagcctcggtcagcttgtccagaacttccttgctgtaatctgcgtatttgtcagaaatcggaagaatctttacctgtaccggtgccagccaggttgggaatgcacctgcgaagtgctcgatcaggataccgatgaaacgctcgatggagccaaatacaacacggtgaatcatgatcggacgatgtttctcgccgtctgctccggtgtactctaattcaaatcgctgtggaagctggaagtcaagctggatggtaccacactgccaggttcttccgatagaatcttccagatggaagtcgatcttcggtccatagaatgcgccatcgccctcgtttaccacatacggcagtcccagctcttccagagcggaacgcaagccttcggttgccatctcccaatcttcatcacttcccatgctgtcttccggacgggtggacagctctacgtgatatttgaacccaaacagggaatatacctggttgatcaggtgtacaacgcccttgatctcgtccttgatctgctccggtgtcatgaagatatgtgcatcatcctgtgtgaaacagcgtacacgcatcagaccatgaagctgaccagatttctcatgacgatgaacgataccaagctcacccatacgcagcggcagatcacggtaggaacgtggctcagaagcgtataccaaaacgccgcccggacagttcattggtttaattgcgtaatcctcttcatcgatcacagttgtatacatgttgtttttgtaatgatcccagtgtccggaagtctcccagagcttgcgattcaggatgatcggagtggaaatctctacataaccagcttttttatggatttctctccagtaatcaagcagggtatttttcagtaccatgcccttcggcaggaagaacgggaaacccggacctgcatcgtgcatcatgaacaggccaagttctttgcccagtttacgatggtcacgtttctttgcctcttccatcattgtgatgtatgcttccagatcctctttggttgcaaatgcggtcgcatagatacgggtcagcattttgttcttctcgctgcctctccagtatgcgcctgccagattcatcagcttaaatgccttaccaacacccttggtgttcatcatgtgaggtcctgcacataagtcagtaaaatcaccctgacggtagaagctgatctctgcatcctccggcagatcctcgattaattctaccttgtacggctcctctttctccttcatgaactcgatcgcttcatttctcggcagagtaaagcgctccagtggaagtgcttctttgatgattttcttcatctctgcctcgatctttggcagatcctctgcagtcagaggggtagccggatcgacatcatagtagaaaccgtctgcgatggacggtccaatcgcaagttttgtctccgggtaaaggcgttttacagcctgtgccattacatggctggcggtatggcgcagagctgccagacctttctcatcctttgcagtcaggatatttaactgacagtcatggtcgatcacggtacggagatcttcttccttaccgtcaacctcacccagacatgccactctcgccagaccttcgctgatgtcttttgcaatgtcgatgatggacatcgggctcgcatattctttgacagagccatcttttaatgtgatcttcatcttttttctccttttcgttctgaaataataaaagcttcctgaccagaagaaccacgaaagaatgtgtcttggcacattctcgcgccgagcacgatcgcctgcgacatgttgcttcttcgcgcgagtgcgcatcccgcggagcgttttttgtttcataggacgcaatttcctatgaaacaaaaagtcccttagccagatatttctgactaagggacgataaatcgcggttccacccttattgaatcgatcgttcggatcgattccacttcattctgatgataacggaatcaccgttcccgattaagggacattcaaagctggtattcagatttgttttcctgtccggcgcttccacccacagccacctgcctctgttatttcaggcttttcctgcgacgccgttctctgtccagttccacaatcctactggtcttctcaacactttctttatatagataaacccgtttctggttcatcattacagtctcgattatatcagctgtttctattttgtcaagatatttttctcttgagttttcactgcattgacagaccgcctctttcatggtatgataataaggatctaaatataagggccagtaccggtttcgacagggatcatgaagctggtgaagctatccgcatgcgatgcgttaaatggcaaacttaaaattaaacgctaacaacaaattagcatacgctgcctaatttggcagttgtcagccttagagcactcacactttaagaatctggcatcgaatatgtgagaaacgatgacaggcgggttccggactgtcaggcgtatcaggaactactgaagttctgaggatgttcgtttccgcaggatagagggaatgtcaaagaacggactatgatagtagaagaacagggaattggtttttggacacgggttcaactcccgtctggtccactaaaaagaactgccgcccagcaaatcatttgctgatgcggcagttctttttcttatctatttttattctgcatcttttaccgattctggaatatctcaataatcgccttcacgatcgccaccagcacattccacatccgttttaacggaccttcttcactgctgccgtctgcctcctgatcggagatatcggttgattcatcatcatcgctgatctcatcggtccgcaggacgatctgcacgctgttcggggacggatttttcgaggaggtaaaggaaatcttctccgcctccggatctatgttcaggaagttgttctcatcctcaaacttatcgatctgctcatcgagcgtactcttcatgtcttcccccgcttcccgaaccgccgcaagctgatcgatcatggtcaggttcttatcaagaatcttctccatgccctgcagcgttgccttggttccggcatccagcgaatcacctgccgaaatcagcgtgtcattcaaaagactgagcatatcatgtgtggtataaagtgccctggtcagccggttcatcagttcttcagaatcagacagggaatccagcatcgtcggcacatatttatccgttgtgtcaatcaggacccgcatatcatccagcaaattaatcagttcatcggtcgaacttctgagcgccgataaagtcgaacccgtcttgccagtaatatctcccgccgtcttgaacgcaccattcactttattcacaatcgttttcgcagttttctgcgcctgctccactttctggaaaatgcccttcgtctcttccaccagacttgcagcatccgcagaataagtagtcgctgacagagactccagcgcctcctctacatcatcttctgcattgccaatctcatcttcccagctcgcatcattgacaccgccgcttcccggctcgccggacggtccggctgtcagggctcccgcagaaacctcggttccaaatgcattcacctctgcatcctgacccgaggagttgtcttccgaagcggaacccgaattcttagcagaatccgtctctgccttgtctgccgtcgaagcaggattcttctcttccgtctttgtcggtgattcagccgctttttccgcctggttaccagctgcaccagacgctatgcctgcgcccgctgcttcctgttcagccgaatctttactttctgttcctgctgagccagaggccgaagtgcctgctgccatttccgcgtcatccgtggtatttgcagaacccgtagtttttgcatgatcggcggcacctgcagaatccgtgatatctgcgctgccagccgcccccgctgtctgaccatttccgtttccagatgccgcctccgacgatacagatgtctcttccttctccgcactcttcatcttgcggatccgtttcagcttcatgccgtctaacgtggctaaactctgattcaggcttccaatcccctgttctgtcaccgccagggaggtatttccctgtcccagaagtttatcgagttcttccaaaattttctggacttccgccgtcttctgagcaagctctttctcgatcgcctcctgcgactgctggctgagcagtcccttgttcagctcatcggctgccgaacgcagcgatttactcaaacctcccagacgatcatacaggcgatctagttcatcctgcatatcttccatcgtattggaaagcgcctgtgtgttgctgttaatatccgtcaccgcatcgcgcgccgtctgtaaatacggaatcatgaccgtcgtctgatccgtgaccgcctgcagatcggcaagcgcctgtgtcgagagcgcctcgatctgtttccggttagcactgacggttccacgcgcctgatcgagatttgacagaccgcccttcacgccggaaacatccgacttcatggattccatcgtctttaacagcgcattcatgctgtcatacatcttgtttccatcctcgcgccaggtatctttcgcctctttcagatccttgatgcggttcagctcatccagggtccccggaaccatcatcataatgactccgatattctcatacttatccgtgccgacccggactgtaaaatcgccgtcctcgcccggaagcgccgcaaacattgccgcctgatagcttccaaccgactgcacctgcgcgcccggcgcatcgacactatagcatttctccatatccaccggcacaagcacggtcaacaccatattatttttgtaatacgccttcgcctcctcattcggggtcgcctttacattgacctcaaccagaccagacgcccccgccagtttggatgcatccgcttccactccattaagtttataggaaacgtcaaacgtccagggcagatcgacgctgtttttcggcatcgtacattgataataaaaacgcgaattcttctccggcagtttccatgtgacggttccatcgccaatttccggcgccgtgtcgtccgtcatgttgaccaccttgtcataggtaccataatcggtatattcggtcagtccattcgtggtacagcctttgaccacattgatctgcgttgccgttccataatagtccagattgacatacatcgtttcatctacctgaactcttggtgcagccgcccggacaggaactgccgcactcgttaccagcgtaaccgctgccagcgtcgccgccgctcctcttctaatgatcttcttcatggcttccagcctcccttttttctgtcatcttccgtttccggtcttttcttcgttctctcacttttccgagtagccggagctttcttctgtgtttctcccgcgcctccgcatcggaatctgttttctcttgagaaccgcccatctctgtcatttctgtatcttccagcgctttcgtttcagcttcgaattgttttcttttcgacgtaactgaatctaccagcggctttttccctttccacacggcaccagccacgcgtcttgccgcccgtttcatacgggcatggcggcgttcgcgccgttttttgaaaaacagatgaatcctctcaaattcgttctgcatcaggatatgatcaaacaataccagaaatgccggcatcagggagcagacaaaaagcatactaatcagagccccccgtccaatcaaatgtcccagatcgccgatcgccgcgacactcgataccttgtatacaatatatccggcacaggtcaggatcgaaccggatgtcagaatcgccggaataccaagattcagcgccccgatcgccgcttccttcttatccatcgtcttgcggcattccagataattgttcgtcgtcagaatcgcataatcgacggtcgcgcccagctggatacagcttacgataatgtaaccaatgaaaatcatcgtgtctccgacgatgtacggtaccgccatattgacgaaaatcgcgacctcaatcggaatcatgataaggagcggaataatcagtgatttaaaactccacatgacaaccacaaatacgccgatcagcgacatcacattgacacggctgtaatccttcgtgatcgtcgtctggatgtcctgtgtggacggtgttgtgccgaccagatacgaattttccggataatatttcttcatgatcgcctggatctcatccgagcactggtacgccagcttgctctcgcccttactcttaacgtaaataaggattctcgcataatcttttttatgtaactggcttgtgatgctgtacggaaggaaatcttccggtacgccctccgggagctgcccggacaaggacgttacactcttcatgtacggcaggtcttccagctcatccgtgaactgtttttccttgataaaagaagtatccggcacgattgccatcatcatattgcttcgtccgaatttcgctgtgatcagctcatcatcctcatataccgtcgttccctcgctggcgccgaccgcgtcatttccgtagaggaaatcgttcatgctctgcgccgtgtatgccgggatcgccagcaccgcaatcagaatcagcacgatgcggcggctgttgtagataccgtggctgagcttatcaaacgacggcaggaacgaacgatgggatgttttctcaatcatcggcgtcatacgcagaatcatcgccggcataaaaaacaccactgtcagaagactcaggacaataccttttgccagcacgagtcccatatcaaatccgatattaaacttcataaaacacagaacgataaatccgacgatcgtcgtcaggctgctggcgaaaatggagtttaatgcctcattgatcgcgttgcttaacgcggtcatctgatccagtccctttgccttttccctcgcaaacgcgtggcttaagaaaatcgaataatccatcgagcaggcgagctgcaggaccgccgacacactgttcgtcaaaaaggatatccgcccgataaacaggttcgttcctttgttcaggacgatcgccacgcccatgaccgtcagatacagcaccggttcaaaccaggagttcgtcgtcacggtcagaatcaggaaaataaccacgaccgccagcgtcataatcagcttcatctcgctcgaaacattttcctgcagcgatttgttctgaaccgccatgccgacgtaatgtcccttgtctccgagaatgtccttgatctcatcgatcgtctgggacgtcctcttatccgtgtcgccgtttacaaaaacaatatccataaccgccgtattatccttgtaatactcatcaacactattaaagttgataaatgcgtccgccgcgtatacgctggtcgatgtatcgagccacatgacctgatcgactccgtccaacgcctctattttatccttgtaggctttcgcctcataaagcgaaacatcatcaatcatgatgcgccccgtgccggggtagccgaatttctcttccatcaggtccagtccctgtttggactggacggtcgacggcaggtattccgtcagatcatagttgatctcgacaaacggcgccatgagcgctgatatcagcaccagaaccagaaagacaatctcgatcgccctgctccgctcaatgatgaatttcggcagggagaaggcttctttttccgtctgtttttcttctttgcgtttatgtaaaaatttcagtttcatgcctgcttgctcctgtcatacaatgattgcgatccttaccgcatcaaaataatcatataataatgcttatcgccgacctgctgatgtgcaacacccatttccttataataaatcacccggtccacgcgctttttctcgtcgctgtcgtgattacgcagaagcttttcttctgcctgcgtcacatcatcacagttgatgaggtaaatctccgtatgacgtctcgcagtgctttccccgatggatttgaggtaatcatcaagtgtgccttcatccgggatccggctgcttccataacccttactgcgtgccatcgccaggcggtgttcggcgatctgctgtaattttccatttaaaataaagctggcatctttatcgtaatcttttttgtcatcgtcatagtaatcttcttcctcatccccgtcaaacgcgtccgccttcagctcatttaagctgtccgccatcgcctgggtatctgcatccagaaatgccagcgtgtacgcgccgccgcccgtgtttttcttctttttggcgttcgccaggctgccgtccgcgttgatcgtatactgcgtctcatcctttgtgaaggtcgttccctccatcgcgccgctgtctttcaggaaatagtattttccgtcgatattctgccagccggtcgccatcgcgccgtccccttgcagataataccaggttccattttcctgctcccagcccgttttcatcaaaccgtctgctccgagcaggtaccattttccgcccatctgctgccagcccgtcaggtaagaaccgtccattcccaccagataataaccattctccaccggctgccagacacccgcatcatccgcaagcactgtctgggcggcagacgctgagaaaaggagacttactcctgcgattcctgccagccgtactatcttatgtcccagaaccgctttcagcgccctttttaaccccggcgccgtccgcttttcttccttcttcatccacaactttctgtccttcatacgctgtcctcactcttctttatgcttattgatcggatccatctgtttccagttccaccccccgtgccgttaaaagtgctcggagcatcgccgccagctccttttccgagatccggctgctgtcaatcaacatatcataacttgctttatccgcccatgtcttttttgcataaaaattataataatttttccgtattttatccgcttgtttgatcaggtattcagcttctttttcatctgtctcgtaacgccgcataatctccttcacgcgcgcctccatcggggcatatataaatagagaaataagcccttctgtctcctccaggatcttgtcagcgcaacgtcccacgatgatgcatggacctttcttcgcatactcccggatcaactgggactgcacgacaaacaaggtatcattcatcggctttccataaccggtaaacggattgcacttggccggaaccttaaaaagaaaacggttcgccttcatctcgtccgcctcttccagttcctccatcttaaattcgccgcacaccgctgcttcctctatcagatggcggtcataacagggaattcccagttcctttgccagagactgccccagattatggccgccgcttccaaactctcttccgattgtaatgacaaaatttttcataccagattccaccttcgtatctatttccttttgctttcgcatatgctgcaggttctcatagccgttcctttcccgattgtcagccactcctgccgtctgtgaaacgttccatacaaaagacttcttcgcagtgaacagttacatctaaaatagagcatatacaactcatgtctgtttaattgacatttgttcatttttgaactataatgcattatactaagttgttcgaatgaatacaataatcatttttacgtcagttgtattttaatcaacatttcatcacattatgtttgttttttgtatctggtgtgcccatttttacttatttttaacactcccttcatccacagcctccgatacacagtcatacggcgtttccctgtctggaaacgttcagaaaggaagtcactatgaaagaagaaatactcgaccggcgtgtacgaaagacgagacgccagttaaaagaatgcttaacccgcctcctcaaagaaaaaaaaattcaggatatcacggtgcgcgaactcgccgagatggctgacatcaaccgcggcaccttttatcttcattataaagatgtctttgacctgatggatcagatcaaaaatgaactgatcgaggaggttgagtctgtcctgacgcaccatcccgttcccgaactggtagcgcgcccttccctcgcactctcagaactatttcctcttgtacaggaaaatgcagagattgtttctattttaataggagaaaacggtgatctgaattttgtcaaccgcctgaaacgcattgtcagcgataaatgtttaaaaggctggctggatctcaaatgttccagcgatccggatacgctcgcggcattttccgcctttatcgtttccggctgtgtcggtaccgttcagtactggatcgaaagcggcatgaaggaatccacagaacagatggcaatcttgacagaggactttatcctaaaaggcatccgggtgctggaaaatccggcttgactttcacgaaattccgtgctttaataaaactgcaatttttaaaaattcagaaaggagaaccacatggacagttgtgacagcaacgggcgaagtcgtcgcgatgggcaaaatcaaactatgaattccaaccatgcgtaccagactgttggtctgccgcagggtctttttgagtgtgaatcgggctgtctgacagcacatttttgcctgctttaacaggcgagtgcttcaatgctgaccgtttcccggtacgattggttttcatatatatttgtccatcgccctggcgcgggtttgaaactgccatctgcggcatttcatcctgttcccgactggcggtggatttttttatccccgcactgctcgccctgtacgtcccaaacggcattaaatagaacgacagaaagcgagggaaccaaatatgaatcagactccagaaatggacgaaaagaaaacaagctccccggaaacggctccgatcgccgcaaccgcagagcataatgctaattttgaagaaaatatccgctcgatcatccgcagcggaaaaccggcaagcgtgatccgggatgacctcgacaattaccatgcaaacgatattgccgaggttctggaaacactggacactgcgacccggaaacgcctctacaatattctctctctggaaatgacggcagagattttcacctatctcgatgaaccggcgccttatctgcatgaactggggcttgaccgggcggcagccgttctggcagagatggatgccgatgaggcggtcgatatcctcgaaaatttagatccggaggaaaaagaagccctgatcgcgcgcatggatcaggaatccaaggatgatatccacctgatcttttcctacgatgaggaacagatcggtagccggatgacaaccaactacatcgtcattcccaataactgtacgatcaagcaggcgatgcgccatctgatctcccaagcggaggacaacgacaacatcgacaccatctacgtcgaagacgaaaatgggcgctatttcggtgcgatcgagctgaaagatttaatcactgcccgtgagtacatgaagctggaggacatcatcagtacctcctatccgtatgtgtacgcggatgagaaatcttcggactgtatggaagagctgatcgattacagcgaggattctatcccggtactcgatcggaaccataagatcatcggcgccatcacttacgaggatatcgccgaggcgatcgatgacgagatgggtgatgactacgcaaagctggcaggtcttacttcagaagaagatctgcacgaaccactgttacagagtttgaaaaagcgcctcccgtggctggtgctgctgctcttcctcggcatgggtgtttcctcggtggtcggtattttcgagccgatcgttgaccgtatcgcccttcttatctgcttccagtcgatgatcctcgacatggcaggcaatgtcggcacccagtcgctggctgtcaccatccgtgtcctgatggatgaggatatctccgcgatgcagaagctgggatttgtattcaaggaaatgcgaatcggatttttaaatggactgctgctgggctcggcttcgttcgtcgtaatcggcattttcatccatattatgaaacagaagagtcttttcttctcgtttgcactttccggctgtgtcggcatctctcttctgaccgcaatggtaatctccagcctggtcggcgtactggtgccgatgctgtttcacaagctgaaggttgacccggcagttgcgtctggtccgcttatcacgacggtgaatgatctggtagcggttgtgacttattatggactggcagagattttgctggtggatgtgtttcatttagtatagaaaccgtttaatacagagatttgtcagcgatcttcttttttagcgacttctccctgcttcttataaatagagtttgcatctaccccgccgcgcacgctggaaagcggatagatattggtgccgcgtccgatgatgctgcctggatttaggatggagccgcagcctacttctacgttatcaccgagcatggcgccgatttttttgcgtccggtttcgaccttgccgtcttcggcgtggatttctaccagaagtttatcggattttacgttggaggtgatggaaccggcgcccatgtgggatttgtagcctaagatggagtctccgacgtaattataatgcggtacctgtactttatcgaacaggatgacgtttttaagctcggtagagtttccgactactgcaccttctccgatcagggcgctgccgcggatgaatgcacagtgacgcacctcggcgtctttgccgacgatgaccggtccgtgcagataggcgctgtcgaataccttcgctgtcttatgaacccagatgttttcaccgcgtttctcatattctgccggatccaggctgtttcccagttcgatgataaaatcactaagacctgccagtgcctcccacgggtatgtaaactgtttcagataatccgaagccagcgtatgggttaaatcatataattctgtgattttcatttcttcttttttcatgatcattgcctttcctaaaattcaattgattctattattataaataagctatttggttccagcttttgtcgctcttgcagctttcatatttcccgcgctcttcgcacttctcgaactcttcttctctttctctgcattctggtagaacacagcaaccgcatcaaacgccggccgcagcccatacgcatttcccatatgaaccgcattgtaagtgcgtccgataacgaagcgctctaatttctgcatatattcatccggtgtgatgctgccctctgccacataggtcagacctttttcccagcttgccgtcagctccgggttgagaagctgcttcatggatgtgtgtacgacctcataaatcagttctcccagataggtcggcgtgatgacctgcgttttttcattgagcgccatatatttgatgttgaacaactttttcaggatctccgcgcgggttgcactcgttccgatgccgctgcccttgatctgggcgcgcagctcttcgtcttcgataagctgaccggcattttccatcgccagaatcatcgaaccggaggaataacgcttcggcggagatgtctcgccctctttgatctgcaaatcatccagtgacactttcatcccctttttgagctgttccagcatctggataaactctgggtgggacgcgtcaattacctttggctggctgctgtctgttccatctgcttctcttgccggattttccgcatcatttccatctatacctggttcaaggcggttcgttctgccgacactttccccggcggtgtcctttttctttttcggaatttccgccaccttgagatatcccgcttctttcaataccttgaaaccggcaaagaaatgttcactttttacctcaatctcaaccgcatatttctggtaaaccgccgccggataaaagatgcttaagaaacggcgcacaatcacctggtaaatcttgcggttcaactccgggagacttctcagcgcgccgagtccctgtccggtcggtatgattgcgtagtgatcggtaatctgcttatcattgacataacgcgtttttgctatgttcttccacagccctgcctgcatcgcctccgatgcaaatgccgccagcggctcataatgcgtcagaccgccgatatttttgctgatctccttcgccaccgccgttgaaagcacacgcgcgtccgttcgcggataggtaaccagctttcgctcgtacagctcctgcaccactttcagggtctgatccgggctgattttaaacattttagaacaatcattctggagctccgccaggttatagagaagaggtggatttttggtttcctttttcttttccacttttaaaatggttccctgcgaagtattatatacgcccattaaacccgcgtccgctttttctgcgtcgctgatctctgactgcatgactcccgaattttcgcttccattctcgcgttcccacagccatgcaatcagcgcctccgcgtcctttcgctccttaaaaccattttccttatacagacacggcgttccatagtaacggcttccttccaccgcccgccattcgccgtcaatcgagatgcctgccggtccaaatgtaccgatcacgcggtaaaatggcgttttgacaaattcccggatctccctctcccggcggactaccataccgaggacacaggtcatgacgcgtccgactgagatcacggtccggtcagaacttcgcatatagttagaaacagatggtccatatttcaacgtcagtgcgcgggaaaagttaattcccatcagataatcttcttttgcccgcagatatgccgaatccgccagatgatcgtattcggacagatccttcgcttcgcggatgccgcgcagaatctcttcctccgtctgtgaatcgatccagacgcgcttctgtctcttgccctgcacgccagccatctgcgcgacgaggcggtagatatattctccctcccgtcccgagtcggtacagacgtagattgtatctacatccgcccggtttaagagaccgctcacgattccaaactgtttcttcacgctgtcgataacctgatatttccattctttcgggagaaatggaagtgtctccagactccagcgcttatatttcatatcatatacttctggatagctcatcgtgaccagatgtccaacacaccaggtcacaaccgcattttccgactcaatatagccatccaccgatcgtccatttaccttgagtgcatttgcgaactcacgcgccacgctcggtttctcggctataaataacgattttgccacgttgttctgctcctatcttactaatttcgtaactgttcagtacctaatttcgtctaattccttttccgcttcggcgtccactccgccagaatcgccgccgcaaacatcagcccacagccaattaacattcgcaacgtcagctcctcatgcagcagccagacagagaacaggagcccaaacaccgattcaaacgacagtagaatcgaggatgtgctggcgctcagatatttctgccccactgtctgaagcagaaaacagagcatactggatgcgagtcccagatatagcatcgaaactgctactcccggcagtgtaaatacttccggatggaatgctccttccgtgagaagccccagcacccacgaacacgccgccgctgttcccatctgcatgaccgtcaggcggatcggagtgcagtatgccgtgaagcgatccagaaaaatcatatgaaccgcaaagcagatgccgcacaccagcgtcaggaaatcaccaaaattgaccgacagctcgcctttcagcgataaaagcgccaatcccacaacagcaaatcccgctgcgatcaggttatttgccttcgggcgcacatgattaaccgcccatgccagaaacggcacgatcaccacatacaacgtcgtaataaacgcatttttactcgcggtcgtgtatttcagcccatacgtctgaaaataataactgataaatagaaacaatcccgccagtgcgccgcatttaaactcctgcatcgacattccccggatctgtttccagaaaagagccgccatcccaagcgccgcgatcgtaaaccggtacgccaaaaggtatgtaggtgtaatcgcgtccatcgaatttttcatcacaacgaacgcgctgccccagataattgttacaaataaaaggctggcagatgccagcacttttactcccttgttgtttgtctcactcatgtcaatctctatcctatgtcaaaatgatcacaaatcaaatacaaatttaaaccgtcataaatttataactggtcgttgtatcgtatttctcgccctttttcacgaccggggatgcaaatcccggcatgttgactgcgttcgggtaatactgcgtctcaaagcagtatccctggcgtctcgcatacttcacaccgcccttacccggaacctgtccgtccaggaaattgcccgtgtagaactgaactcccggcagatcggtgtatacctccatcttgcgcccgctctcctcgtcgatcgcagccgccgccagactgaatacgcctgactcatggttgagaatccagttatgatcgtagccgccgcccagttttaactgatcgtaatccgcttcaatatcacgtccgatcggcttgaaatctgagaaatccatcggagtccccattaccttgcggatctcaccggtcgggatcagcaccttgtctaccgccgtgatcgcatcactgtcaatgtaaaccatctgtgaaagcgccggaccactctcatgacctgccagattgaaatacgcgtggtttgtcatattaaaaatagtatcctgatcgcaggtcccctcgtaatgaatctttacttcattttcatctgtcagcgtgtaggtcacacggatcgaggcatttcccggatatccctgatcgccgtccgggctttccagtgtaaaagaaacctgattaatgcccgtctcatattccgccgcccagatacggttccggtagaaatccataccgctgtgcaggttgttcggaccatcattcgccgtcaattcgtattttttattatttaacgtaaacgccgcgccgccaatccggtttgcatttcgtccaacagcctcgcccagatgtccatcgcttaccaggcagtctgctactgtttcatgtcccagcaggacatccgccatctctccattccgatccggcaccagcatcgtggaccagattgcacccagatctaaaaaggatgcagaaacgccattctgattcgtcaatgtataacggctgacctctctgccatcttccattgttccaaagattgtcttctcaaccatgccaaatcccccttaatttttagaatccgaaaaatatttctcgcattttttatgcttacttttgtcagaataaatctgtctaacttataaatagctgatttataatgcgcagacctactgaacagttacaagtatacaatacttttcccctcatgcacacccatttttccaaatctgattataaaaatttcaagagtcgtcactgttcacacatgtttcctatgacacaaataaaaactgccttccagagcagagtcagccatcgtttttcaaacagcttctccgccactgggcggcagttcttacttttatcagttttaattttctatttcacggattctctgaacagatttctctatttcgcctgaatatatccctgtgcggtcagaagctctgcacacagtaccgcaccgccggctgcgccgcgcagtgtgttgtgggagagacctacaaacttccaatcgtaaactttgtcttctctcagacggccaacagatacgcccatgcccttctcatagttgacatccagctgtacctgcggacgattatcctcttccagatactgaatgaactgcttcggtgcgctcggaagctccagttcctgcggaagtcctttgaaattaaccagcttctcgatcagctgctctttggttggtttctttctgaactttacaaatacggctgctgtatgtccgtccagaaccggtacacggatgcactggcaggtaatcaccggctcgaatgccttcacgatctcgccgtccttgatctctccccagagacgaagcggctcctgctcgctcttctcctcctcaccaccaatgtacgggatgatgttaccttccatctccggccagtctttgaacgtcttgccagctccggagattgcctgatacgtcgtagctactacctcatatggctcaaattccttccatgcagtcagaaccggtgcatagctctggatggagcagttcggttttaccgctacgaagcctctcttggttcccagacgttttttctggaactcaatcaccttaaagtgctccggattgatctccggcactaccatcggaacatccggtgtccagcggtgtgcgctgttgttggaaacaaccggtgtttctgtctttgcatacgcatcttcaatcgcacggatctcttcttttgtcatatctacggcgctgaacacgaaatcaacttcggatgctaccttctcgatctcgtttacgttcataacggtcatcttcttcacacactccggcatcggggtctgcattttccagcgtccgccgactgcctcctcatatgtttttcctgcagaacgcgggcttgctgccagcgcagtaatctcataccacggatgatttgccagaagcgtgatgaaacgctgacctaccataccagttgctcccagaatgcctacacgtaatttcttttccatgttcatcgtttttctcctcttctgacagcggctttttcagcttctcatggcaggatggagtttggataggaagctcctgctctgcaacacgttttcactctgccgctgtaattcttgtctatcctataacaaaacaaacaaaaaatcaacatttttccgcaagaaaaatacatttgtacgtcactcgcggacatttgataaatttataacgtctgtcacggatttaacgatgttttaactcaaaataggttcttctaagctaagtattccgctgcagccttctcaatcccatccgggtactgcgtccggtagctctcaaaatcaagcccccttgccgcaatctcttttccaagtttgactaagaacgacggaatctcgctctcaaacatcgtgccaagctcacgtcccatcgtctcttttccctgtacctcatttccgcccagataaaatacaaatgccggctgtgccttgccatctgccatccgcacgcctccgcggaatcccatcggtccagtctggtgggtaccgcaggaagacggacatccggaaatatgaatctgcggaagtgcgccgtccgggatctgtgcctccccgaccgcctttacacacgcctgtaacagagcctgcgaatcgcgtgcaccaacctgacagatcgacgcaccgatacagcttaccgatgtctcaaactttgtctgagccgtctccttcgtcgcctccagaatcttctctgcttctgctccggtcaaattgatgatataagcagtttcatccggtgccaagcgaagctctgtgccgtcaatcgactgcatcagttctcccagggatgccagcgtctccgggcgcggctgtccgccaatcggatgccagataaccgtataaagtcccggctgtttctgctccagcacacgttctcccgacgcgctgcttccatcgcctgttttgccctgcttttctttcattcctgccgctgccatcacttcctcacgtgaaagatccagctgttccccggatgccagtacctcctgaagcttttcctgatacgccttccggtaattttccgctccgccgagtgcttcctgcatataccgggtacgcgcttttccgcggttttcgtaattgccatatgcccggaatgtcagccacatcgccttaatgtaataaagaatcttctccggcgcaacgccctcggcaactttaacgccaaactgcggattgtttcccagaccgcctgcactgtatacctcaaacgttccgtccgggcaagccgcaaatcccagatctcggtaggtcgcgtgcgtcacattcgccggtgaattagagaaacaaaccttgagcttgcgcggcatcttttccgcattgatgaaggtcatcaggtattcgcccgccgccttcgcccacggcataacgtcgaaatattcgccctcttccacaccggaaagcggagaacacatcacatttcgcgggaaatctccgccgccgcccatcgtcactatcccggcatcgagtgcctgctccatcaattcacagactgatttctcatccagattgtgaaactgcacgctctcacaagtcgtaaaatgtaccatatttacctgatatgcgcggattgcctttgcgataaatgcaagcttctccttcgacacacatcctgccgtcatacgcagacgcagcatgctcgccgcgccgcctttctgtgcataactgccgtaacgtcctgaaaagcccttatatgagcccttatccatctttcctgcataaaaatccctcgttttttcacaaaactccggaagatctgttttccactcctgtggagcaattcctatcatttttctctcctgttttctcttcaaattgtaactgttcagcaccttcacagtcacgcgcaaaaatccattaaaaattgcctacggcaatgggatttttgcctgctggtccttgttttcgtacgatcagcgcagtaaatgcgcagacctactgaacagttacttcaaattctacttttaccagcttatcttacaccagatccagcgccacttccatcatattggtaaacgtcttctcgcgttcttctgccgtcgtcgcctctccggtcactgccgaatccgatacggtcaggatacagatcgcatttgcgcccgcataggcagcgttgctgtaaagtgccgccgactccatctccaccgccagcacgcccatctgcgcccagctagttccgtccggctcaagcggcgggttgtagaacatatcggaacacaaaatattaccgacatgatattttaaatttctctttttcgcggactcaactgccttttccagcagctcatagctgcacacgcaggaataatcccccggcaggcggaactgttttacatagttggatgtcgtacaggagcccatcgcgaaaataagctcgcgcacctttacctccggacgcagcgcaccggcagttccgatccggatcagattcctgcatccataaaaatgaatcagctcataggaataaattcccatcgacggacagcccatgccggttcccatgacagacacgcgtttgccctgataatagccggtataaccgtacatatttctcgttgtattgaactgttttgcatccgtcagaaaatgttctgcgatatactttgcccgcagcggatcgcccggaagcaaaatcgtctccgcaatctcgccctgctttgccccgatatgaggggtcggtgtgttctgaagttcagccatatgaaatacctccttttttcgtaaatgtactctcggaatctttctgtttgattctagcttctcgcccggcttcccttgccatcgcggtgccctattttcaaacggctcaaatgaaccgttttttctttatacataacgatcggatcatcctcagtgccgtccagcagatggattgtctccagcgactcggtacgccccagcttgatgccgcgcacacctttcgcattcttcttcatctccgatatctcctcgatcgggaatcgcaggaagataccgctggtcgtctggatgaccgcctctttcatgccgtccgccggctgtaccgagagaagcatatcattctcctgcagcttggtcgccgccactgttcggttatttgtctcaaattccccgccgggcacgatcttaatcatcgcatccttcgttgcaaataatagcttctgtccctttaactgcgccgcattcaccacacagaccggacgttctttggtggcatcaaatttactcaggttatcgatcggcacccccttatcgcgcagctttccaaagggaatctcagtcaccttcacctgatggaatgcacccagatctgtaaacaatcctatcttatccgtcgtatggcacggcagtacatacacattctccgtgtccactgtctcccggttccgctcgtagatcgacggttccagaatcttgcaataaccaaacttgtccagcacgaacacgcccggtctggcgctctccgccgcctcgtcatacactgcctcgcgtccatcctcgattttcgtccggcgttccactgcaaactcttccttgattgactgcagatcttctttaatcacctcgtccatcgcctcacggctgccgagaatcttctggtattctttgatcttgcgaagtgtctctttgtactccttctgcaatgccaagatctccaggccgatcagtttatagagacgcatttccagaatcgcagatgcctgtttctccgtaaaatgaagcttcttggcatcttcctcaaatcccggtgtacggaactggattttggaaatatcgccctccatcaggcaggctttcgcatctttcagattcttcgaaccacgcaggatcgcgataatcagatcgatgcagtcgcaggctgtgatcagaccttccttgatctccttcttctcctgctccttttccagaagcacctgatacttgcgggtattattttcatactggaaatccaggtaattctttaagattccctttaaattcagcgtctccgggcgtccattcgcgatcgccagcatattgacaccgaacgtatcctccagttttgtctttttatacaaaatattctggattttctcaatatccgcgtctttcttgagttccagaacaatccggattccttctttattcgattggttggaaatatccaccacatcggcaagtttcttggactcaaccagatctgcgatatccgacagacatttattgatgccagcgccgatcatcgtgtacggaatctccgtgatcaccagcttgtcccggtcagaacggcgttttccaagctccacctccatccgggcacgcagtttgatgcgccccgttcctgtctcgtagatcgccggaagttcactcttattcgcaatgatgccgccggtcgggaaatccggtccctttaagacgctcagaagcgcttccgtctccatctccggctgatcgatatacgccatcaccgtatcgatgacctcgcccagattgtgcggcggaatgctggtgctcatgccgaccgcaattccctcggcaccgttgagcagcagattcggcacgcggaccggcagaacctccggctctttctccgtctcatcgtagttcggcacaaaccggacggtcttgtccagatcctttaaatacacttcctccgcaaacttctggagacgcgcctccgtgtaacgcattgccgccgccccgtcgccctcgatggaaccaaagtttccatgtccgtctaccagcggcattcccttcttaaagctctgggaaagcacgaccagcgtctcatagatcgagctgtcgccgtgcgggtggtatttacccatcgtatcaccgacgatacgcgctgatttccggtgcggcttgtcatgccccagatgcagctcccccatatcgtaaagaacgcggcgctgtaccggtttcaaaccatcccttgcatccgggatggcgcgggccgtgatgacactcatcgagtagttcatatagctgcgctgcatttcctctgaatattctgtcgtaatgatcgtttcagccattctattttctatctcctaaattcctgtcatatactttcataatcgtaactgttcagtgccttcacagttactcataatctttctattaagcatctatctccgcctcatctgcgtgatcgtagataaactgccgtctcggcggcacatcgcttcccatcagcatctccgtgatctccgacgccatccgggcatcctcgatctccacacgcttgagcacacggttctccgggtttaacgtcgtctcccagagctgttccgcatccatctcgcccagacctttgtagcgctgcagggtaaattcccctgtgtgggttctgcggtagcgctccaatgctttttcatcgtatagatactcttcttttccctttttcggaatcaccttaaataacggcggcatcgcaatatatacgtgcccgttctgaatcaattccggcataaagcggtaaagaaacgtcagaagcagcgtatcaatatgacttccgtccacatcggcatccgtcatcaggacgatcttgtgataacgcagcttcgcaatatcgaaatcattgccgtatccttccgaaaaaccgcagccgaacgcattgatcatcgtcttgatctcggcattcgccaataccttgtccatcgaagctttttccacatttaaaatcttgccccggatcggcaggatcgcctgatagcggcggtttcgtcccatcttggctgaaccgcccgcggaatctccctcgacaatgaaaatctcacacttctccgcctcgcggctctcacagtttgccagctttccgttgctgtcaaaggaaaaacgggatttcgtcagcatattggtcttggcacgttcctccgccttccggatctttgcagatttctccgcacaggcgatgatcgccttcaacacctctaaattccggtcaaaataaagctgcagctcctcccctgtcacgctgaacaccgcttttgtcgcatcggcactcgccagctttgtcttcgtctgcccctcaaagatcggatccggatgcttgaccgccacaaccgccgtcatgccatttctcgtatccggtcccgtaaattttgtatctttttccttcaggattcccagttctttcgcatagctgttgatcatctgggtaaaacgtgtcttaaagcccgccagatgcgtgccgccctcctgtgtgaaaatattgttgcagaagccgagtacattttcctcaaatgcatcgacaaactggaatgccacttcaacctcgatctggtcgctgacgcccttgaaataaatcggatcatgaatcggcgtcttcgtgctgttcagctcacgcacatacgccacgatgccgtccggctccgaataagtcaccttttcagcctcgcccgcccgcttattctcataaagaatcgtcagctttgggttcagatatgccgtctcatgcaggcggctcttgagccagtccgccttgaaccgcgttttttcaaaaatctccggatccggcagaaaattgatctccgttccggtctctcttgtctttccaaccaccggcagaagaccatcgatcagctcaaccgtcgggatgccgcgctcatacgcatcgtgatggatctgtccattcttatatatattgacctccagatgcgctgagagggcgttgacaaccgacgaaccgacgccgtgcagaccaccgctcgtcttgtacgcattgttgtcaaacttgccgcccgcgtgcagggtcgagagtacgattcgctccgccgccacaccctttttatgcatctccaccggaataccgcgtccattgtcccggacggtgcaggagccgtccgcctccagtgtcacgcggatctgggaacaggcacccgccaggtgctcatcgaccgagttgtccacgatctcatagatcaggtgattcagtcccttcgttcccacacttcctatatacataccaggacgcttacggacagcctccagtccctccaggaccgttatgctgtccgcatcatactgtgttttacccatagattcattcctcctgtgcccgacctgggaatcatatttgctgccatttacacgagtgatgcaaacggcagcttttatttcacaggtcaagctgatttcttctacttataatatgtatttattttatgactttgaaatcatgcaaatagaacattctaactctctggcatcacacccgccagccattgttttatagacttttcattaccgaaaaagtagtaaaccgttctcatttactataaaatattagtaactgttcagtaccttcaccgtcacgcgcaaaaatccattaaaaattgcctgcggcaatgggatttttgcctgctagcccatgttttcgtacggtcagcgcagtaaatgcgtggacctactgaacagctacaaatattattacataaattcaaaaattttgcaacgcatttttcagaacaaatgttcgcttttcaggcagccggattccatgccagcactgccagctttcttttatcccagcgccacatccagaatcatcatcagcacaaatccaaccgcaaatccgatcgttcccatatcggaatgactgccctgcgccgactctggaatcagttcctccacaaccacgtaaatcatcgcccctgctgcaagcgccaggagaaccggcagaaccggttccagatagcggtacgcggcgatcgtcgcaagcgccccgatcggctcgacgataccagagagtgttcccatcgcaaatgcctttttccggctcatccccgactcactccgaagcggcagggaaatgatcgctccctccgggaagttctgaatcgcaattccaagtgaaagtgccagcgccgctgcaagcgtgatgccgctcttttctgctaagaatccggcaaataccactccgactgccatcccctccgggatattgtgaagtgtgaccgccagaaccagcatcgttgtcttcttgagcccgcacatatgtccctccggctcatcacttcccagatgcagatgcggaatcaggcgatccagcaaaagcagcatcagaatacccaccataaacccaatagatgccggcagaaatgccagacgccccattgcttcgcacatattcatcgatggaattaaaagtgaccagaccgacgccgccaccatcactcccgatgcgaaccccaaaagcgttttctggatgatcggctttaactcatttttcaaaaaaaagacgcaagctgctcccgccgtcgtaccgacaaacggaatcaaaaccccaagaagcgtattttgatccatattcattcctttctttttctttttaaatatctgaacggttcttttcccggaacctcgttttttttcttctatttctctttgatgtaccgggtcgttcaaagaagtcatctcaagttcctctgattgaatattcctattgtagcatatgcgcctttcttttgcacggttcctttttatcattaagccagtttcatccaccaatcccggctcaaatccgattcaaacaaccctctgtttatacatcggcattctttcatatgtttctcgtttgcaaacgtctttccgcaaacaaaaaagagaaccaaaaatcaggatgtccctaatttccagttctcttttcattctttgaatacaatgatttatcactctttaatttatttctgctcagaattctgtttaataaactcatgaacatcgtttacgcttaaattgctctcttcaatcgcatccagtaattcgcttaattcagctttacgaatctcagccgctaattcctttttctctgctttcagagctttaacggtttcttctaatttagccagcttctcttctaccgctgccagcttctctttgtttacttctaatgcagaacgtttcggtcctctcggcataatacatacccctttcgttttctttgagaatagcacaaatctcttatttgtgcaatatcgattcgtttaaaaaccaagtttttcatcaatcagagtaatctccatttcaataaaacgcattttttaataatatacttcctttttgaatctcttttgaataactttctctctggacaaatttctttttccttattataatatcagattgtatccaaacgcaagaaaaaaggagtttgtatgagtgcttccaatacacagaacgatttttccaaaggaagtatcgttaaaaatatcatgaatctcgcgatcccgatgacgttggcgcagcttatcaatgtcctgtacaacatcgttgaccgcatctacatcggacgcatacccgatcatgccaccctatctttgaccggcatcgggctttcgctgccgatcatcacgctcgtcatcgcatttgccaacctgtttggcatgggcggcgcgccgctctgctcaattgagcgcggacgcggggatatcaaagaagccgaggcgatcatgggaaattccttctccatgatggttatttccggtgtgcttctgaccgtactctgcctgatattccgcaaaccaatgctgtatctgttcggagccagcgacgctacttatccatatgcggacgcctacattacaatctatctgctcggcagcctgttcgtgatggtcggactcggcatgaactcgttcatcaattcacagggattcgggcgcatcggcatgatgaccgtccttttgggcgctgccgccaatatcctgctcgacccgatttttatctttatgcttcacatgggaatccgcggcgcggcgctcgccaccatcctgtcgcagcttctctctgccatctggattctgcggtttttaaccagtgacaaaacaatcctgaaactgagacgttcttcgatgcacctttccgcacggaggatccggaaaatcgtcggactcggtctgtccggtttcacgatggcgatcaccaactgcaccgtccagatcatgtgcaacgcaaccttacaggtatacggcggcgatctctacgtcggtgttatgaccgttatcaactccatccgtgaaattgcaactcttccggtaaccggcgttacccacagcgcccagccggtgctcggtttcaattatggggcgaaagaatacggccgcgttaaaaaggcaatcgtctttacctcttttattgcaattttatatacgaccggtatctggctgattgtcgatggtttcccagcattctttatccgcatttttaatcaggatgcagaactcattgcagcaggtattccggcgatccgcttatactttttcggattctttatgatgtcgctccaattctccggacagtcgattttcgtcggtctgggcgaatctaaaaaagcgatctttttctctattttccgaaaagtaatcatcgtcgttccgctgactctcctgctgccaggtatgttcggaatgggcaccaacggcgtatttgccgccgaaccaatttccaactttatcggcggaattgcctgctttggaacgatgctttttaccatctggcggaaattgacgaaactgcagaaacaggaagcagtttaaaatatatcgcacaagcctgtaaataaaaagcagctgtaaaacagatatttctttgaatttctttatctgttttatagctgcctttttatttatacttttttgcggcgattctgcgttcttattatattatcacgacttctttttatctatttcctttttcatcgaatatccgcttaattattccgttgtctcatacgcatacagaatcgtccgagcattgtcaaattcatagctgcacgttacaaaagaatagagacgtacaattgtcccctcgatcggggcttttgcactcgcgcccaatatcatctgtgcagatcctcctccggtgtgctaatcggtgcaatgttataattttccaccagatactgcagcacattcggagagataaatgccggaagggacggtccgaggagaatatttttgatccccagatgaagcagtgtcagcaggatacacactgctttctgctcataccaggagagcaccatggaaagcggcagatcgttgacaccgcagtcaaatgcttctgccagtgccaccgcaaccttgatggcgctgtaagcgtcgttgcactgtcccatatccattattctcggaagaccgccaatcgtacccagatccagatcattgaaccggtatttgccgcaggcaagggtcagaacaatgctgtctgccggtgtctgctttacaaattcggtataataattgcgtcccggcttggcaccgtcacatccgccgaccagaaagaaatgtttgatggctcccgatttaacggcatcgatgaccgtatccgccactgaaagaaccgcatggtgggaaaatccagtcatgactgttttgccgccgtttatgcctgtaaaatgcatatcctcaggataaccgcccagtgaaagtgccttttcaataaccggcgtaaaatctctctctttgccgatgtgtaccatttccggataagatacgacttccgtcgtaaacacccggtcggcatagctctttttcggaggcatcaggcagttcgtcgtaaagagagccggagccggaatatctgcaaattccttctgctggttctgccatgccgtgccgaaattgcccttcaggtgaggatactttttcagttccggataagcgtgcgccggaagcatttcaccgtgagtgtagatgttgatgcccttatctttcgtctgctcaaggagctgttttaaatcgtataaatcatggccgctgataacgataaacgggcctttctccacggtcagaggcacctgcgtcggaacaggatttccataagtttcggtgttggctcgatccagaagcgccatgcacttgaggttgatttcacccacttccaggacaatcggaagcagctcgtccatgccccagtcatccatgccgatcgcaaagagcgccttaaaaaagaagcgattgatcgtgtcatcggtatatcccagaacggccgcgtggtaagcatacgccgcaacgccgcggattccgaacaaaatcagcgatttcagagaacggacatcctcgtctgcctcccagagattattcatatcataattgttatttttgccgcaggagaccgtgcacacgaaacaatcaggcaccaggcgttctctctctttttcaacccgacggatcaattcagtgatggtgtcattgttaaaattcacatttgttaccgtggtaaacaatccttccaatacaagtctgctggtatccccggtaatcaggtattcattgccttccgtcgctcttgcaagaccaatcagcgcacccgtcagcttatcctgcagcctggcggtgtccgctctcttgccgcacacaccggcattgccggtacaggccgtacagcctgccgtctgctcacactggtaacaaaacattttccgctccatactttataactccttttcgttgttctgcaatcaactgccattatttctaacctgcggcaccctcacgttcaagaacacattcgcgcacttccaggctgccggctttttgtctttcttagctttacaagcgtattataaaaaaataccggcagaaattcagttgtttttacaacgaaacagaaatttaagttcaaaagaatatttagccgtaaaaataccgacctccaatcgttagatttttaggtctaacatttggaagtcggtacatagatggaatcttttttttatttttgtctcgccttaaacgcccggtcaatctcccgcttcgcgtcctttttcgccagatcgtctctcttatcatacagcttcttaccgcgtgccagaccaatctctacttttacgagacttcccttaaaatacacctgcagcggcaccagcgtatatcctttttctttgatctttgacatcaggcggcggatctccagtttgtggagaaggagtttccgcacacgcagcggatctttgttaaagatatttcccttctcatatgggctgatatgcatgccgaatacatacacctgaccgtcgctctcgatcttgataaatgcttccttgatgctgcatttacccatgcggatcgatttaacctcggtaccgaataactcgatcccggcttcgaatttatcatcgataaaataatcatggtaggctttcttattgttcgccaccatcttgattccagctcccattttaattcctctttccctctctactttttacatcttattttacaatcttctacttccagtacaccgccggcataaaatcaatcgtcctcgcataccggtcgcacgcagtcacgcgaacgcggatagtctgaccgagcttgtacgtctttctcgtcatctctccgaccaactcatagtgtgcttcgtcaaatacgaaatagtcgccgcgcagttcattgacatgaactaatccttcaaccgtgttcggcagctcgacatagaagccccagttggtgacaccggaaatgactccctcgaattcttctccgatgtaatgttccatgtactggactttcttcatcttatcggtttcgcgctcggcttcgtcagcgcggcgctccagggccgaggtctggactgccacttccggcaggattttttcaaaatgggcggtttttcgcgcatccatattgccgtgcaggcactctttgatgatccggtggatctgcagatccgggtaacgacggatcggggaagtgaaatgggtataatatttcgccgccaatccaaaatgaccggagttcaaggtcgaatatttcgcctgtttcatggagcgcagcgtcagacggctgagcaatgcctcctccggcgtgccctcgatcttttcaagcagcttttgcagctctttcgggtggacttcgccgcccggcatccgcaatgtatatccaaagttgttgatgaacgtgccgagtttcgccatcttctcctcatccggtttctcatggattcggtagaggaacggcatttcctgccaataatagtcctcagctaccgtctcatttgccatcagcatgaaatcctcgataagcttcgtcgccgcgttgcgctcatacggcttgatctcgatcgggcgtcctttggcgtcgagtaaaatcttgctctctggaaagtcgaagtcaattgcaccgcgttcctggcgcctcttgcggagaagctgcgaaagttctttcatttgcaggaataaatccacaaatcccttatatttctcctttgtctctgcatcatcatccgtgatgatcgcattgaccgccgtatacgtcatccggcgatcgacgcggatcaatgtctctgcaatctcatgtccgatcacgacgcctttgtcattgatctccatgatacagctcagcgccaggcgatcctcgccctgattcagggaacagataccgtttgagagtttatgcggcagcatcggaatgacgcggtcggtcagatacacgctcgttccgcgctttaatgcctcgcggtcaagcgggctgccctcgcggacataatgggtcacatccgcgatgtgtacaccgagccggtaaccctgctccgtcttttccagcgtgatcgcatcgtcgagatccttcgcttcctcaccatcgatcgtgactgtcggcagatcgcgcagatccttgcgtcccgccttgtcctcctcgcggacggcatccgggatctctttaagctgcgccatgacctccggcggaaattcttccggcagaccgtatgctttcacgatcgataaaatatcgactcccggatcgttcatatgtccgagaatgctggtgatcacgccctccggcttcttatccgggctgtttccgtaatccttgatcttcacgatgaccttatgaccggtcactgcgcccgcgtcacacccctgcgggatgaaaatgtcgcgtgaaatccgtggattgtctgggatcacaaagccgaaaccgccgtttttctcatacagaccgaccagctcctgattggcgtgctccaggatccgcacgatacttccctcggctctgcgtccgccgtcgctctcctgctcaatcacaaccagcaccttatcgccgtgcattgcgccctttgttttttcacgcggaacgaacacatcctgctcacgtccctcgattgccacgaaaccgaagcccttcgggtgtcccgaataaatacctgcctctgaaaatgtctccgggcgtcccagcttgcccttgcgggacatgctgatttttccctcctccagcagatgatcgataacccgctgcagctcccggcgctgttccttcgggatatttaaaagaagtgccagctccttcagcttcatcggcacatatgccggttcattcatgacatcctgaatcatcttgcagcggcgggtaaactcctcctcggaagcaccagcatcctcacgctccttcttaccgcgcttttcgcgcttcttatccatctcacgctcaagctttcgagcacggtctttctttcccgctttatcctttttccggcgcaccgattcctctttcggacctttcgcacgctccggctttttcttcttttttccgtacctctcttcccactcgccgatcagcccatccccgtcaatctggcgctgtacgctgctctcccggctttctccggacattttctcttctcgcgcttcttctttccgcatcgcaaaccgctgttctgcatttttccggatcgtctccagcatctcgtccgagagcttcatctccgtctgctgacgtttttcaaacgcctctctttctctcctgcgattttccggcattttctgtccttcctctttctgtgaagctgccgcactctgcatctgcgcctggcgcttctgctgttttacgtatttctgagcctcgcttctctttatttttcccatgattttatcaaatatgttcaaatctatctcacttctctttcttaattcacattctcgcgccatttcctatgaaaaaaagctgccacgtccagcgctctctgcctctcacccctgcatctgctcggaaaccaccggcaaatatcagattcaggaaacagatcccgctgccacgcgacagcctcttaaaggttccttacaggaatttcaaattcaaaactaatgcaaggatcagccacagaattgcagcatatttggtcagcttctccagctttccttccatagaacggcttttatttctgccccagtagctgtcagccataccgccgatggaaccggacagacctgccgatttgccctcctgcagtaggattaccgccgacaggaatacacagataataataaatatgatcgtaaggatcgtcttgatcatcttcgcacctcctgaataaacatagtaatcatagcatattttcggcggaaggacaactgtttttttcccgacttcaacccaggaatttgccgtatttaaatgcgaagccacggcaaattccgtttccgggcttgattttatctcccgtcgtgcgatacaatagagttctatcacatttacaatcagcgaaatcctttttttcatgggaacagctatttttttatcataaaacgagtcaggagggttctattttgaaaaaattcacttcggcgtttgggcgtctgtttctctctgccgtccttatttttctggtgttctacaccatgatgccagccatcaatctgcacgatcaggatttcatcgtattcctgattatctgcattctgattgtactggcagtcaactttatggaaagcattctcatattcctgaaaacagtgcagcaaaaccgcggcgttgagatcgtgcgcgatcctgtgaccggacggatggttctgcggcgcaagtacgccgacgcctccggcagtccgtttgccggttttaaggcgatgggacgcccgtgcaaatatggcacgatcgcgatcgctgtcctgatcttcttttccctgatcgcctcggcggcgggcgtccagctttttaatgcgtcccgctaccgcgatctgatcaccgttaccgagggcgattttgcctcagatgtcgcagagcttggcatgtcgcagatcccggtcgttgataaggacaccgcctcccggctcggaagcaaaaagctcggtgagatgaccgacctggtctcccagtttgagattcaggaaaattacacacagatcaactacaaggggacaccgtaccgcgtgacgcctttgcgctatgccgacccgatcaagtggctgtacaaccagaagaagggacttccggcatacattgctgtcaatatggtcgatcagaataccgatctcgtctggctgtcctccggcatgaagtattccaccagtgaatatttcttccgcaatatccaccgctacatccgtttctgctacccgacacggatgtttgagacggtctccttcgagatcgacgacgatggaaacccatactgggtggcgccgaccatcgcctaccggatcggctggtggaacggcaaggacatcgacggcgcgatcctcgtcaatgctgagaccggcgaatctaagtggtacgccaaggcggatgtcccgcagtggatcgaccagctctatgattcgaacctcatcatggaacagctcgacgacaacggcagattccagaatggttatttaaactccatcttcggtcagcgcggcgtgcgccggacgacctacggctacaactatctcgccatcgacgacgatgtgtggctgtacaccggcatgagctctgtaacctcagatgagtcgaacattggcttcgtcctcgtcaacctgcggacgaaagaaacgaaattttacgccgttccgggcgccaccgagctcgccgcaatggattccgcgcgcggacaggtgcagcacttaaattacagtgcgaccttcccgcttctcttaaatatttccggacgaccggcatatttcatttccctgaaagatgctgcagggcttgtgaaaatgtatgcgttcgtcgatgtcgcgcagtaccagatcgtcggcaccggacagacgatcgatgaggcgaagcgcaattaccgtgagacgctgggacaggaggaaatcgaagatccgactgcaaaggaaccgacggcaagcgaaactgtctccggcacggtcgaggcgatcgagaatgtcgtcatttccggtaacacctactactatttcacgctgaccgatgaccgcaccgacagcgtctacaccgctgcgatcaccgtttccgagcggcttccgttcgtgcaggcgggcgactccgtttcctttgagtgcgtcgagaatggttctacaaaagaagttataacctggaggtaagataacattgaaaagtgaagatatgattttaaaggcagccatcgtgcacattcttgattcttcggtgggaatcccggttctctccgaccagagcatggaggtcggacccgatttttccgacttcctgaaagcgcatatcgagaaaataacggaaagtgacgatgtcaagcactgtacatttgcagaaggatccgaggtcaaagagctgctgcaaaactgcaccccggacaatttcgtcgagacgagcaaacagctcgccgagcgcctctacgacatcatgaatgcgaatattgacattccagccgccgatgtggcgatgaccgtgttcggctgcaaaggcaaggattatctggcattcttaaagatgaactacaagacctcctacacgcatcagaccagggaaacggacggcggcaacagcaacgagatcattttacagcgcgcactgcttccgggacagggacagcgcctctccgaggcgtttgtcctcgatctctccgacggctccctgattctggctgagaaaaaatatgaggtcaacggcgaaaaatgcttctatttctccgagctcttcctcgaatgccgcgccccgctctcccagaaatccaagctcgacatcgtcacccgcgccgtcgatcaggttgccaaaaaatattacggcgacgaggatgcacagaaaaagatgaaaatcaaagacattatctgtaatgaattggaggaacagggcgaaatcaaggtgtctgaactgcgcgaaaaagtatttcccggcagcccggagatgctagaggagctggatgaaaaactcgaccgctacaacctctcctacgagacggtcgcgccgaaaaatgagcagacgatcaagaaattccagaaacagaagctgtacactgacaccggcatcgagatcacgatcccgatggaagaatacagaaatcccgaccatgtggagtttatcaccaacatggacgggacaatctcagtgttgattaaaaatattgggatgctgagcagtaaatagcatctcacacaaaatttatttatcggctgattcaaacgattgcgatacataataacagaaacatccatcagtcatgccgctgatcaaatcttgtatacacctcacagaaccgcgccgcaaacgacggctcgcgtccacccgcatacagatgagaaacatccccaaaacggctcatgcggaaggatgcgacgccggagcggcgctcttctgtatagagcaccgtcaccgacgacggcgccgcacaggttccgtgccagagctgcatcggagagatatttaagagatgggaaagcaggacgcactcgacgccaaaatgacagaataaaacaatcgtgtcctcattcggtgccacggcccggtaaaacaatccatttctcacatatccgtgccgtctgagcagccggtcaagctctccagtcacccaatcgtactcttcttttacatgggcgttctgaaagacttccgtttcatgccagtgatccttatcaaaatacttcggttccgccatccacgcatccggcagccagtcccagacacagtgcccggaatcctttcccggatgtaccgcctgcggggcaaattcacgcagccagctgcaggtttctgccgtgcggcaggctttttttaaggtcagggacgccgtgtccttcgcacgccccagcggcgatacataataagccgccaccggaatcggcgccagacggtctgccagaagctttgcttcctcccagccagccggggtcagggaatcaattgagtaatcaggatccgcatggcggacaatcagaaggcgcatagaaaaactcctttcgtaaagaaatgttacaaaacccaaaagcgcggtgctcatgaccaagggatgtatctgggcgcgggcaaaattagagcatcttccgatactcctgcttccacccatttaaaagttctcccgcactctccatccgccggaccggattgcggtcaaacatcgtctcgaccatgcggacattcccgcacttctccgcggtctggttcgcctcgtcgagttcccgtttccaaatcttcttctgttccggtgtcatcgcagccgcatgccgctccttaagctccagcttcgggtcaatcaaggcaagctggtacaggtgcttcagcatctccgggctcttgtcgaaattgtaggccatttcataagcggtaaacgctttctcaaaccagaaaatcccggcatacgccgccccgatattgttccagatcttcgcggtaaattcgtccgtcagcgatttgacccgccagtcctccagaatccggttgtagtaatagatcgccgtcccaaactgccgcaggcggaaatagtaatccgccgtctccttctggaactccgccgcattcattttgcgaaatgccgtcaatctctggcggtatgccgaaatctcctttgccgtataataacagcactcctgcagaatcacgatcggcagctcgtcctggctctcgccgctccgctgccatgcctccagtttgccggccagaaacgaaagtcccagctccgaacggataaactcaatcaggcggtcatccacaaatccatccagcaccagaagcggattctgataaatgacataacacagctcctgcgacgatgcgatatggacgcccagccgttctatgtaaaaaggatgtcgaaccggctcctgccggcaaagtatcagactcataatgaaacctcttgtttaatcatccggtttgtcgccggaaacaattctccaaatcccaaatcacgtatcatgacgatcatcgtgtcttccccggtaaatccaaatgccatctcgatccgggtcgtccggtccgggcgtttcgggaatccctcgagcggaatcttcaccgtcttctttttgcgcggttccagcggctggagtgaaaattctacctccggcgtgcccgacacgataaattccgccgtcattttcgtctcataccagctgtccccggcggatgccagcaccagctgtccctctttttcacgctcctgaatctttagggaaaccgttgttttcagccgcccctcacagatacaggtaaaatggtacgcactctgcgcttcacagagatcttccgagcggatcagcgcccctcgggtaaatacatccatctccgcaaacacccggcgccgtttgcagatctgctgcataaaatctgacgcccagtccgtctgtgcaaatcccctgccggtcaggatgatcgctgaaaacaggcgcttctgcagcagccgttccgcacaggaggaaagaatccggtctgccatctggatgcccgcgtcgctgtccagcacatttaagtggaatgactcctccagttcctcctgatccgcgaccacctgcatctggcgcaacccgcgctgcactctcaattcataataatgaagaccattctccgaaagttcaaacattcccacctggttgctccagacttcccgtttctggctcatcacgtaatatacaaagctctccgcgtgactgatcacatgcacccggctccggtcgatttccagaaaatcggcacagtacatcaggcagtccaccagctttacctcaagctttggcaccgtgattaccaggttttctatctcttcttttccggacgcctgtctgggaatcgcaagcacctgcttcaggaacattttcagcagatataagccctcgtagcggacaccgtcgatcgtggcggtgccgtccttcatcgccagggaaagcagcttatcttccactaccatgccctctaacgcgcccccggcactctcctctgccacccgccagacgtccgaatccggttcttttccgatccgggtcggaatcgaccagatcgtctcctgaccctgacaggatatatgtgtgcatgaatcacacagatccatgccaattataagtccattcatctatcgtttgtccgtctgtccctttcctcagacgatcgggaaaagtgcgcttaccgccgcatctctcttctggtactcccgcatcttttcccgaagcgccgtctcgttatttacttttaaagaaagactcatctcattgagcgccgcaaaccggctttcccggctgcgtcccggaatctcccggcaggaaatctctcccttttctttcgtcttccggacgccgtcctcttcctcttcgatctgatattccagcgtctcgccctcaaaaatcaccttttcacggatgtaaatatcccggtaaacaagacgcatttcctcatagtggaactcttcctcctgcggcagaatccgcagccgcagatacgggcgcaccgcccggtttccgtgatactcgatgatttctttatctaaaatattgcccgggatatggataaaccgcgccagatccttaaaataggcaaaaatcatacccgcatctaaaagcacatccaccaccgactggcataggcgccgctgttcctccgaaagctccggcagcgtcgcataatactttgtcagcgccagcagataaatatccgggatccgctcccgatcagagcttccctgcacagcaccctccaaaaatgcgaacaccttgtcgtccgtcggacggttttccagaaaatattccacgctcttgaccgtgaaatacgcgcgcacgatattttcccctgttttcttgcgtgacgcataaagctcgaacacccggtctaactttgctgtattgccggtaaagagcatctgcgccaccagccgttcctccagatcgtacgtctccacccggagccgcagcccctgcatcaggacgcggtacatctgatccaccgtaccgttgaaatgttcgcagagataatcgagaatcacactgtccggcttctcgtgttcaaagacataccaggtcagataaagcaggtggtcatcccggtcaaagagattttgaagcagcattctcccgcaaagccgcagcagcagattgaccggcagaccttccagaccataccggcacaccatctcatacgcctcgctgaaatgcccgcaccggatcagcgtcccgcagacgccgtttctctcatcccgcgtcagctggtccttgtcaaggctcagaaggtaggaaacacttccatcctttttcgcatcctcaatcccatccgccatcctcttataataccgcacgatcgctgacagcacctttgccctaaacagcgggtgcagctccatcttctgatccgcgtgctccaaaaggatcgcatcgtccccggtcagcacctccttgcggcaggcttttgcacacgcattcataaagaggaacggatgcatcggattcatttcaaaacaggtctgtaaaagttcctccatatccgtaaataccggctggatggcgcaatttacccgcgcataccgcgtctcattttcatcctggaatagaaccagatcgcgctccgaaaacagcggcacatacgccgtgccctcgttcagcacatacgcgtcctccgtcatctgctcctcatggcgcaccaccacgtatttcatcgccggttcccggcattctacccggcaggatttcaaaatccccggcaggacacgcgccatctgcgtatcgatcagttccggatagatcaatttccggtacaggaccgccagggcaccgtctatccgttccttgaaaagctgatccaccgcaaactcttccatcgcccgctcgtacatccggtaaatatccgaatccggcgttccatatgtaagaaggttcgcataaagcttcgccagtgaccccgcatccaaatttgccgaatacgaaaagtataaaaatacctcacgcgacatcaggcggtcataattctccggcatcgcatataaataatattcatacaggcgcgtcagactcaaatctgcctccagcgcccggctataccattcaaaacaggctgtctcccggcagtctccccggatcagcattgcacagagcgcctccagaatctccgtctccggatacagcccgtaaagttccgtcaaaaggcgtctgtaaaactcccggtacgaacgggacgcacgcatcacccggaccgccgccagtgccagctcgcggctgataattttccggcgtgccccatagtacagggcatgaagctcaaaattgcccgcattgtctaaaaggatcggatcactctccagaagtttcagtcccgccgcatagaggaatgggctgtgacagccatccttaaactcctgctccatgctgatcagcaccgtaaccggatttttctgcagttcctcatccagacgcagaagcatcagataataaaacaggctgctgcccgtctcctccgacgcatactgctgcagcaggcggatcaaagtgtccttctgctcggcattgccggtcagcgtcacgtacagatagcggtacaggcagttaagcttccggtcgcccgatattttaagcgccgctgaatcctgcagctcctttaaaatcgtctgcgctttctcacgccgatcagtcaaaaggtataattccgcctgcaaaagccgcagtcccgcgtcatagtgcgtcattttcatcagatccagctcccgctgcatctggtgaaccgcctccgtgccgccgatcccattttcatacgccagacgggcagtcagataatttccaagctctttctggaatgacatatgtgcccggtcgcatccgcccgcatcggtagccgatgcctcgatcgggatccgcacggtttctctggcagtgtgaatcaggacggcaccgaaattctttccggcatgcagccgttccgccagaatccgtaccggaagacggagcagaccatcttcaaaatccgcctgcgtcgcactcttcttcggcagatggaggaactcgccgtctgccgtcacctccaggtacacactgccccagttatccatccggatctcgatcgtgtcctcggcattctcagccagctcggcatatacgcgcgccctgcccggaatcgtcagaccgaccggctttttcacgcccagtccaaccagaaattcttccataaaatttgcacggctgccgtgccccttcaggccgtcatagagtgcccgcacatgcagatcctgcataaacggcacttccacaaaatccgggtactccaaaagccggagcgccgtctccatatcattttccgcgacgtgcagaaaatcttccgccgttttcagatcacctaaagtcttcccggcgtctgccacctcgacgtgaaactcatacggaatctcctcttccccgcagtttgtcaccagataaaaagaacccgtgatcgtgtcgcctgccgtcaggaacgaagtgtccacttcatatacgatccggcaccggagtccgccaaacgaattgttatcccccggaatccgcacccgcaggttcgaggaatacacaaatcccttcacacttaatccattttcgctcccgatccataaatttctctgcatcagggtattcatccgcagcgtctcgtctatcttttcaggcgaccaggtcatcttcggctgttccgaatcgatgattcccttcgccagccggttaattctctctttcattcctatcacctgccgtttcattatcctgtcccagtaactgctttgtcttcccacagttccgtcggttcgaaatctcgtaccttatatcataccatattttgtctgcatttacatcagggaattggagaatttcgctgattgcccatccggcatttttatagaaacaagcgctatcctgcctgccgggcaaaaatttgataattccgcccggtatgtggaatagcgcctgtttccagttttcgatcgttttctaatttttcttaatttcctaatcccagtcgcccacatacaggcgtgtgccagtctgccaagctgttggttcatagatcgtccaaattggatatggatatgcttttccttgcagagaatcatctattgcgatcgtctgatcaacgccattggtgcctgttttggacgacaggtcagcggcacctgtcctggtaatactgaaatagctgtcctttacagagttgctgtctacatacggtacgccgatgattgcttcgcttaacttcggcagataccagcattcttccggaaccgaaagactgccagcttccagctgtgcgccctgccaccaggtattgttcaactgaccaatatagtgtccaaggaacattgaggttccagccgctttcacacttcctgttgtgtagcagttcgaaagaaccagttttgcagaatcatattttccaaataaaccgcctgcgatggcattatatgtattcgttccacacgcatccgctgcactgaaactctgtattaccgaaatcggaccatccatccaccccacgaggcctccggcacaccagccgcctgacacattctttctatccgacagcacttccgcaccactttccgtataaccgtaagaacggttccgtccgccgacataactgttttcaatgctgaattctttcccggcagttccgccattctggttgtttttcaggtatccatacaaacctccggcggttccagttgtatccacatacccagagaagaagctgttttccaacttcatctgaccagagctctcggcaaagccgaccagacctccgctagcatcggttccctgtatccgtgcattttttcctgaaacatatacgtgattcatcactaaatcacttacttttgcttccccgatcaagcctccggtttttcctccgcttatttgcagcgtcggtgcatctacaactacatggtcgagtgtcagactgccactattcgtgcttccaaccaccgcgcctgttgccaacgttccagaaatccgggatttttctccatatatatggatatttttaatcgttagatagctgtccgccgaagtgcctgcctgtgccaccagccctgctgtattctgcccctgacaggaaatgtccggatccttcagattcaagtttgatatcgtcagatgatccgtcttctgaaataaagccgcaccattccaggcaacaggagttatctttaagcctgcaatcgtataacattcacccagttttgctttttctttctcatccacctccgcatcataagagataatatccgggttgttaatcggccagaaacttccaccttcatacttggaatttcccggactgtagatcgtcatctctccgtatgcatctttcacctctttgcaatacgcttccgtctgcgaggtaatcgaatcatcctcctgccagagaatattatcagtctggatgacccgtgtgatctttaaaccaccatagccttctccgcagaaattcagattctgcaaatgacgtccattggcgaccttaaccgtataggtatccgttccatcatcattgggttcaattacatcggcaaagcagctgttgaacttatatgagagctttgtattttctgtcggtggatagccatcctcgctcaattttacgataacattttctccatttatgtaacctcccggctgataacctccccaggtacccagactacagaaatttccaccctcacgtgataaatcatccagatagaaacgcaatttcaactttttctcttccgttatgcctatttcaaaacgatttaccctgttttctgcagcaaagctcgtccaactgccatttgcctcattttctgcacagctggcagctttctcttccgtatctacaaagcaaaattttgatcccgttctcagagtattttcctgcaaatcaccagtattgacttggagaacataccacatcgttttaccgctcaattcgccggtaatcgaaaatatcagatgtattctctgattttcttcaagcggagacggagagacataatcgatatgcagcctgtttccagtatgcagcgcctcttcgttctcgcccttgtcccagtccccgacatggttattcagaaaccacgaaaatccctttgaagcgtcctgcgcagcaagtttttccgctactttctggatcgtcggcatgggataaatcggtatttctgctttctttaattctggatcatagggatatgtattctcgctgtctgcacccgttccctcagcaccaaacagttctgaaagttcttctgcgtatgcgagcacatatttctcattcaccttactgcacacataacagcccggataaactgattttttgtttgttcccgtaccgctcgtctccgacggcagccttccatccgttctacttgcataatcatagaacgcaacaaacgcaggtgctttcatcgccggattctctgtttcatccgctgccgttccgcttccatcctccgtttcatccgatttttcctcagccgtcggcgaatacaccgacgccgacacatatgtattcgctatctgactgtctgccggaagctgtgcggcgagacctcctgcgaatccgccggtatatgccgctacattataacgtccggtaagattctcaaaggctgcattggcatttgccccattccccggtttctgggatgtgtcaaacttcttgtttgctgtatgaccgccgacataacagctctgaatctgcaccgtgggaccgcttgcggcggctgcagttgatgctttctcaacagttccgaccagaccgccggcgtacatgccttccacatagagtgccgctgcgctgtcggtcagagaaatttccccctttgccgtgccgatcaggctgcccgccgttccctttaaagcgcggatccggtatttgctttcttcctcctgcttcagatctgccgctttttctgtgctgcttcccagcttatcacggaaatgattctccgccagtgcatcctggacggtcagagtgacgccctcaaatgtgcccaccaacgcaccggcagaagcgccggtctgctctgcctgtacctgcggatattcaatctgcacatttttaattttcaccgttgccagattcgtagttccccgggaatccgttcccggcgtcaccgcaccaatcaaagcgcctgcactcgccttcgtccggaccaccggctggcagatcagcaggtttttaacactcatatcctgtgttaccgttccaaacagtccacccgtcccatctactgctgtgattgaacttcccgccgtttttcctacctgcagaccatcgatccggtatgtatttccctgatagtccagtggatacggcagactaagcggaagatagcttcccgcctccgtgatatatgcctgtgccgtcgggttcgtccgatctgcattcgtttgatccgtcacccggtaggcaatcgagatggtttccgcattctgattcaaaaaattcgagccaaatgccgtatgtagcttcgccacatgtccgcagtaaccgctctcgtccgcaatattttctcccgctttccaggtcagatcactattctgcatcgccgtaaccgttttggatgtagtcaccgccccagtgtacagctgatccggatcccagcctgaaacccgctcatccagattttccagatggcggaagctgccaatctccgcgcttcggtccgtactgatcgatgcaaagaggctgctgccggattctatattgctcgttttaacctgcgaaagcgcttcattgttgaaaacctgcgcgtacacaaagatattttcgcccggaataaaggaggcaaaacctctttcatcctgctgaaatatcatatccgtctgtgccggctggttgaaatccataaatttgaatcctgtacttgtgcccgtgccggctggcgccgctatgtcatccagaatgacctgatacgttccatccgaattgcccgaagctccggacaccttcgccacacgcgccgagcggctggtttccgggggattgatctcgatgtatccggttgtaccgctcttttctccctttacaaacagactcagtgaatgttcatttttattcggatcctcgatttttgcatataaaatatcatcattcaccagtttcactgtcggcgcctcgaattcctccaccggcagttccgggacttccagatttcctgatgcgtaatatccgatcggcagtttctgatccttataattggagttagctcccgtaaaccgctcccgttttccggcatcagacgccgccgccagaagtgcctcgcttccgatatccgtctgcacaaactgataacgatccgaataccacacctcgcggaccagtcctgcctccggatcatagaaaataagatagctcccgtctccacggacggtctcatcaatcgatccaaacggaagaaggcgctgccggatctcctcggtcacattcgcagatgccagcgccatctcaccgccagactcttcttgttccgattcaggctgccctgcctgtttttccggcacatagagaaccccgtagatatttccctctttctcctccgccagcactgtattatctaccgaaattcccagctttgcctgcttttgatcgtctgaaaattccccctgtgcctccatatggagcagacgcggaatcgtcccactggagacctccagtgtcagatgattctgcgccgccagaaagatctccttcgccgtctgatccatctccagacggcggagctttctttggtaatgaatcaccgcaacaaaagaaagactggcaagaataccgacaatcgcaatcaccgtcaaaaattccgccagtgtaaacgccgcccttctcttctgtttgttctgtctcttctgctccatctgtcctcgttcctctttttattgtaactgttcagtaccttcacagtcacgcgcagacctgctgaacagttagtttttattttatttctgatccagattgactgcacgcacggtcaggttaatcggctttaccaccgctttccgggaagttcccatcgtatcttttttccggtagatcgccagattttgaaccgtaaagcatgctgtctcctccgaataggtatagccgtcaaatgccgtatagtattcatccgaaatcgccgcctgcgtcagcaaggatatcttattatacgcatcatcgtaagtataatccccataccatttttcaatgcccgtgccagaccagtctgtcgcactgaagtgcagccacaggtggctgtttccactccgcaaaagaggtgttaccaattctcctgttgcggaagtcccggcagaatttttcacttccagcgcattcgcaaattcatcggtcatcagctgcgccgtgagcgacagcgcctgctctgcatctgcctgttcctgcgtcctctggtaaacattttttaccatcatcacgccgcctccaagcaccgtgccgatcataccgagaatcacaatcgccgccagaagctccgtcagcgtcataccgttctgtgaccggagttttttctgacatactgaaaagagcttccggtgacccttggatgccgtctgtttctgctgcctgcaatgcctatttctgcatctgcggcattcacatctctcctgtcccatctctgtctcctctatcggtatctgtaaagcagctcttgtaagtttacctcttcctcttctgcatccgaatcagcctggctcacatacagcacgatgggatactgtcccgtccggtaattcgtctgtgtgcctgtctggtaggcatttgacgccaggcttttcttcatgccgccggttccagatgcctccagctccagaacatatctgcccgacgcctgtttcgctgtccggttgttctccagctgattgcggctgtcataatagctcgccatctgctcttcgccctgccgcagcatcctgccggacgccagaaatgcactcagaaacatcgtcattcccagtgcaatcacaagaaccgatatcagtacctctgtcagtgtctctcccgcattggcacgcagctttcttccagctgcccattccattctacttatcatcctgcagcagctccttctctattgttccgttctgccagcggatcgtcgtgatgatggtcgtcgtcgtgatcgtgtaggaatcatcgtcatccgaatctccgtcatcgccctttactttgacctctactgtgaccatctcactctcggagctatgtgctgcttccagctccagccgtttctcgcaccgctcttccttcttgtcatccgccgttactgtatctgagataaccgccttgattttataatgatccgtcatccacaggcgtacactggtctttaacggaccaatcgtgttcccgctcattccggctttcttcactgacagggtaaaatctttgtacgccatttcttcctccgatgcattctccccgtctgccagcttccgatactcattatttctataaatatccacgatcagtgaatcgagaaccgcgctattcgcactctctgggcttgacaaacccgaatccgttccatagaacttttgccacgtcgcctcattatccgtgtttttccggctgccgacgtagtagcagtaaaaatcatcctcatcgtcttcctcgtcatcccggctgtcatgcacgatcacttccttgatcttgactatattctccgtcttctgcagctcatcccgcagaaatgccgccgccgagtccaccgcatacctcttctggtcctccctcgggaggtggcggttctttccagccgacgcggaagcggacgccagaatgatcgacgcgcccaccccgcaaaacacaaaaaacaggagcgccgccatcaagctggcgccatcctgatttttcatacgcctaaaaacctgcctccagatttccgggcgtttttcactgttctctgcttttttcatgctttattctcccagcgccgcctctgccgctgtctcaaggtccgaacgctgcaggttcgacacatccgcatttgccagtcccgacggtgcctgcgtctcctccggttccagctccagaccttcctccgattccgcatcgtagcgggtctcaaaataggtcagctggaacgccaccgccactgagtggatgcggatatcctctaactcttcattttccagatctttatcatcctgaatgctcagatcctcgatcagacagcggtacggtccttcgaccacctcatgaagcatcgaaacagcgtgatcaaacgaatccgccgtaaaagaaatattcatcgcgcggcggatctccattccgtccacctgcggctctgaatactggaaagtaaaatcatacgcattcgcaaaaatacggttcagctcctccgtctccgtcttgaaatgattgtaggccggaaccatcggcgcattcgatgtcttgttttcctcgatctcttcctccatctgccggatctgcatcgctttcatctgctccagctgaatctgggcatccagctccgccgtgtccgccgcctcaatccgcctctgcaccggcaggtaaaatccggcatagtagccgcccgcgatcagggcaaagactacaaccagcagcactattttctgtgtttttgttaatacatatttccctaacgaattcatttttctttgccctcttctggttcgttaaaaaatacagccattgacactcccacctgcttcaaggatgccagagctctctcttcgccatctttcttcactgtttcctccagcgaagcggtcacatagcgcgcattcggatccgcctgtgcatcacggaccagctgcgaaaagagtgtaccattgggaatggttccttccaatgacatctgatccgaggtgatcgaaacactcgaaactgccgtcagcgggaaaatctgtgatttcagggaatccagcatcatccggcggtccggaagcttactctcttcctcattcagatacccatttccataatgcgcgtactctgccaggacctcaccgtacacctcgttggatttctccaatgtacgaagctccttctctgtcgccgcataaaccgcctctgcccggtctgcctcctgcaggggaagcattacgccaaatctcgaaaatccgtagacaaaaaccataaaaacggcaaacgcgcccagctccgccgctattttcccttttttagtctgcttctgatacagattgatgcgccgttttttcggatacttcggaccgccaatctgcatattcgcgattgattttaaatcagccaccgctcttcctccttatgcaagtaatacaccgtatgcctgtgggctgtcgatccactcgtcttcctcatccaaagagacctccggcagaagctccgccacactccgcaccggcagatccagcgtttctttcagcgcatcaatcaattccccgtatcgtgcgcctccgccgcaataatagaggctgtcgatcgtattattcacattgttgaagctataaaagttcaaaactcgcatgacctggacggcgcgggtccggtactgctcctccagcacagccgccatcttttctttgtcggtctcctcgcggttttcttcctccacctcaattcccagttcctgcatcttgttcttatctcccaaacggatctgctcgatctcctcacagcccggctccatggtacgggtaatatcatagatcccctggcgaaagaaatggatccgcaatgcttgggttcccagatcgagaatcgcatagtctttcacagtttccgatttttctgccccctctgcgttctctttttcttcctttttatgaggttctgcattcagctttgtctccaaagccttcttctcatccgccattctctcttctgtatattccagaatccattccagtcccagcacggccggaaccagaccgaccaatttcaagtgtgccatcttggccagtttttcaaattgctgcgacagctctttcgtacacgccgcaccaatcaaatccattttttcctgatccgcatagatcatcgcataatcaaagacgtacttatccatctcgtttccgatataatcatggaactcatatggaagattcagccggagctgttcctccgtcatcagcggcagctcaaagcgccgcacatacgcatcctcctgccggatgacaaacacgacgttccggcagcggatcgcatactccttcaacaaatcctttattaaatccgcatattgacgcatatcgttccggtcgatcccctcgacccgctcgctgataaattcgcgaagctcgccattttccgcatatgcaatcttgatacggtaatgtccaatctcaattcctaaacaattcctcatctctgcactccctttaaaagagccctgtataccattgtgtccatatatctccatacagcagcatacaaaaacatgccgccgcaatcgccggtccaaacggaattttctccctccgaccgatgacagaacctgcaattcccagcacacagctgagaatcaggaaaaataatacctcccaggcggaacgcatatacagtcccgtcacaaaaaaaagttttacatcgccgccccccaagctttcttttccggtcaggcggtcaaacagcagggaaagtgccagcatactgacagccagtccggcaccggtcagaactccccgcagcatctgtcttcccggttccggtaagcccagcgccgtgccgaaaaagatcaggattccggctatctgaagccggtccggtatgatccacgcatgcagatctgtgagtgtcagacataaaagcaccatccagagcagaattccccgcagtgccagcaccgagacatcgtaccggtacataatcaggcagcatgcaattcctgaaacaagttccgtccagaatgcctccgccgggatcttcgctccgcaataacggcacctgccccgcaggcacagccgtgaaaaaagcggtaccaaatccagtactcccagcacatgaccgcaggcatcacagtgggatctccctttcaaaacggacgttccgtttaacatccgccctgccagacagtctgtaaaacttccgagcgcacagcccagaataaaagtaatcatcaaaatgtaaattgttaaaaatgtggtttgatgcagcatcaatggaatatctcctgtccgtacccatgttctgtctgtttgtaaatccccaatattttatatcttccaagatatgtaaaacgctatctttatcttaaaacgcccaatttcatttcttttatttggcgccaaatcccggctttggaccaaatggattctggctggttcccccaacttcatttccctcatagaaaggagcggtctgaagcggagacgtattcgcatatggattagccgccggatttccgatgtaaaccagaatatctgtacacggtgtcttggcttccatcgccgtcttccggtattcctgccccaggtcatttaccttctttgttccacttccctgtgcgtactcaatgtgcgcgttctctccctctgcctgacagacaatctttccctcttttacattgtatcggtaatagcggtattgcttctgcggctggttctcgtagcgttccaagctttccttgcttccatacagcattgccacggccgccgccttcgccgcacggacattcgcctgattggctgcgatgaccgcttttttccgctgtgccgtaaaaatcggaatactgatcgccgccaggatccctacgatcgctatcaccaccagcagctctgccagtgtaaaaccgtgttggttctttttcatttgctcacccactttttatcaaaatgacctgctgactttgttttgattcgtgcgttgcaggccacgcttatgtatctgacaatgaatggatttttcaatcctgaaaaatttatgatgtgaacatcactttcattctaaaccttcatgcgcctggcagtcaggtgtaccaccacaaatgaaagctctggcaggtgcatttagcaaaaatggatgggaaaaccccatccattttctccacgtatgtggttatttacgaacactaattttttccttttccaacatacagtgtaataatcgcaccattgatttcatctttatcactagatgctgttccatctttactcggcttaattgatacactaaacaaatcgtacttttcttttccatcaacatcattaagagttttttcttcagtagcttttggtgttccctttactacagtagcctgtcctgtactaatgtcataatcatatttaatttctgaagctgaatctgcactgtctgtcagatactgagcaaccgctgccgcctttgctgctctcatatttgcctgattcgtagcctttctagccttgctcagctgtgccgtaaacaccggaatcgagattgcaaccaggatgcccacgattgcaacaaccaccaacagctcagccagtgtgaaaccttttttgttctcacgaactttcttgattaagcctttcataaaatcaatctccttattgtatagtattatattaatgaacagagaattatctctgcgccatccatcctctgctgtatcacatttcacatgtgtgcagtcaattacgcttacatcagatcgtacatcgtaaagataggcagataaatcgacactacgatgatacccgcaaaaatcgcaagcaccaccagcatcgtcggttccagcagtgccagaagccgctgaattcgataatccgcctcgttggcataataatcggcaacattgtccagtgtctcctcgagctcaccggtttcttctccgacggaacacatatcgaccatcgtcggcgggaaatatttctttccctgcagacattccaccagactgcgtccccgctcgattccttcgcgcatggagcggacatcctcgctcagaagtgcattgtccatgaccttcgccgtcgtgtcaaccgcctgattgatcgtgatacccgctgccagaagcaccgacattgtattggcaaactgcgctgcgccgttcatctggttgatcgcgcccacaagtggaagggataacatgatctttgctttctcaatccgtccctgcggcgtattgccgtagacctgcgaaccaatcttcaaaaacgccagcaccgccagcatcagcagccaccacttcgcaaagaaatgggaagtcgcgatcagcatccgcgtcatcagcggcagcgtaccgcccagatcggcaaatacatctgccagtgtcgggataaccttcgccatgacgataatcaggacaaccaccgcaaccgcaacgacaaacaaaggataggtcatcgctcccttgattttctccgtcgtcttgtaggacttttcgtaaaacttctgaagcctgtcaaaggatcgttccagcgtaccagactgctcgcctgcccggatcgtctcgataaatgtgagcggaaaacggtcgctatacttttccagcgccgacgcaacggtacttccggcagctacttcctctgccgcagcccccatgatcttccggatccgcttgtcctcattctgatctgccagcatacgcatcgcgcgtgccactgtcatgcccgaatgaagcgtgatcgcaaactgtgaacacaggatcgccagcttcttcgtcttgatccgcctgcttccgatctccatctccaggagactgccgtcatcaggtcttttcttctctttcttctgactgatgctcagaagaatcggatagttttcccggattctggaagcggctgccgcttcactctcagcctggagcactccccggacttcttttccatcccgtcccagcgctttatatgaaaaatttggcatctctcatacctccagccacaggattcagctgtacgccatccgtatgtacatcgccatctgcatcctttttatcattattttaacatctttgtttgtttttgtaaatatgccgtcaatcttttggatattttatacgaaacacgcatctagatcggcttttttttgctattttctctatacgtgctttgtttttgccaatctatttttgtat

SEQ ID NO: 11024 - DNA, 35210 bp, Unknown
  gut microbiota DNA sequence
tattttcaccaacacatctgacttttctttcttttccagactatttcaggtatatagatcatcagagcggaaatggtacgtcccgccctgacactcccaaaagaatagctcccgtttctttttatcttctctcttatttctcgttttccttatccagcatctcttccatcgtatgccatcccagcaccgcgcatttgacacgcgccggcatatgggaaacatcgaccagggcaccggcttcctcgagttcttcgatctcgttctcgcctgcctcgcccttgatcatccgcaggaacagatccgccagatggcgtgcttcctcttcggattttccgatgatcagatccagcatgatatcagcggatgcctgggagattgcgcagccgcttccctcaaaagcaccgtctaccacctgtccatcttcgaccttcagctgaagaatgatgtcatctccacagctcggattgacgccctctaataccagattggcatccggcagcttttctttatgtaacggatgcagattgtgatccgtcagtatttcattgtaaaaggttctattctccatatcccattttcctccggatttctttcaggttctggacaaaacggtcgatgtcctcctccgtattgtagaacgcaaagctggcacgcgctgttgcaaacacacccagatgttttaaaagcggctgggcgcaatggtggcctgcgcgcacattgacatttgcggcatccagaatcgacgcgatatcgtgcggatgtacgccgtccacggtaaagctgataattccgttgtgctcttccggcttatcacttccctggatatgaacgcccggaatctgctgcatcgccgtcattgcccgtgttgtcagcagctcctcacgcttccgcacctcgtcaaatccgacgttcatcagataatcgatcgccgcctgtaagccgaccgcaccgccgccattgacggtaccggcttcgaatttgtgcggcagttcggcaaagactgcggattcccggctgaccgaatcgatcatctcgccgcccgtcaggaacggcggcatcgcatccagaagggtctcttttccgtacaggacgccgattcccatcggtgccatcagcttgtgaccggaaaatacaaggaaatctgcatccagtgcctgcacatccaccggaatatgcggggcgctctgtgccgcatcgatgacgatgacaccgcctttttcatgcaccagtttcgtcagcttctctaccggatttctgcggccaaggacattggaaatctgcggcatcgctgcgatctttgtcttttctgtcaccagggcttccatatcctcatcccggtaggaaccatccggctgacattccagataaacgagcttcgcgcctgtctgtctggataccatctgccacggcaggatattgctgtggtggttatcaatgctgattaagatctcatcgcctgctttcagactagttaaaccataactgtacgcgatcaaattcaggctctcggtgctgttgcgtgtaaacacgacctcgctcgtctttccagcattgataaattcccgcacgcgctctcttgccgcttcatatgcctccgtcgcctcgattcccagctcatagagcccgcggagcggattggcatttttctttgtatagaaatcttccactgcctttaataccgcctccgggcgctgtgccgttgccgcattgtccagatatgcgatatccgaacccgcaagcaggggaaaatctttcttgtaatctgtcatgttctgttccttcttatatatttgtttgtatacttgctgcaaaaacaaaccgcagccaacttacagttttttcattttattatcgcttctggttcatgaactcctgaacctgcttctgtactgcctcgtcagctaccagctcattcagcgcgtcgattctcgcccgcgctaccatgcgctcagcttcctctctcgacagtccgcgggagcacagataaaacagcgttgcatcgtccagatcgcccatcgaagcgccgtgatttccttcgacatcttcttccgcacacagaatcagcggaatcgtctggtttacgatgtcatcgccgagcagcagcacatcctcgcgctcagttccctttgccccggcgcatcccggcacgaaatcgatcgttccgcggaacagcttggaggaaccgtcctgcaaaacgccagagacttccatcatactctctgtctttttgccgcggtggcgtactgtatagttcatatccagcttctggtttacactggtgtaatagccgatcttcgcgtcaaatgcgctcttttttccttccagctcggtcaggcagcccgcgtagaccttgcctgcgcccagctccagtttcaaaagctcaaatgtggcattttctccgcaggacgcaccgatatcactcaggcaggtatatccggcgccgagaagctgcacttcctgaagctgtacctttgcattcttttccgcatgaacctttacctggaacgaggatgttccctgtgcgtcctccccggagcggaatacgatcagcacgtttaagcggctgttttcctttgcatccaggcagaggcggttctggtaactgccgtttttgtaatcgacgcagagaaccgtccattctgtattttcattctgcagcacagctgccgcttccgctgtcagccggtagatacttcccgcaccggcattttcttctgcaacagccgttccatttacagtgtccgttctatttgcgccagccgttccgcattccgccgccattgcatcgtactcgcgtcccatgccggtctggatctcgtcccactcttttccggagatttctttttcccaggtcacacctgctgccaggcgctccggttttatcaaaacactttcctccggccactcaatctgtatctggctttcgttcattcccagccggttccaggttcgggtcggaagaatgtttactatcatttctttctgtcccattgtttcctcctgtcgttaccattcatgcacttgcatgccccgcagcagaatctgttatttcaaaatccccgctgcaaacagtaaccatctattatccgatactgcctttcatctcaagctgaatcaggttgttcatctcaaccgcgtactcaagcggcagctccttcgatacatcatccgcaaatccgctgacgatcattgcgcgcgcgtcctcctcgctgatgccgcgtgacatcagatagaaaacagcctcgtcgctgatccgtccgatctttgcctcatggccgacgttcgcgtcgcgggtccggatatccatcgccgggaccgtatcggaacgtgaaatatcatccagcatcagggactggcaggaaaccgatgccttagaaccggatgcctgttttccaatctgcacgctgcttcggaacgtactgataccgccgtccttggaaatagatttcgtattaatataggaagaagtccgtttgcccgtgtggactaccttcgcaccggtatcgaggttctgaccttctccggcaaaagtaatgccggtaaattccattcttgaatcatcgccctttaagatactcatcgggtacagatacgatacatgggaaccaaaggaacccgatacccactcgatcgtgccgccctcttccacaatcgcgcgcttggtgttcaaattgtacatatttttcgaccagttctcgatcgtcgaatagcggagtttcgcatttttgccgacgtacagctcgacacagcccgcatgcaggtttgctacgttatatttcggcgcagaacagccctcgatgaaatgcagatatgccccctcatcaacgatgatcagagtatgttcaaactgtccggctcccggtgcattgagacgaaaataggactgaagcgggatcgtaaccgacacgccctttggcacgtacacaaaagatccgccggaccagaccgccccgtgcagcgctgcaaatttatgttcctgcggtttgaccagatgcataaaatgcgttcggatcatgtccgcatattcgccgtgcatcgcactctccagatcggtgtagacaacgccctgcgccgctacctctgcgcgcacgttatgatatactaactccgagtcatactgggcgcccacgcctgccagcgatttctgctccgcctgcgggattcccagacgttcaaaggtatctttgatgtccttcggaacctctgaccatttggcactcatcttggatttcggacggacataggttacgatgttatccatgtccagatcctcgatatccggtccccagttcggaacctgcagggaattgtaaatctgtaaggactgcagacggaactgctgcatccatgccgggtcatttttctccttagaaatcttctcaacgatctccggggtcagacccgcttttactttatatgcgtcattttctttgtcttttatatcgtagatgctgcgatctatgtcatctacatacgttttttctttcatgttcgatgcctccatattacccgtgctgattcgttattactgtcgcgttatcctgcggcactctcgattcccaaaatgcctgcctgcgaacagtaacgattagttccgggcgtctgccacacccgcctcacggataaaggattcgtagccttcctggttaatcttatcaactagggagccgtcaccggttgccacgatctttccatctaccatgatgtgcgtatagtcaacatgcagtgcatcgagaatccgggtgctgtgcgtgataataagaagcgcgccgttctggttcttctggtactcttccacacccttagaaaccagacggactgcatcaacatccagaccagagtctgtctcatcgaggattgccaggctcggatttaagagcatcagctgtaaaatctcagattttttcttctcaccaccagaaaagcccacgtttaagcttctctgtgcatacgattcatccatctggagaatgtccatcgcctttttgagctgtttatgaaattcccagatctttaagttcttgccagtctgctggcgcatcgcgctccgcaggaaactttccaacgaaagtcccggtacctccagcggctcctggaaggacaggaacataccggctttggaacgcttgtccgtggactcatgtgtgatgtcctcgcccttaaataagatctgaccgcccgtgatctgatatcgcgggtttcccatcaggacgtttccgagcgtcgatttgcccgcgccgttcggtcccatcaggacatgtacctctcctgcgccgacgctcaaatcaacgccgtgcaggatctctttttcttctatatttgcttttatctgatttacttctaacactttttctgccataaagcactccatttccgggaccggctgagacattcatgctcggtctgtctgaactgtgacagccgcctcgtcacgaaagcggttatccttcttagcaaacgtccatctctctggttccttttttctataatgaatctggctgttcagacggtcagattaccctatggctattataggtatttatttccggattgtaaaccctcatttttcacaaaacaagaaagattcttattatattattgagactttttctcgtttattattgagtcagcatcatccacccccaatacacaacccctaatccccacgaactcagaatcccatacaggatcaccggacccgcgattgtaaatattttgcatccgacaccaaacacctgtccttccgccttgtattccagcgccggggatgcaactgaattggcgaatccggtgatcggaaccagcacaccagccccaaaaacacgcgccagcctctggaatacatttgcccctgtcaggataacgctgagcagaatcagtcccagcatcgtccagagcgccgccactttctcctccatgcctgtctgaaccagacaatttgtgctgatctgcgccgccaggcagatcagcccgccggaaatgcccgccatcaacacatttttccatgtactgtggacgggcgtaaccgatttgacatatgcttcatattgatcttttctggcttccatggtttctcctctcttctactgtcttccaattccatgtaagaaataatacagcgaacccgcacatttccccgccgcaatcgcgagaaggagatatggcagccccactgccagacgcaggcggcggctcagcaccggcagggctttcaatgtctctgccagcgacatgacgaggcagcctacaaaaataccacaggaaagtcccgcagctgctagaagcagctgtccggagacatttccaagcatcaccagaaatccagcaccagctcccgttctgccaccgccttctgctgccttctgccacaactctgcctccggcattgccgctgaccacgctattctcaggaaactcgcggtcagctgtttcaccttctctgtaaataaatccaccacatttccaaacaatcctcccagcgcgataatcgtctcatacaagaagattttccccttcgacgccgtcgccgtctttccaatcaggcgcggataaacgccgatgaccaccagaaaggcgtagactcccgctgccaccgtgcttcccgccgccagccccgccagcaaaagcagcgcttctttaagaaacatcgatgtcatcctccttccgctcctcgttctgaatcagcgttttattgacattttcctcatacaggcgcatttctacctccagcggcgtcggatcgagactgaatttccaagaagtaaaatggttaaaaaacagcaaaatccccaccggaagcccgatcgaataaccgacctccaacgccgttgttccgtccgacgcctgccccgtcgtgatctcatatattttcctgaatacatccagcacgtttgcatcgttgttgaatgtcatgatcgcaaatgccgccccgaaaaagcaaatcaggcagacgaacagcgtcttgcaccattcccagacaagcgcctgacggcgcggcggctgataatgaatgacatagtccgtctcccccagattctgcaccgatgtccccggaatttcccgttcaatctgctggataatctccatgacgtttccaaccagacggctttcgcgctgtttcccgccgccgcggatcctcttcacgatcatcgcacgacagcggctttccacgcttttttcactgcaataaacttctcccaggcttgcaagcggtacatttttctcatgtacctgcgtgatctggctgagtttcagatagaccgtctgtgtcataatgctgccttctccgtctgtgcctccggtctcaaaaatgcctccgcgctgtccccggaatgctgtacgaaggttccgtcaatgtagacgctgtcccgccccactgccatcagacagagacagagcgctgccacaatcagaatcatgcatccgacccagatacagattcccatcttttttttcattgtcactttcacatttcccgtcatttttttccatccttcctgtgtattctggaaactccaaaagttcctgtatccagtagtatggctgtctttcaatggagtatgcacattcatatattctgaattatgagcctgtctttttttctcatgtttcttccagctttgcgcgcatctgccctaatattttccgctcgatccgcgacacctgtacttgtgaaatgccgagctgcgccgcgatctgagtctgtgtctgatcataaaaatagtgccgcacaatgatctcccgctgccgtccattgagcattttcagcaaatctcccaaaagcatccggtcaagcaggacctcattctccgctgtctccccagcaatccggtcctgaagcagaagaccagtttcttccccggcgctggctggtgcagagagcgattcaaccggactgtccgccgccatcgatgcggcagcttcctcacagctcactccaatctgcgccgccagctcttccagcgtcggctcccgcccaagcgccgtgcagagcgcttcccgcgctgcccggagccgctggttttgctctttgatggaacgactgaccttgatgatcccgtcatcccggagaaaacgtttgatctcccccgcaatcatcggcaccgcatacgtcgaaaaacgcacctcatatgataggtcaaacttatcaatcgccttcaacagcccgatacttccgatctgaaataagtcctccgtctcacacccccgccccgcaaagcggcggacgatgctccatacaagccccagattgtcttttaccagcgcctcccgcgccgttttatcgccctggtgtgcccgtttgatctgctcgatggttttatccatagaactccgccgtttctttttcttcctgttctttattcatatattcccttccaattcgctttttcatcgtcacacacgttccgcagcccaccttggactccacctcgacctcatccataaacgcttccataaacgaaaagcccatccctgagcgctcgccggtcgtgtctgtcgtatacatcggctccatcgccttttccacatccaggattccttttccctcatcccggaccgaaattatcagttcttctccctcaatccgcgcttctatgtaaataattccgatttcatcgctatacccatgaatcaccgcatttgtcaccgcctccgagaccgccgttttcacatcctccagctcttccatcgtcggattcatccggctcataaagactgccgctgtgacacgggcaaactcctcgttcgatgaatggctgtctatctccaggtgcatccacgtgccattcttctctgcttgtctctgttcattctgttcaaattttctgtattcttctgaattttttatttttttaggttttcctttcacttccgtttctgatacagatatatcatccgcatacatattcatctctcctttaatgtctcccatccagtgcctcctctctcgtccggtacgactgcaccaaacgatacacgccgccgatccgcaaaatccggcgcatccgctcgcctgccccgtacaccgccaccgtgccgctgctgccctccatctgcttataccggttgagaatcacaccgatcccggaactatccataaattccgtccccgaaaaatcaaaaataatccggttaatataattttccgccagaagcagatctgtttcatatttgagtgtcaggcagttatggtgatctacctccttcggcagatgaatcaccagcgccgaatcgatcgcttcgtatgtaaacatatttcgttccatatcaggattccccctttttcgattttttatgcagccttttcctatatacctaaaaagaatgtgctttggcacattctcgcaccgaacgcggtcgcttgcgacatgtttctgcttcgcgcgagtgtgcatcctcgcggagcgttttttgtttcataggacatgatttcctaggaaagcaaaaagcaccgtaaagtttttatctttacagtgcttttcttcttaattatctgccgtattatatttgtacttactgcgccgcttgcgtctccgctccgctgcctgctgccgtttcatccgccgcagtctctccctgactgatgatggactgacctggaactgcagcctgctggttatccggcgcaagctcggcgagctgctgtcttgccttgtccgcctgctcggaatccgcatactgggtcacaatctgcgtaaacatttcgaccgccttgtctgtctcgccctgtgcccggtaaatcatacccatgctgaagataaccttcgggtttgccggacggatcgccagacaggtctggtaatctgccagtgcttccgccatacggcctgccgaccacatcgtgtatgccagatcctccagcgtctggtagccatttgtctcgatgtcctgctttaccccgttggcaatggaaacgaccgtctcgtccgtaaataacgacggatcaaagccctcataataggtaaccgcctctgccaggttattgttgcggtatgcctgcagcattttgacgagcttcgcatactggttcagaacgctgtcattgctgttgagcatcgtatccagcttgttctccgcctcttctttatcctttttcgaggtctcaatgctctcatttaaactgtcaatctcttcatttttctgattgagctgctcgttgtactggagcatttcctgcgtatgtgcattatttgcctgcttaatcttggctggcatcaccaggaaaaagataactgccgcgcccaaaagcagtccagcgccgatattgagcactgactgcagtcccgtattctccttgtacgtcggcggcataatgacatcatcatcctgcatctggcggtgggaaaatgcgtttttcaactttctccgctcgatatccgccttgccggtatgttccttaacaatctccatataccagttcgccttgggattgtttttatcaatcttgagtaccttatacagggatttgcccgctttcgtataatcctcatgactaatatgcaaaagagccaacagaagatgtgcttttacaaatcttggattagcttctacaactcttgtaagctgtaaggtcgccagatcgtcgcttccggtctgcgcctgcagaagcgcctgattatatttctgaatcgtcgcgctcgcctgatccagacgatcctgcttgcgctgaatctggtctaaataataatcagcccggttatcctgctccttaaagttcatgctgataacccactgcaccagcgcctccgacacctcacccatctcataatagataagtccgagaagatttctggcatcaatatgatacttgttcaggttcaggcattttttcagatactcgaccgcccctgttaaatcccgtctctttgcccgttccagcccggcattgtaaaagctgttggaaatcaggcgaatttttcttgttcgatccatcatgtccgcctattccttcatatgttttaaaagttccatcataatatccgacatatctgtcaggtcactcttcacgatcgcctcgccgacctcctcgacctccagactcggtttaaaatgttcgatttcttcttcgaaattgattgtcattccttcgccactcatgtttttcctccagagtttcttcctttattacatggatatacattcccgctaatcttacaccattctggcggtgctgtcaaatccagttcgggaaatctttttctccagctctccaattaaatacaaagaacccacacagaagcaggtatcctccggacgtttttcctgaaccagtgtctgataagctgtttttacatctggtatactttgaacctcacagccatctgccacccggtgtgctgctttttccatcgcctccatcgaaagtgcccgcgatgtatataaatgagtcagcaccaatcgatccggcttcagtttccgcatcagtgtttccagcatcgattcataatttttatctgaaacggctgcaaacagcagaaaaatccgaccatctttcccggactcttctcttctgcgcgctgccacctctgccgccgcgcccacaaacgcacggattccgccctcattgtgagcgccatccagataaactccgtcctggatctcctccatgcgtccgtgccataccgcattccggatgcccgctgccgctgtctccccgtccactgcaagaagccgtgccgcctggtaagcgatgcaggcgttgaccgcctgatattccgcttcgaagggaataaacagacgctggcttttctcttttatcatcaggctcatcccgccatgtccccgccgaagatccgtatacacttccgggctgatcggatatgccggacaggaaagttgcgacgcccgatttctgataactgctgaagcctccgcatccgtatcatcgtacaccaccggcatattttttttcagaattcccgccttttcgcccgcgatctgtgtcaccgtgccgcccaggtattccatatggtcaaggctgatcgaagtgataaccgtaagcgctggatgctcgatgcagttcgttgcatccagccgtccgccaagccccgtttccagaatcacatactccggctttttccggcgcaccatccacatgaacatcaaaaacagatattcaaaatacgtcggatgccccagtccttcctgctcaaaatgagcatatgatgccttaaccgcctcaaacgcctccaggaacagtgcatcgtctgcttcctgtccatcaaaagaaaaacgctccgtcacgcgcaccagatgaggagacgtaaaccgcgccgtccgcttcccggctttctgcaaaaccgcatcgagaaacgagcagaccgacccttttccatttgttccggccacatgtacgattctttcctcctgcggcaatgcattcaggtatgaaagcatcctgcgaagcccctccgccgtatgtttttcactggtaaatttcggtatctcattcagatatgcatctgccgcttctaccgtccattcttcttgtctcatggcatgaaatatcctttcctggaaaacggaagcggcagtacgaactctgccgtctgccgccttgtcttttgtatgttattattttatatcatttgcggagatcatgcaagtggttatatggaataaagactgtaccgttactgttcacagatagggattttctgaactggaatttccgtgcgacacagttctgattgcatattttaccaatttaaaatgtgaagcatcggcaaaatccaaggtatttccaattatacaagaaacccctcttgataatcaagaggggttccactcatcagctccctgccggacttgaaccggcgacctacgcattacgaacgagaagaaaagtctttccatgctctgtaaaaagtcttgaaaccattgatttataagggtttttcgaatcccattttctctatctttttctaactttcggggactttttacgatttcagtccccaaacagtccctaagaaacatcactctaccagatgcagcgcggcgcgctcggtgctgcttgtccatgtcctctgaaagcgttccacgccatttcctcgcagtccatcgccgtatatttcttcgtactctggcagaaaccgcgccaggcgctcccgatagtaccagctccgcagccgccggatcgccttgctctgctttgtccgtgcctctgatgccgtcagaccgcacagccgccccgcctcttccagcgtggcgctatattggtacctcgcccggatgatcgccgcctgcttcggctccagctcatccacacacgcccacacctcccggctgcattcctcgcgctggatccgctctattacatcctcttccagactttcagcagatgcaaccagttcgcccgctgtggcatcctctgaaccatcgcgccctgttacaggtgcttccagacttcgcagattcatcatacaggcgttttcccgaagtccctcgacctgttcaagggtaagacccataaagcggcaaatctcggcatctgacgcatcacaaccatgttttctgtaatattcggcttgatatttctgcatcttctgaatctgttccaggcaatgcaccgggagccgcacacaaccgccgctgttctgcagatagcgccgcattgcctgccggatccaaggtgctgcataggtaaggaacttacagcctgcatccggatcgaagttgtctatagccggatacaatgtaagatagccctcttgctctaaatcttccatttctccgctgtcccggtactgccaggcaatcgaccgaataaagttttttacctgtccatacagaagcgccatgttgtttcccacatcctccccggcctggatccggatcacaatttcctcgttcgtcatgtccttacccctctttgttatttatcccattttcctgcaatccagcgccccagccaaaccccaagtacgatcgcaagcaccttcagaatctcatccactctcttttcctcctttcatccggcgatcaacgtattctttcccgtactcttccaccgcgtaatcatagccgtaaatattcagctctacatcaaacatatcttctatttcgcagcgctgcaggcgattaaatctcctttcaaggctttctatcctatccattgccctctccttcctcgctctctctgataagccgttcaagctcatcaatccggcgtttctgttcgtctgtgcgaatggatgacagaaccgcattacagccaactatgattgtatttccggtcttgctgtccatttctccgttcgcgaccatgttgattacccgtgatatagtccggcgcacctccgttgcactgtttgtccgtaatcttatttttcccatctaccacctcacataaaaaaagcgccccgaacaatccaacaggaaagcccgaagcgctcttttattattccggctgtgcctgataataaatagcctttgttttattatccagcacaaacgcatcatagacgatatgcccctctaccagatcgccactgattcccggcggatcctggtggattttatagtcagccagtttggttggtgctaccgtcgcggatggatgagccagcatgaaaccgaagtgttccggaagtcttaccgccggcaccttgatcacgttcgtgccgtcaaggttggcaattacgccgcggatccttaaatcgttcccgatctccgtttccattgtgatatccttacaacgcttcataagctggtacacttccgggctgacaacaagctgtctgtcagtctccggcacttcctcatcatccagcgccttgctcgctttcagaatctccgtatagatattttcagcggtaagcgctaccgcatccggtttattgcccgctttcgttgccatcgctttatatgtgtatgcgtccacttccggaatcactacctcacggagctgtctggcaagtgcctttgccgctgtgagctgctgatttgtttcgtcctcatccagtttatcaatcgtgaatgtgaacgaacgatctcttgtcatttcaaaactttctgtagtggcgtcaaggtcttttgctgttccgtatctggatgccgcatagtcagaaaccggatggcggacataatcgttcatttccgcggtactgattttataaattttgacaatgcgggcacctacgaaatcaaagtcctggttcgtaagcagtgaaattttactttctgccttaaatttttcgtccgtatacggggcgaactttgttactaaatcaatcgacattcattaactcctttcagtctaagccgaaagcctttcgaatatccgcctcctcgccatctttgagagcgcccggagtaacgcccaccacccgcgggatcggtgctgcgttcggcgcctggatctgcatcgctgccagtttcccgacattctccatgaacgtttcagcgtttgatgtatcaaggatatctaacaattctttcggatatcctgcttccgtcagcttttcagcacatttcattctattttctcgccgggtaagatccaattctctttcctcgatagtctgcccggtgcctcttctttctctcgctaatctgtcctgaacgattctattcacttcttcctgtgtgaacgtcttcggttctgtgctatcccccgctgtctgctgggtgttgtttccctctgtctgagtgttagtgttattttccattccatttcctttcccgttttacgcccggtgggctattttaagcaaacaaaaaggcgcagaaacaacttcgttcatttctgaactaagctattcccgcgccattctatcaaaggcttccacagtttggagagtaaacaggcacacacattttttctgtggggtactatcaatgttttgtttgctatgtctattataccataatagggggatatattcaagaaaaccattgattttacaaaggattccggctgtttttcaagccatttcaaagaaaaaacaggggataggctaccttttccaagtgcccagtcccctgccaaaatcttattccattgtcacatatgcctttaagaatctgccgtcctgcttccgagctacctttaaattcttcacattcggcgccagccttttgagaacctcctgcagctcctccggccgctcataggatatttttatctttatcatgctttccctcctttaccatcgcggtttccgaccctatttcacgaagcagaacgccagcgcaaacagaaaattgataaacaacgatgctttcagaaactcccatgtcattctttcattcattcctatacctccaatggggtcgcgtttcgctactccatttattcctccaagggtgtcacatatcgttacttcccgcactatcgcagcggtcagcggttcagtctgattaaatctatgtaaagccgtctgtactttcggacatttttgtctaaaagccgtcccacattcccaatttgggaagcagcttgaaatgtcggaaaatccgactttaaaaaaaacagttcgttattgagtttctaaactccgccgctttcgcctcgcccgttcttcccggactccatgcacaaaacctaaattgtaaaataaacttgcatcaaaggcattacaaaagcgctcgtttttatccgtccatcttttccgcattgcctcgtacaaatcccccagttctgtcccctttatgaataccacgttttgataccgtgaaatatttacatcccgttctatgcgcgttctatacgctgctttctgccgcttccttgacatcctatccacccgatccagataccgaagcaacgcgcgaatcttttcgtttccatgctccgccacctcgcggcgctgccaatattccagcgaaaaatacatctgtatcaattcggcaagctttcccgcctgcgccatatccgcagttataagcagcgtatttctcttgtcataaataataaatttcccggttttgtctataattttcacattcattctcttgtcctttccgccgggctgtggtattatattccatagctttgattatattcttttgtttcacagctccggctgtaagccttgcccttatggatgcgccaacatcctaagggctttttttattttactttttcaatcgttcgtacaaagccgcccgcttccgctggtactcttctgaatccgtatagccagtgttcttctttgctgtctgcctgtcaccgatgcaaggcgttatagctgaatctgccgtcctctcttccagcttctccggctctgctgaacgctgcaaagcttccagcgctgcctttggtatcgcctgccgtttctgttcccgctctaaaacaatcttgtaatcattcataaagtccctgcgggcgaatgcttcggcacccggatcctccgcctttccccaggtaagcaacagaccgaacggaaccgttttccgtgtcagctccggaagagcgttgtaatcttcctgtgttgccacacttgcccggcaaacaatctttttccatacttcgccccatgcttctgctgctaactcgtccaggttgcctatatttccccggattctggcaataatctgccccggcttcggctcatactgatgatcctgtgacatatacgcccgaataccggcttgcacctgctcaaaggtataatcttgaagaatatcccggtaaatggccgctttctgctctatctcttccggtgtagaatctcggtaactctctttgtaagccgtctgaaagagtccgataattttaaaagcctgttcccgtgtaatcattttcactacctccacttatctgtttctgtatgtaatcgaacgcattaaaagccgcccctttctggctgcttcctctctggtaactgccgcccttgtcctgttcccttttaagccaattagtgataaaacgcactaccccgtttcgggtttttcgccttgtcgggttcgcatccgcccacgcttccatgttccggatctcctgttccacatccacagccggataggattctttccagaaattcagcttttcaagcgggatttcataaaagctcttatcaagcaagataatcttgtagccacttggaaccggttctacttctattgtctccgactttttatcagtttttggcggcggctggcgttgaggtgtctctgacagctctacgcagtatatactctttatcttactcttatctttatctttctcttgatctatatctttatctatatctttatctatatctacgttacattgtgtgccgtccgcgttacactccgttacatccgcgttacattgtaacgcctgccgctctctgaatcttcgaacccgttcggctgatacgctttcagaaccaaccaactccaacgcctccggcaatataaaaccgtgctccgttcgttccagtttcttgtttgcctccagaaaagtgagtgttttctttaccgcttccgcgtcctcgcctatttcctcagctatttcatcttctacggaatcataaaccccttgaaagatgatctccgcgtccttatcgatacagtaaagcagcaacttcaaataaatcagctgcatttctgccccgtccggctgcttcctcattttcttctggatcagctgcccgaagtagtcacttggtagcttcatccagtaaaagcgtctatttgccatcgttcgccctttctcctgctgcctgctccggctcttcgccgttcaactgactttcagacaggtaatattcatagccgcccgcatcttccagtatgtagccgcctgctgccagcttccagaagcgtacagcatccagcgtatcattcggcagattcgcaaagcgacttttcatgagccactgacggagcgccgcccgccgtgctgttatctgctccgctgtcatttgtatcgccttgaagtctaaacggccttgtttcttcacacgtagcgccataagatcaactatctgcatcttaccgcctccgctccgttctgaacacgcccaagcgctccatttcgtagtgaatgctgtttagcttctgcaaaaacatcctagaagcacgttctaaatcgccctcattcccggacaaaagcgggacaacctcccacagccaacaataggccgctttcaagtcctctttccgctgctccgtccctgtgatgcctagatcgcgcgtcttaacgttgcacacgatactttccggcgatacttccggagcgcccgcccaagctccaacaatgttcacagcctggcagaagtcccgcatctggtcgtattccgggcagtcctcaaccttgccacattcgacatactgccgccggaattccggtataagccatgattctgcagattgccacattttctcataaagctgttcattcataacctcgcccccttactgtctcggatcgccgttgttaagatattcaaccagcttttcaaagttaatcagataccggcatcccgccgtgatatacacgatcttcttttccaagcataagcaccgcaaccggttataggaaattccggttttttcagatgcttctttgattgttaccatcgttggtactgtcatagttctgttttctcctttctgatgccctctgtgcatcccagacgccccagcccggatcgtcttgttaatcttcgataatttcggttacatccacgcccagagcgcgggcaatagtgtccgccgtccttttgctgcagctttttccgccttttactgccgttatagtactccttgacaaacctgacttttttgctaaatcaattagtttcaaatctgcatccatcaatgcaataacaaatttttttctatcaattctcgccattttttctctcctttctcaatcatttgctttaattaaaacacaatcatctgctttagtcaagtcattttatcaatcttttgctttcttttttgttttcatcatgttattattaatttatcccaaaacaggcaggaggtttatgtaatgacattcggcgatactctccgcgatttaagacagcaacgaggcatgacccaaaaggaactcggaaatacactaggggtttcagcgcagatgattgcacaatacgaaaacgggaaacgaaagccaaaactaggaacattgcagcaaatagccgctagtttaaatgtacctaccgactattttataaatagatatgacggctttcagctcacagatgttgaattaaataatagaacaagaggctcttttgaaaatttactcacgttgtatagaaatgctcgagacaacctaaaagaagaggttatttttttaactgcagaaatacaagacttagacgagcgtattgaaaaacttgaaaaaaagcttcgagaaaaaccagatacaaccgatccggatcacaaataaatctgaccgaacgaatcgttctgcacttcctctgtttgtcccagacgccccagcccggcaggaacaaaaaggagagtaaacgatggcatcaattaaaaaaacaggcgaaaacgcctatcaaatcgttgtgagctgtggatataacagcatcggcaagaagatccgccggaaaatcacttacaagccggagctgttgacggctaagggaaacccaaaaagcgcggcatctatcgaaaaagacgttgccgcctttgccgccgattttgagcgcaaggtattaacaggtcagtacacagacgggcatattatgacgtttgagaaatacgccgccaaatatctggcagaatacgccgaagagaaccaggcaccgcggacgcttcaatctacagaatcagctatcaaggaatttataagcgcgttcgggtatatgacattggaaaacctcacgccgctctatttacaggaatatgtgaatgcgctgttgaaacgtaaaaaggcagacggatccggggaaacactttcatgcggtaccgtcaagcgcaaggctgctgttctgtccgccatgctctcgcaggctatccgctggaatcttctatccgcgaacccgatggagcgcgtacagataaaagcaccagacacaccgaaggatgagaagatcgtgttcttctcacagccggaagccgaacgcttccttgaagccctggagaatcccgcctattacaccgcatccggtaggctggcgcgaccactcgacaccacagcgcagcgcctcgatgatctccgggcgaaccggcgcagcatgacacaatataaatttctcttttatctggcaatctttaccggctgcaggcgtggggaacttgtcgccctcacatgggacgatctggactttacgaacgcgactatcagcatagtgaaaagcgtttgccgtgtaaagaaaaaaatcatcataaagagtaccaaaacgaaaaaatctgcccgcactatctcacttccggagatcgttatctcccttgcacaggaatggaagaaggaacaggaatattacaggctttcgattggctcccaatggaaaaacggcggatatatctttacccgctggaatggggaaatgatggggcttgaaacaccttaccagattttacaccgtgttataaacaattacaacgccacgcaggcagacgaaagcgccctgctgccgcttattcctctgcacggactccggcacaccgccgccactctgctgatcggctcaaacgtcaacatccgcacggttgcaagccgtctaggacattctgacgtaacaacaacactaaatatttacagtcacgccttgaaagaactagatcgaaaagcctctgacgctctggctgataccttatccaaaaaggctaatacaaaaaattcagtccccgaatagtccccaaaaacacaaaaagccgcccttttcggacggcattttttatatccagatacaagaaaaacccttgatttacaagggtttccactcatcagctccctgccggacttgaaccggcgacctacgcattacgaatgcgtcgctctaccaactgagccaaggaagcattttaatttgaaaaatgctctggaaaacccaaagcaactttcgatgacctgtccgggaatcgaacccgggtttacgccgtgagagggcgtcgtcttgaccgcttgaccaacaggccgtatgttttataatagaatcgaggcgacgtgattcgaacacgcgacctctgcgtcccgaacgcagcgctctaccaaactgagccacgcctcgattacatgacgtagtataatataaattcaggagaatgtcaacactttttttgaagaatttttaaaaatatttattatgtttaatatttcgctatagttgcttgtgtttgctcaattcaataaatttatatttacttcatcagcttctgaatcgtcttgcacagctcctcaaccgcttcttccccatttcccgcctctatatcatcgaccacacaggttttgatatggttggacagcaggactttggaaaaactgttcagcgccgcctgaaccgctgatacctggtttaatatatcgacgcagtatcgctcgtcttccaccatcgccttcacaccgcgcacctgtccctcgatccggtttaaacgtttcagcagatctttttcttcggtcagatttctgtgtttgtggcgttccgtctctcctccctgacagacctgcgcttgtgattcacatttacaacagcccatgcttttctcctatcttttatcaaaatgctgcgaaatggcatattaattccaccatttcgcagcttttttcatcctactgaatcgagtccaccttataatcctgtgcctcaaccgcctctttcaacgtatcgtccgccacatccgcactcatgcttacgaccgcggttcctttctcatggctgacctctgcgctctccacgcctgccagtgcctccaacgccttctttacgcgtgcctcacagtgtccacacatcattccttcgatattcattgtctttgtcatcgttattccctccatatttatatgatttttttgattctcacttttttgcatttcttttgaaacagtttcattttcatttgctgtttgcccaattgaccgggtgtcttctgcccccgtcctaactgcacctgcgttttctgctttatctccacctttattagcagccttctcagccctcttccgcatcggatgatccttcgatgcatcgtgcatcttaaacagattcagccgcagcgcgttcgtcactacgcagaagctggataagctcatcgctgcagcgccgaacatcggatttaatttccatccaaagataggataccacaaaccggctgcaagtggaatacccacaacattgtaaaagaatgcccagaacaggttttcgtgaatatttcgaagcgtcgcacggcttagacggattgccgccggaacatcactcaaacggctcttcatcagcaccacatccgcggcatcaatcgcgatatctgtaccagctccgatcgcgatacctatatcggcacgcgtgagcgccggggcatcattgataccatcaccgaccattgccaccttaccctgttctttcaggctgcggatgacactctctttcccatccggaagtactccggcaatgacttcatccacaccagcctgtgccccaatcgcacgggcggtccgctcattatccccggtcagcatgaccacacggattcccatgttctgcagttccttgaccgcctgcgggctgtcttccttgatgacatctgccacggcaatcataccagccagacgaccatttttcataaagcacagcggtgtcttgccttccgatgccaaacgctcaaaggatgcctgttcctgtgcggacaccgtcgtatgtccgctgatataggaaaagcttccgcctgccagtgaagcgccgtctaacgtaccagaaagtccatttcccggcagcgcctggaaatcagccgcctccggcgcatccacctgctgttcttttgcatagagaagaacagctttcgccaatgggtgctcactcttcttttccagggaaagcgccaggcttaccagctccttctcagtcacacctccggacgggatgacgtcggtcacacgcggctcgccgctggtgatcgtacccgtcttatcaagcgctacaatgtccatttttccggtttcttccagtgaaacagctgtcttgaacaagattccgtttttcgcgcccatgccgttgccgaccataatcgcaaccggcgtagccagtcccagtgcacacgggcaactgataaccagtacggaaatacctctcgccagtgcgaatccaaacgtctgtcctgccagcagccagacaatcgttgtcaccactgcgatcgtgataaccgccgggacaaacacgccggaaacccggtctgcaatcttcgcaatcggcgctttcgtcgccgccgcgtcgctgaccatgcggatgatctgcgacagggaggtatcttcaccgactctcgtcgcctcacagcgcagataaccagactggttgaccgttgccgccgaaaccgggtcaccctgtgccttatccaccggaatactctcgccggtcagtgctgcctcgttgaccgcgctcgttccttccaggaccacgccgtccaccgggatattttcacctgggcgtacaacaaatacatcacccttctttacctcttcaatcagaacctttgtttccactccatcccggatgataacagctgtcttcggtgccagtttcatcagtccctttaaggcatccgtcgtttttcccttggaacgcgcctccagcatttttccgactgtgatcagcgccagaatcattgccgccgactcaaagtaaaattcatgcatgtaggacatgactgccgtgtcgttgccctttaactgtgcgtccgtcatcgcaaacaacgcatatgtgctgtaaataaacgacgcgccagagccaagtgctaccaacgtgtccatgttcggggcgcggtgtaaaagtcccttgaaaccactgataaagaatttctggttaatcaccatgataattccggccaaaaggagctgcaaaagtcccatcgccacatggttgccatccataaagtgcggcagcggccagccccacatcatatgtcccatcgacatatacataaggactgctaagaatcccatcgatgcgatcagacggtgttttaaaaccggcgtctcccgatcttttaaggcgtcctctgcctccgacgcgctctgcgcctgcgctgcagtgccctgtcctttcagggatgcgccatatccggcatcttccaccgcatgaatcacggtctccgggggcacatcgccctcgacgcccatcgaatttgtcagcaggctgaccgagcatgccgtgacacccggcactttcgatactgccttttcaacccggctgctgcatgccgcgcagctcatgccggttactgtatattgcttcatggtctcctcctatctcttaactgtccttataatatacccccacagggtatatgtcaaccccaatttcatttataatctgtaacggttcagtatcttcacagtcacgcgcaaaaagaccctgtccggagaatttccccttacagagtcttttatacattcgcatctatgccgccctttggcgggcatagacattattccatttttatctgtgcatcatccaaacagcacgcccagcacgccgtaggacagaatcgacataatcaccgtcgccagcgcgataccgactaaaatcgcgccaaatgccttgccaaatttcatgtgaagcagggatgccaccagtgcgcctgtccatgcgccggttcccggaagcgggatgccgacaaagagcatcagcccccagaactcatatttctcgatctgcccttttttgctcatcgctttgcgttccagccagagcgcaataccacggaaacacggaaccctcttcatccactccagcacatggcggatcagaagcaggataaacgggatcggaaggatatttcccacgatacagatcgggatcgcccgcaggatcggcacatttaagagtgccggtgacgcagccagaagcccgcctcgaagttccagaatcggaatcatcgagataatgaagataattgcctccttcgatatgactccggataaattagctgtaaaccattgtaccagtgaatccataaattatgcctgctccccgctgttattttcattctgtgccgcagtatcggtggtgttctccgaaacagagtccgaagcatccgcgtctgggccagccgtgccttctgtttctgcgttgtcaaccgccttatctgctgcagcttcatccttctcttcaaagatagtctcctgcatctcctccagttcttccggctcatgcacatctgcagatgtcgtcgaatccatcggcgcaccgcaccggctgcagaatgccgcatttttctccacctttgcgccgcactccgcgcagactcttgtgccctctaactcggcaatctcatcctccagggacgcaatcttcacaagcccagcctggatagtgtggaactcatctgcaaatttcccttccagctcgccctcatgtctgtcatagtatgcttttcccagtgtgatatatgccttattaatcttatctttctcggcggacaacttcgatttcagctgtaatacgcctgtaatgtcctttacccggttcgcagcttccttgctcttatcgctgatcacctttccaagttcatcgaaaaatgccatatttcttcctcctctgcgggatatgtacgcctcaaattttgttctgcctgatgggacagcgcatcgctgttctaaatccaaaggcaggttcatgcaaaaccaaagcgtctgatattttctcataacgattcagccggtttttgcatcaaatacataaaccggctgaaccgctacgtttccctttattttagcccctacgggggagaaagtcaatcttttgcatccctgaatcaactccaggcagcttttttaatacgcaaacacccggttcagccgcatcaattccggtgtcaggccgaaggtcgatttcacaaactccggaaccttgccatagcggaatgagcgctggtagatgccatactgacccgattcatccatttcatagtccgccgcatattccccatcatacagggcattctgaccggcatccaccgtatatgtctgacctatctcattttcctccattgaatttaccgaatccctcaaatcatcctctgaaactgcccctgtgtcctctgtactggacacatatactgcaatattgatcccctgatatgcctccgccatttgattgatctgcaccatatcatccgaagcggagtttgcaagaatttctgcaatctgttccggatctgtaatcgttacctcgcgtctgctgtcattctgaagatactcccgctggcgttttccaagctctgtatctgccggtgccagctgatcctccggaatcttgccgccctgatactgaagcacgattttttctgtgttttccggtgtcaccttgctgccgacctcggtaccacactgttccagaatcgcgatcgtctcctggaaggacggataaatcggataataatcaaactggttaaatgtgtcataatagccgccatttttacgaatcacatcaatcatcgcctgcatctcatttgtcttaaactgaatctccgcgatcggcatctcctcccggcgcatatccggcgtcagagccatcagctctttctggtatgcagcaagaagtgccgccttcgtctgctcatccggaagcttcacatggctgcagtcctcttcctctttgtaattgatgcctgcggcatcgtctgcctgtagggacagcaccgggtacattcccagtctatagctctgattttcataaatggaatctagctgttcccgcagctccgatacattgatcgtgcggtaattacggtaaacggtttttccattgtttagatgccaggacagcacgatcgaatcatagcgtgaatccagatccgcctcactcatccaatcctgtccgccgttcaaatgcttccgctgtctggaagctgtctcgatgccctgcgcgccaatttcccgcaggacacggattccatcctcatccgagatctgcattttatctgccacatctccctgggacgcccattccattccaacactgtagccatccctatacattctcggagtcacatggtaagcccctgccgcattgttgtccagcgcatcacagtaaatacccgcgtatgcaaccttgtcagcatccggcagatagctgtcatatcctgccacatccaggcggaaccctaagaaaatggctgccactgccaccgcactgatgacaagctgtctcttatgcgcaaacaagctcttaaaatcgaaatgatagataatttcgatcaggcagctggtgatgagcagtccgcagatcaagccaaacacggtccagatatcatcattcaggattgaccggaaaatcattccggaaaacagcgtgatcggcacaaccagaaggaaacggatcaccggctcacttaccttaaatgccatcgctcttccagccgcctcagacgggcgtttccggtacaggaacattcccagaccaaagagcagggctgccactgccaatgcaatgactgccatccgggtgggatgatccgaaccagttgccgtgccgtaccagaaaaccggtgaggtccgctcgcaccagcgcagcagaaaattgccattgtcataaaacgtcatgaagtattcggaaaaatacgtcgataccactgcagccacacccggtccccagctaaaaagcacgccggttcccagtaaacccacgatcagattgcctgtcagaatcactgccagcacaaccgtcatgtacaccagtgtaaaaaagcacatatgctgtacatacccaatcagcagggttccccatgaaaatggtgcgccctttacctgcagcatcactcctgccgccagcagaaataccagatacgggactgccagatacaggataccgtccaggcaggtcacagtataaagcatttcacggctgatcggaaggctgtgaaaaaaatccgttttctttttcgaatggagatacgaaaaaccggacgctgccagcaccaccgccgtcacaatcaggataaataccagcattgcattctggatcgaatacatatgcagcatctcattggtcagctttaattttgcttctgctaacgccacttcgacgctcagttctttagacaagttatccggacgcagcattatgctggtttccagcgctgtcaggaccggaaacagaaagaagcacaaaagtgcggtaagcgccacgctccagagacgctgcttcgtattttctctcatatatttaaaaaacaagccttttgatgtcataaccagccacctccgtttcactgataaagatctcttccagggaaagcggtatcatttcaaaaaacaccggatgatacgcctgtaaaattgtctgaatctcctcccgttttccgcgcacagtaagcgtcaggagacttcccctctgttccgtctttataatatcgattccctgcaaatcgctgctccccactcccgccggaagcacacactgaatcttgtgaatatttaacttcatatcgtccagatcttttgagagaagcattcctcccttgtgaagcagacccacatggtcgcagatatcttccagctcccgcagattatgggaggcgatgaccggcgtgaggttccgctcgtcgatatcattggcaaaaagactcttgaccgtctgccgcatgactggatccagcccgtcaaacgtctcgtcgcagaacagataatcggttcccgcgcaaatgcccagcagcacagcgagctgttttttcatacccttcgaaaaggtctgcaccttccgccggctttccagttcaaaattctttagcagtttatcaaaccgggctgcatcaaacttcggataaattccctgataaaacaccttcatatcttccgccgttccattgcttaagaaatacggctcatccgggatataaaagcatcgtgcctttacctttgtattctcaaatactgtctcatcatcaaccgtaatgctcccttcgtccggctttaaaataccggctgccatccgcaaaaaggtactttttccggcgccgttagttccgatcagaccaaagacacttccattgtgaatctccgcatggatatgatcgactgccactgtatcataaaaacgcttcgtcagattctcagcctttatcattcctgtttcctccttcctcacttccatagctctggatgacctgctcctggaactccagcatcgtgatgccggttccttttgcatcccggatcagaagttccagctgatcccagatctcctgccgcttcctctcccgaatctgccggttatccgccacaaaactgcccctgcccttaaccgaataaatatatccctggcgttccagctctgcatacgcccgctggatcgtattcggattcatcgacagctccgttgccagactccgcacggatggaagctgactgtcctgctccaaaatcccccggaccatcagatccgacagcttctcaacaatctgctcatagagaggtcgtcgatctttataatcaatcagaatcatgctcacattctcctttcctccattctgccctgtatcaaaaatcataagtgtattagttcatttaatacagttatagtatacaaaaagggcagccgattgtcaaccgactgccctcttacgattttcttaacaaccttttcggttatatccgaatagaaacaaacttctacaatcaaagattgattactgagcctgtgtctcctcagctgcctcagtctcttctgcttcagcctcagtctcctcagctgcctcagtctcttcctcagatgcctcttcggtctcttcctcggaaacttcctcagtctcttctgtttcagcctcggtctcctcagctgcctcagtctcttctgcctctacagtctcctctgctgctgcagttgtctcctctgctttgctgccgcaagcggtcagagcagatgctgctaccattgcactcataactaagattgctgctgtttttgtaagattctttctcataattattctctcctctttaaaacatacgatttatgttttcttgtacctcatcggtacgtgacctataataaaaacaaattatgtccaaaatatgaacagataattaacattcactaaataaatcccgtatttcttacaaaaatcgaaagttttcgtaagaaaagtccttgtttctgttgactttacattgttttttaaggtctttaaatcttaatatatatgcagcagttttctcgtttcaatgctgtttttttccgatttccggcttatttttattcttttttcgtttctttatgaacaaggttctcgattttgtgtttacgatttgttcacaatttagccaaatttgaacggttggaaccgaactgaaattccgtcatatatttccggtagcgaagcggcagatgcatccgctgacaggctggattttcccgctccttaattcctatctgatgaaaaaatgcactccagagcgccgcatattcgctctgatcggttctcccggaaagcgcctgcaggggttctgtctcagccccacgcatcatataccaccgcccctttcctgtccagactcccgcttcctggtgatttttatcatagataataaatggttccgagggcaggcgatctgtaaaatacggcatcagcaatgccgtcacccggtttttcggaccaatctcagaaaatagtacatgatcggaatattctgcaaaccgcagaaattctgtctgcaaatgcgcttcattggcaaccgcacggttgatctgaaagactgtctgcaccgccggtatctgtaaattttccgtgatacgtctccctgctgcccctgcgctaaacccacagaccagaaagcggtagaccgcctctgcccgatcctcccgctcactcagcgccgtgcggtaaatccagctgtacgccagttctgacagggatcgacgcaccgagcgcacgactttctgtgccttgagccgatccaccgccacctctcggtactccgaaaacaggctgtaattatattcgccctgtacttccagccgcacgttctcatgccctaagcggctgttccaggcatcatatactcctgtgaatataccttctggactgtcttcgcatacaaatacaaccatttttctctcctccgtctgcttcatgcctgcgccatatgaaaatcatcaaacagcgacatctggcggtacagcccgctctgtgacaactgccactgctttcgcttctcttcactgattagctgtgccgcgatcgcatcctcatggatctgcaccgggtacatcatccgccctgaacaggtaatgaagtatactgcccgcttcagcacaactcccatcttcttcaaatcttcaaaccgaagcgccacctgttttctcgttgcgacaatccgcatcgcagactttaccccgatgcccggaacacgcagaagtgtctcatacggtgcccggtttatctccaccggaaactcacccagattctgcagcgcccagtcgcacttcggatccagaaacacattaaaattagggtgcttttcactcagaagttccgatgcccggaagccgtagtagcgcatcagccagtccgcctggtacagacggtgttcccgcagaagcggcggtccgtccggaagatccggaagcaggctgtcctcattcaccttgataaacgccgaataaaagaccctctttaatccaaaattccgatacagcgcttccgcgaccgcaaccatctgataatcactctccagagtcgccccgacaatgagctgtgtgctctgaccgccggggacgaaataattcttgcggtttgagatatttcccagtccgaaactgccatagatcgatcgtcctgggatgacacgggggatctccggtgtatgtgtccttccaaccctttcatccatttcccccggctctttcgacctcataaatccttttaccttgtctccattccgcccccaatccatctttgtctctgtctgattcggactcagaattcccttatcagcctgcagacattccctttccccttttcctatcgctttaccaccaattccatatctcccgtctcccggaatctgaatttctccgcgctctttctgcggaagccatgcccctctgctctccagacgcccttcctgctccagctgtctcgcgatcccagtctggatctggcgcatcgggcgcagtatcttgtcccgcgtctttcccggtgccaggcgcgccagaccatcagccgtcggaagctccagattcacactcatccggtccgccagaaagcccactctctcaatcagctccggatctgcccccggaattgctttcacatggatgtaaccgttaaatcgatggacgcgccgaaggcggtacaaggtctgatacagcagttccatcgtgtgatccggtgtctccagcacaccggaacttaaaaacaatccttctatatagttgcgccggtaaaattccatcgtcagacggcagacctcctccggcgtaaaggaggtacggaccgtgtcattgctccgacggttgacacagtaatgacagtcatagatgcactggttcgtaaataaaattttcagcagggagatacagcgcccatccgaggcaaaactgtggcagatgccgtccacccggctgtttccaagaaagccttcctttccctttctacccacgccgctggaggtgcaggcggcgtcatacttcgccgcatccgataaaattcttaacttttcttcgattgaaagattttcctgtatcagcatgaggttctgcctcctcccgtttctcgaacatccgttctgtatttatcatatcacaccctctttttaaatgcaagctgtttttcgaacacacattctatcatcacgcacactgtatccgagtctttccaattctacgcaaagcattgttaaacttcctcttaaaatataatttcgataacacatgacaatatttccgattgttttcctcgcaagccgcgtttataataaagaaagattgaaggtatagaataaattattcttataggtaggatgaaggaggagtttacaatggctattttagttactggaggcgccggttacatcggcagtcatacctgcatcgaacttttaaacgccggatatgaggttgttgtcatggacaacctttacaatgccagtgaggaagcgctgcgccgcgtggagaaaatcaccggcaagcatgtaaccttttacaaggcagatatgctggatcgcgaggcagtcaatgagatttttgagaaagaatccatcgattcggtcattcattttgcaggcttaaaggcagtcggggaatccgttgcgaagccactggaatattaccacaacaatatcaccggaaccctgattctctgcgacgtaatgcgcaatcatggcgtcaagaaaatcattttcagctcctccgctactgtatacggagatccggcattcgtcccgatcaccgaagaatgcccgaaaggcaaaatcacaaacccttacggtcagacaaagggaatgcttgagcagattttaactgacctgcacgtggcagatccggaatggaatgtcgttctgctccgctacttcaacccaatcggtgcacacaagagcggtctgatcggcgaggatccgaagggaatcccgaacaacctggttccttatatcgcacaggttgctgtcggcaagctgaaatgcctaggtgttttcggcaatgattacccgactccggacggaaccggtgtgcgcgattacatccacgtagttgaccttgcagtcggtcatgtaaaagcactccagaaatttaacgataagccaaacgtatatatctacaacctcggcaccggcaaaggctacagcgtactcgatgttgtcaaggcttacgaaaaagcctgcggcaaaacaattccttatgaaatcaagccacgccgcgccggcgatatcgcaacctgctactccgatgctaccaaagcgaaaaatgaactcggctgggaagctcagtacggcattgaggagatgtgcgctgactcctggaaatggcagtcgatgaacccgaacggatatcgggacgctgaggactaagagatgaaaaagaatgtgcttggcacattctcgcgccgagcgcggtcgcttgcgacatgtttctgcttcgcgcgagtgcgcatcattggcacgt

SEQ ID NO: 11025 - DNA, 1046 bp, Unknown
  gut microbiota DNA sequence
tacaagcatccatgtttcgtttttgataaagaatccgttgctttggtgagcacttataatcgtgtgcacacactggcatcgaattcgatacagaagaatagcgcctcactttggcaaagcaaggcgctattctctgttacaggaaaaatcaggttattctcccatgatctgaaccgtatattttcttatcttcagtccatcgaactccacaaaataaatatcctgggcacttccgcccgctgtttttccatctattaccggaagcacacaatgatttccgcaaagcattgacttcaaatgtcccggggcatttccgctgcaggttccatagcttgggagcatatgggtatgcacgtaatctccgtctgttggtatcaaccgttccagcgtcagttcaatgtccttttccacacagggaaggctttcatttatcataatcgccgtagtcgtgtgcatggatatgacaaaaacaactcccgctgtgattccgctggcagccacgtccttttgcacctgatctgtgatttttaccatttcaaattcctgtctgctggcaatttcatgcgtataagatttaataatcatagcctcttcctttcattcccagaaacacttccgcattctctcccaggatttttttcagcacatctggacgaagatttagtttttccagaccgtcctttgttctgacctggcgaaatctggggaggttggatccatacatcaccttatccatcagattattctgcagccatcccggagccatatttttcaagaaaatctgttcataatagtttttggggctgtccataaataccgtcgccgtatctgtataaacattgggatactttaacaacagcatgcacagctcatccacccagggccatcccagatgcgacaggcagaaccgaagcgtcggatattccacggcgatatcttcaaacaaaatcggacgtgtatattttgacggggaatccggttcccagctgaagccgctgtgaaacagcaccgacttgtcatactttgtgcacagatctaataacggt

SEQ ID NO: 11026 - DNA, 55665 bp, Unknown
  gut microbiota DNA sequence
aagaaaaatgagcgaattacgaatgtttttgaagattgcgggagcatatagtgcggagcaatctggtatcagaggggtcaaaatgccttttgaccccaacatctttgatattaatttctactgtaatcatagataacgataaatcacattgcaagggggatacgcgatgcggaaaagatatgcaaagctgcttgggcttgcctgcctgatcggtgccatggggctgcttccttcttcccagagccgtgcggctggatggctgaaggacggaaactactggtactacatgaccgacgacggtcagaagcataccggatgggtacatatcggagagaaatattattatatggatgaatcgaccggcaaaatggtgactggatggcgtcaggattcatccacttccgcctggtattatttcaaccagagcggcgagatgatgactaaatggcagaaaatcaacaactactggtactattttaaccagtacggtgtgatgcagaagggctggctccagcttgatacggtctggtattatctgggcgatgatggacggatgtttaccaactggcagaagatggataacgacacctggtactatttcggcacggacggggcgatgcggactggctggcagaaggtaaacagcacctggtattatctcgacgaaaatggaaaaatgctgaccggttggcagcttattaaaaatgaatactactatctccatgatggcaagatgctgactggctggctcaatgacagcaacggaaacacctactacatggacaagacagacggcaatatgagccgcggctggaagcagatcgacggcacctggtactatttcaatgagtacggacaccgtcagaaaggctggattaaggtatccggcacctactattatctggatgagaacggtaagatggcttcgaacacaacccggacgattgattcggtgaaatacacctttgccaagagcggtgcgtgccagaatccaccgtccagtctctccggcatgagcgacagctattttgacccaagtgcttcacagggaacagggacttcgtctggcagttcttcttcaagcagcacttcggggccaagcggaacggcttcgaacaattccaattcagggacctccagttcaggtaacaccaacaattcgaatagttccgatccttcgaccagttttactgcaccgggaagttccaacagctccagctcgtcaaatgcttcttcgtcgggcacaaccgttccgattcctggaagcggctacagcagctccacttccacgccgggcgggacttccagttcgtcaggctcttcgaataaccagacaagcagcagttccaccagcgataccggcaatgtaccaagccgcatctacagcaacggcacgtcttacaccgcaccgacgacatcgaactccagctcgtcaggctcttcgtcaaattcgtccgataaacggattaacggatttacctccaatcagggcgatacgattcaggagggacagacgcagggtcctggacggaaataaaccgtatttgcaaaatatataagtgttgttaaaaaaagattttgaccaacgattcatagcttatatcgatggtcaaaatctttttaattaaaatcataccttctaaaagctgcctacacctcaaacaccaaatccccataactcggaaatggccataattctttatctaccagcatttccagttcgtctgccggtttacggagagctaccatcgccgggcacacctcatgcagataggcgaatgctttttctttgttatccttgatcgcagatgcctttgccaggatatctttgagtgccgccaatgccaccttcatctctgaaagtttatcagaggtctctaaaagcagttctttctggacactgacatcggcctcctcacaggcagtccggacggctgtcagggaggaagcaagctgagtcgtatatttgacaaccgccgggatgatctgcttgctcgccatgtcgatcatcgtctttgcctcgatgttgacggtcttggaatatgcctcatactcaatctcggcgcgggattccagctcggtccgggtgtacacgccaaattcttcaaagagcttgatcgctttctcggtccggattgcctcgacagaatcgatacccgctttcaggttcgggagtccacggcgctctgcctctttaacccattcctcagaataaccatttccgctgaaaatgatacggcggtgctctgcaaacagacgcttgatgatatcatggactgcgctgtcaaaatcatcgctgttttccaattcgtccgcagcctctttaaacgcttctgccacgatcgtgttgagcacgacgttcggggatgaaacagaatccgaagaaccaaccatacggaactcgaatttgttaccggtaaacgcaaacggtgaagtacggttgcggtcggttgcatccttgacgaaatccggaagtgtcgctactcccgtctgaagtacctcgcctttcttagaatgtgcggcttcgcccgtgctgcacagctgatcgataacatcctccagctgctcgcccaggaaaatagagatgatcgctggcggcgcctctgccgcacccagacgatgatcgttgcccggaatcgcggtggactcgcgcagcagatccgcgtgtctgtcaactgctttcatgatgcacgccagaaccagaaggaactgtacattttcgtgcggcgtctcgcccggattcatcatgttgatgccgtcgtcgctcgtcagggaccagttgttgtgcttaccggaaccattgattccgtcaaatggtttctcatgcagcagacaggtcagaccgtgatgtcctgcgacacgcttcatcgcctccatgaccatctggttgtgatcgactgccagattgacctgacaataggttggcgctaattcatgctgtgctggtgcaacttcgttgtgctgtgtctttgcactgacccccagacgccacaatgtctcatttaactctttcatgaacgcaccgactctcggacggatgcttccaaaatagtgatcatccatctcctgccctttcggcggcatcgcgccaaacagggtacgaccggtgtagatcaggtcttttctctgtaaatatttgttcttatcaaccagaaaatactcctgctccggtcccacatacggaatcacacggtgggaagtcgtatttccaaacaggcggagaatccggagtgcctgctcgttgattgcctgcatggaacgcagcagcggcgtcttcttatccagtgcttcgccgcggtacgaacagaatgcagtcggtatgtagagtgtcacgcccagcgtatcttcccgcagaaatgccggggaagtacaatcccaggttgtatagccgcgtgcctcaaaggtggaacgaagtccgcccgacggaaacgaggatgcatccggctcgcccttaatcagctctttaccggaaaactccatgataacgcgtccgttggaatccggtacggagataaacgcatcatgtttttctgccgtgatgccggtcagcggctggaaccaatgggaataatgcgtcgcaccgcgctcgatcgcccagtctttcatcgcgtgtgcgacaacatctgcgatggacggatccagctcagctccgtcttcaatggttttcttcagttttttgtaaacacttttcggaaggcgttcctgcatcgccttgtcattaaacacattttttccgaaaatttccggtacattgataatctcgctcattcaatccctcacattaatatgaaaacagaccggaccgccggtatgtatatccgcgttgcgaaatgtacattcctgcagtccggtcatgaaccttacttattcatcaggcttttccgatagaaccgaacagttccatctttgtcttaaccgtctctttgatcgcctcaaaaccaggtgcaagaagtttacgcgggtcaaatcctttgccctgctgatccttaccagcctcgatatactggcgggttgcctctgcaaatgccagctggcactcagtatttacattaatcttcgctacacctaaagaaatggctttcttgatcatatcttccggaataccggtaccaccgtgaagaaccagcggcatatcgcctactttttcttttacggctgccagcgtctcaaagcttaagcctggccagtttgccggatatttgccgtggatattgccgatacctgctgccagcatatcaactccgaggtctgcaatcgccttgcactcgttcggatctgcacattcgcccataccgatcacgccgtcttcctcgccgccgatggaaccaacctcagcctccagggaaatacctttctccgcgcagactttgactaattctttggttttctctacgttctcggcgatcggataatgggagccgtcaaacatgatggaagaaaatccagcatcgatacatttgtagcagccctcgtaggtgccgtgatccagatgcagcgcaaccggaaccgtgatgttcagctcttcgatcatcgcttttaccatcgcagatactgtcttaaagccagtcatatacttgcctgcgccctcagaaacacctaagataaccggtgagttctgctcctgtgccgtcagtaaaatcgctttggtccattcaagattgttgatgttgaactgaccaaccgcatatttgccatctcttgccttctgaagcatttccttcgcactaactaacatatacaaacctcctcgttgtctctttttgatctaaccagagtctattatataccataattcagtatttgcctagcctgtcaaaaaaataacaggcaattattttaatattttgtaacttttactgtaaaatctccgaaacggttttctccatctcctccggcttgcactggcggttgtgacggatctctgccttgcggatctcctcgatcgcctgcgggatcttcacgccggatgctttctccatctcgtcgataagctcgaactcgcccttgccttcttcgctgccgaagattgcctccatgacgctgcgggagaatttatatgggcttgccgtcgatgcgataactgtcttcttggtatcgcctgtctccttcacatagttatggtatacgcaggatgcaacgccggtatgcgtatcgatcatataaccggtctcatcatagagacgcttgatctcggctgcatttgccgcctgatcagcataaccgccgacaaaatctgccatgcgcgcacgcatctcgtcggtaaccgaatatttgccatctttcgaaagctcttccatgcgtttcttggtctcctccgcatcgcagccggtggagagataaatcagacgttccaggttgctggaaatcagaatatccatcgacggggaagaggtcaggatgaatggacggttcttgtcatatacgcctgtcttaaagaagtcgtacagaactttattgtcattggacgcgcagatcagcttgtcgatcggcacacccatctgttttgcaaaataagccgctaagatattgccgaagtttccggtcggaacggttacattgatcttctcaccgttctcgatctcgccgttttcaagcaattttgcatacgcatatacatagtatacaacctgtggtacgagacgaccgatgttgatggagtttgcggaagagagctgatagcctctgcctgctaattctttggcaaattctttgtcaccaaagattttcttgacaccgctctgtgcatcatcaaagtttccggaaataccgacaacgcttgtgttcgcgcccttctgggtcagcatctgcagctcctgcacacggctgacgccgtccttcgggtaaaatacgataattctggttccctcaacgtctgcaaaaccagccatcgctgcctttccggtatcgccggaggttgcggtcaggatcacgatcgtgttctccgcatggttcttcttcgccgatacggtcatcagatgcggcaggatcgagagcgccatatccttgaaggcaatcgtgcttccgtggaacagctccagataatatgctccgtctgctttgacaagcggcgcaatctcttccgtatcaaacttactgtcgtaagcgcgctcgatacaggttttcagctcttcctctgtgaaatcagtcaggaactgcttcataactgcataagctacttcctgatatgttttatgggataattcttccaggctgcaatctaacgccgggatatgatccggcatgaacaggccgccgtctgctgccagtccctttaagatcgccatcgaagccgttacgttgttttcaccgccacgggtactgctgtaattgattgccatgattttcatcctctctttttatctttccccgtcgtccccatctttgcaaaggatgccggagtcaaactttctgccatgtaagtgttctgtgtggttttgcagttctcccgcaaagttacggacccccctgctcactttagttaaaaattctatcatactttatggcacagcgcaagaaaaattcccccttaatacgtgatcttccagcgcccaaacaatcccttcttaaaatgggaaaaccgccgtgaagcactctcatttcccatctcgatcgccttctggtagcactgtgccgcccgctcgagatcttccggggattcatttttccgttcgtagataaatccaagctcatagagtgcatatccgtcacattccgtctgtgccgcccgctcaaaaagctccttcgccttattttcatcggcggtgcagccttctcccttcatatagagatagcctaacttggatgcagactgcaggcttccggcttcttcgcaccggttcagccactcaaatgcttttgcataatcgcggtctactccctcttcgccctggaaatacaggcatccaagaatctccatgcactctggatttccctgcgaagcgcctttttcgtaccaggaaaccgcctgcttcatatcaatctcgccgttcagaccatcccgatagatatttccaagcgccagacttgcctgtccgtccgtctcgatcccagctgcctcccgcagaagtttttctgcccggacggtgtcctgctcgtcggacgggcgcagatacaggcgggctaacggaagcgccgcctctttgatgcctgccgcatatgcttttccataccagtaaaacgctttttcatcatcgcgctccaccagttcatcctgatagaacagatttccaagttcttcaaagctctccgcctcgttccgcgccgcggctccttccagcgcctggacggccgcctggatatcgcgctctgtgccctgtccgtttaagtacatctgtcccagatacagcatggcgcgggaagacccctgctttgccgccgcatagtcatattggaatgcaacttcccagtcttcttcctggcgataatgttcccccatctggaagagtccccagacctccccgctggcggcgcactgattcgcccagcgaagtgcctctttttcatctttttcccggtatgtaccattctggcagcattttcccatcttaaccatcgccgggataatgccgccgtccgccgcccgttcgtaccagaagaggcactgctcacgggcgctctcagtctgcggcatataatcggccagatcttcccactcaactgcctcgcccatctgccacgcggcatagacatcgcccatctcagcggcatcccgcacctgacggtaactttcctcgatggaataacgtgccgactgcttcatctgttcgtcatactgaccggcgcgcagcgctcctaacactgcccgggcacttcccgccgaagccccccgcaggtaacattcatacgcttttttctcattgaacccgacagccccgtccccccagctgtaacagtgtcctaaaaagaaccatgcttctgcatcgcccgcatatgccgcctcttccagccaggtaactccctgggcgtacatcgcatcgttacactgtttccagatctggtctgcacctttctcacataagcctgtcatcaggattgtcatatatcattcatccgccttccacacgaaattgtatcaattaaaactttctgcctccgccgccgtgcatccttccgctgctgccctgatgtatggtcgtccttccagccgaaccgcccgaagcgcccggacccggattttttggaatccgtctggtcactaccgaccggtttacaaactgctcctcattttggacaaaatgcagcgcactgtccgctcggtatgccatatggaaacccagcgactggcggtgttctttctgcatcttatactggcgcatcaccgaaaagcacgggagtgccgccacgatcgctgccgcaaccgccgcaaacagcgcctcataccattccagggaatgttttttctcctcgcgcacctgcgtatattgtcccgccggaacgcccatctccagataattttcgatgctgtcgatcgcccccagagcgccttccgcatagtttccatccgccacgctgtcatatgccgcatccagcaccttctctacccgcgcatccgtcagcaccttcatcgcatacccggtggtagaaacgtatatctcccggttgtccatatcgatcgaaagcagaataccactcgcatcgtccccgacgcccagtccgtgggtgtcgtaaaaatcatcggcatagctttccgccgattctccctgtgcgtcctcgactgtcagtaccgccagatcggcatcctgtgaatcacgcacctcatcgatccgtgtctccagctcctgcacttcttccgcgctgaacagtcccgcctcgtcgaagacgcgcgtgccttccgccgcccatatagggctgacctgtgaaaatgaaataaatgctgcaacggagaagcatataaaatctttcagccgtccatatttcttctttttctgtgtgactcccgcattttgattctctatcatatcaggtatcctcccagcagcaaaagtacaaacacaggaatgaaaatcgtcaaaaacaggcgcaccagttttttcgaatcaaccggcaggacgccgcagacctttccattttccccattcatcgcaaaatagtacatctgaccgctcttcggatccgggtaggtcatcatccacactggaagcatggcatagttccatttttcccccgtgatggtctcccggtggttccggatatccacatgatcgtagccggagacgctattttgcagagattctctcgtatactgcttgatctcctgctcaatctcctgtgtaaattcttccttttcccggtcgcgccgctccgctctaaatcccagaaaatagcctgcctgaaacgggcgcagcttcttcatatcaaacggaagcacggtctcggcaaggctgcggtccgcctgctttaacgcgttgcgcgccacatccttgatgggaagctccgcctttttctccagatggtaacggctcgtctcgatatactcgatctcccccgccaccgtcacgcgtttccgcagcgcctccgcctgcatctcaccggatacctggcagctatacatccaatatggataataaattccttccagatactccatctgacgcggcgagtagaaatcatccggcacatactttttcttctgaatccagtttttaaagatttcttttgcctttttcttgtcgatctcaaacggaatcagaccgtccgggcggtatttaccgtccagacttcccgaaagaaccaccggattgtgacagtaacagcagtacgtggatgctgtcgtctcctgtgccacaatctccgcgccgcagctcgggcaggtatagagaaccatcttagactccgcctgcttctggctctctatcttttccgcttccggcattccacccggcttcgaagcttcctctgactttctggctgcctcttccatctctttcaacgtctcttccgtaaacgctgagaggcagtattcacatttaaatttctgcgtcttcggatcaaacaccagtccgccgccgcagtttggacacttatatgattgtatctccatacgccctatgacctcggttttccgcattcggaacaaaacttacctgtattgaccgttccgcagctgcaggtccacggaccggctggtcttggcttgccgcactcggagcagaactttccgtggttgacattgccgcactcacaagtccaggattctgccggagctgccgcactgccctgcggcgctgcgttctgtcctgccggttgtgcatagccgccctgtggtgctcccggctgctgtgcataaccaccctgcggcgctccattcgcctgccccggcgcatagccgccctgcggtgccgcatatccctgccgcgccgcctgctgcatctgcatctgctgcaggttggacgccgatgcggcgcccataaatccgccgccgaagttcatgccggcgcccattcccatgaagcctgccatcgcaccgcttccgttggaaccggctgcctcaaagccgcgtgccatcgcgccctgcacatacccctcgcgcaccgacgggtcgccgagcatcgcgccctgattccgcatattgatgagtttctgcgattcttcatcataggaaatgctggcgataccgactgactggatctccatgccacgcagacggttccactcctcatccagcgtctccgccatatagcgtcccagttccctgcctttggaggctacaaaggaaatccgcacgccatccgccgacatctggttgatcgaggtctgcagcgcttccagaaactccgctaaatactgctcattgatggaatcaatctccacctgatcctgatttttcggaatagcctccgcataaaatttcagtggatccgtaatcttgatggagtaagttccatgtgcgcgcagaaacagctcggaattatagaataaatcaaaatagttgatcggcgtccgtgtgccgaacttgattcccttgatctcctggagattaatatagtagaccttctgtgcatacggcgtctgtccgccataacgcacacggttgaaggattctttcagtgcatcgccgaactgtccgttaaacagagacggcagggatgaattctgcactgtataataaccctcttccgctgtataatcaacgaccttaccgccgtccaccaacatcataaactgattcgggtacacatggatcacagaaccattggacaccgtttccggtgttctcttccggttctccccgcggcgtgtctgcacacccgctgaaaatacggtctgttcccccatattttccggttcaatcacttccagccactgatctgccagcccgccgccgaccgcgtgtgccgctgctctgataattcccatactcactgcctccttctccaaattcatagtttctctgtttttctgctttttctatctatcggttatcattccctttatttttcccatgccgattccattttcccggcgtgatcgcccatactgctgccgcgatcagcaccatcgccagcatacactgcaaaatcaggctgcacgccgtccagtgtgctgtgatcgcattgtctggaaatacgccaaacagtggctcgaaccattttctcatgtcgccgcttcccgcctgtccgttaattacattataaaacgagacagccggattgaaaagaaagagatagcgtaaaatgccggaacttgccatttccgatgcattgagattagatgcatacgaatctgccgcccggagcgccatccggtatgcaaacagattgaccgccatcgttcccgccgtcagcgccaccaccgtcacataggagcagacggtcgataccgtcgagcggcgcagcaccgatgaataaaagatcccgatactgcccgttaaaattgccacaacgccgtggcacaggaacagcatcccgatgtcctgcagcgtaacgcccccgtagacaaatacgagcgcctgtaccggaagcgccgagaccgccagcaccagcatcgtcaccagcgaggacgccagttttccaagcaccatgtcacgcggctccatcgtggtcgtcagcatcagttccagcgtctggcgttcccgctcgccgctgatactgctggcagtcagcgccggcatgatgaaaagcagcatgataaattcgatcgaggagacgaacgtgtagagatccagaaactgcgaatactggatctccgccgtcgtcctgacctgctccgccaccgaatacatattaaacagcgccaccgccgccagaatactgttaaaaacaaacagaatcgccatcatgcggatgctgcggctcccgactgtcatttccctcctaaataccggattccatctcatgtttcagcaccgccctctcttcttcatgttctgtgatctgcataaacagtgattccaggcttcccttctcgcgcataaagctgctgaccatcacatctgcatcgataagctgctgcaaaagcagcgcctcatcctgccgatcccccaaaaagcccagcttgatctcatccccctgcaccgcgatcgtctgcacgcaaggatggcttttcaggatcgcaagcgccttttctttctggctgaaaatcgagatcagaagcggattggacgagttgatccgcgcaaaaatctgatccatgctgccctgcagaaccgttcttccctgctcaatgatgccgatcgaggtacaaagctctgacaattccgataaaatatgggagctgacgagcagcgtttttccctgatcgcgcagttctttcagaatcgccgtatactccacccgggtgcgaggatccagcccggaagccggttcatccaggatcagaagatccggatcgtggatgagcgcccgcgccagacataggctctgcttcatacctctcgaaagcccgtccacgaaaaagtcctctttatcttccagccgcacctgttccagaagcgtatggcagcgcgtccgcgcctgcagccccgtaattccgtagcaggatgcgaaaaattccatatattccgatactttcaggttatcatatactccgaagaaatccggcacatagccgatccgccgccggagttcttttccgtctgagtaaacatccagtccgccgatctccacctcgccctcgtcgggaacgagaagtcccgcaagaatcttgagcgtcgtcgtcttgcctgccccattgggacccacgaatccaaagagttccccgtccgcgacctccagattcagcccatccagcgcttgaaaattgccatatcgttttctgaggtttttaatcgtcagcatcactctctcctccctacgacatagattcttggaagctggctttcccagccatactctcccgtctgttccggcacatatttgacggtcaatgtgttcgacggagacaggtacggcgaaagctcctttgccgaatactctgatttcagctcgatccggtcattgcgcccggtctcatagttatagaaatacatgcttccggagaaggatgacatatacggatagagcggattttccgagaatcgcggtgacagagtctcaaacgtaagcttttcaatgacaaggtcacttcccagcgaatattcgaccgtcgcagcctccgctgtttccccgctatacattgtgttgtacgccgcctcataatttccggcgagcaccgttggatcttcctcaagcgccgaacggtaaagttttccgtctttttcacggttcagcggaattgactcggtcaccatgcaaaatccttcccgaagtgtcctcgcatccgccaggaaatcttcctctccctggcgcttccgggttgaaaatgccaccaggcacccctcggacggattgcgccccgcgccggaatccagataaaagctcaaaagtctcgtctgctcctgcgcctttaaatagtctggatcctcaatctccgctttctcatactgatccgccccggtcaccatctgtgctgccgcatacgaatagctgaccggataattgcaggtctcctttccattcagagaaatcgtctgcccaggctctaatcttcccagcagcactgctttcccattaatgagcagagccgcattctccagcggttcctcaaaacagttttttaccgttccagacaccacgccgtcaaaataggaaatatttccctgaacgcccatcgcgtccgttttctccagctcacgacgcagggtaaacagattcggtgaaaatgcgaccgtatcccgcattttaatttcgacccgttccggctgataaacaaagttcgtatgatactcttcctcaccggtaaagcgcaccgccgaaaccgcatcgtaatagtaactgcgcgtcatcgggcgcacctcatagcccggctttaaactcaccgaatacggcttgttataagggcttcggatgttcatataagtggcttcttccgcctcttctcccgaggtatccagaatcgacgcatacgtcacaaacggctcccggaagcgtgtttttacgcccagcgcataaataatgccggtaaacaaaaacgcccccagtgtcaccgccggcagataataccggtaaattccccgcttttttaagtagaaatagatgcccggaccaatcaaaagcaggtagaccaccacgatcgccgtgtacgccgcaaccttcggaagccgccccgcattaccggtgttgaccagcccctgtacgctgaaatacgagcccgaataaccgtagtaatcctcctgtgccagctcgtccacggtatcacttcccagcaccagcgtatacagcttttcaaatgaggatggattggtcagacacaaatcgctgatcgcatccatcgaaaaggcagctgccacgatccgcccctgtttgcagttcgtatgggataacagcgggaacacttcccccgccagcagagtgctgccgttcttcaggttcacatcgacgcattctgcctggatctcccccgtctgctcgcccggtgccgtctccccgcccagactgaccggaacggttaccgcatccagatacggcggctccagcaccttctctgcaaacctgccataatttctcgcacaatccacaccgccgccaaagaggatcgtaccgccgtcttccacccagcgccgcagcgcctcatactggacatcgctgagcgaatccaggtcaaatccagacacaattaccagatccagcggatcgtaacccagccggtcatccggtgcctgctcggcatccagaaaaaccgcccgcgtccgaagcgtcccatatcggatgcccgcgccgtctaaataagaaagtgcctccggcgtatccgtcaaaattccgatataactctccgcaacgtcctcctcagaaccaagtttcagacgtttccggatgaccgttttcccgtttacatcctgtaccgatacaaacatctgatccgcccgcacacccagcgggatataatattcctgttcaaacttctcccccgctgccaacgataacggataggaatactggtacgcctccagactggactgcgcggtcagaaactccagcgttccctcaaacggcgctgtatcattattcagaaggaccgttacccgaaggtaacggtcgctctttgccgtattgtcaaatccataggaaacatccatcgacagcggcgcatctgcttccttctgtgaggcatatgcgtaccccgcaggaaggcagaatagtgccatccatccgatcaatatcgcaaaaaagaactgtattcccctctttttctgcatcctttctctccctatctgtaactgttcacgcatacgtgcccagtaacggaatttgccgtggcttcgcattaaatacggcaaattcctgctgccaccatgttttcttacggcactttcggttccaaaagtgcctacctatgaacagtaaccaaaaatccattaaaatgtctattagattctttcccacactcgcctttacggcatctggaaattttccctgttgatgtcaaaattcgtccgcaggcgcaccgtaaacaccgttccattcagatcgctcgttacctgaatcgtgccgccgtgcatatcgacgatatttttggcgatcgccagacctaaccctgtgccgcccgtgttggtcgatcgcgactgttccacgcggtagaatttattaaataaaagaggcagctcgtccgccggaatcacgtaaccgtagttcgtcaccgagacagtcacgacctcttcctccgcatgaatctgcaccagcacccgttttccgtctgcaccgtatttgatcgcgttattgatcaggttgtcaaagaggcgcgccagaagatttccgtctgccgtgataaccttgcccgggacattgctctgcagctcgtaggagaggtttttgtccttgaagctcggataaaattcctccaacagctggctgagcagtttgacgatgtccaccttcgacacgtgcattgccacttttccataattcattttggtaaaaccaaacaaatcttcgatcagtttttccagacgtttcgattttgcataggcaatatcaatatattttttctgcatttctgcaggaatctccaccttgccggacagaagttcaagatagccgatgatcgaggtcagcggtgtccgcagatcgtgtgccacattggtaatcagctcgttcttcgtgcgctccgcctcgcgctccttgtccatcagattccggatatccccgaccatcttatttaaattgaccgccatcgccgtaaactcgtcatcgccccgcacctcgatcgtcgtattcaaatcgccctcggaaatattctgaatcgcggacgagatccggctgatatagcgcatggaccgctcctggagggcaaaaaaagtgactgagaagatcgcgatgcccgacagaagatagacaaatgccatcagtgtctctgtctccgtcaggcgcaggaaaaaagaatcccggtaccgcgtctcccgcagatagctgctgatcatcgaaacattggcaatcagaaacacctccaccaggcatgccaccacggtgctgtaaacgatgttcatgaccatccgtgtccggaatcggcgactcatatcttttttatttttcaattttgtatcctaccccccagaccgttgtaatgatcttgttctgtcgggtgtcctccttcatcttgccgcgaagccgtctgatatgtaccataaccgtgttatttgcctcgtagactttctcattccacaccttctcaaagatttcatcggtgctgaagacccgccccggattggatgccagcagatacagaatgtcaaattcgatcggcgtcagcttgatctcctcgccgtacaccatcactttatgattatctttgttgatcgtgagtcctttgatcgagatctcatttttaacctgatttcctgcaccgctctgcggatttaactgcgtatagcggcgaagctgtgatttgacgcgcgccgtcagctccagcgggttaaatggtttcgtcacgtaatcatccgcgccggttcccagtcccagaatcttatccagatccgctgagcgcgcgctcagcatgatgatcgggatattgttcgtctcccggatcttgcggcacatctccagaccatccatccccggcatcatgatatcgagaagcaccagatgaatcgtctccttctccagaatctccaatccctctaacgcattggatgctttatatactttataaccatcactgaccagataaatctccaccagatcggcaatctctttctcatcatccaccaccagaacgtgtatttcagacataaaaaaacctccctcatatgtaatgcaggttcccggtatctctatgcgaaacaccagacgaatatacctgtttccagtttaccatatggggaggatttatgctttaaaaatttattacatttttggagaattttgcttatctgcgaactgcaatttctttattgttccagcggaataaacaccctcatcgccgccgggtcctgcttttttccagcttccttcgccgcctgcactgcctccgcacagaaggtatcctgcgcgcagaccggctctttgccgcggcggttgcgtttagcgtaggttccatccgatctcaggtactgcgccttgacattgtcggcaagctgtacctctaagatgtgacagatgcgtgctttcagcttctcatcctcaaccgggaagagaatctccacacgacggtcgaggtttcgcggcatccagtcggcacttcccatgaaaatctgcggttcaccgtcgttctcgaagtagaaaatacggctgtgctcaaggaaatttccaacgatcgagcagaccgttatattctcgcttaatcccggaatcccggcgcgcagacagcagatgccgcggacgatgagctgtatttttacccccgcattggacgcctcgtaaagactcgcaatgatctcacggtcgcacagggagttcatctttgccacgatccgcgctggaataccttcgcgggcgttgcgcgtttcccgctggatcaggcgcagaaaacgtccgcgcagccacagcggcgccagtgacagcttgttccagccaagcggctccgaataacccgacagcatgttaaagactgcagtcgcatcctcaccgatcagcggatcacaggttaaaagaccgcagtcggtgtaaagttttgccgtcgaatcgttgtaatttccagttcccagatggacgtagcggcggatgccctcttcctcgcggcgcactaccagcgtgatcttactgtgtgttttcagccccagcagaccgtagataacgtggcagccggctttttccagcatcttcgcccagagaatattgttttcctcgtcaaaacgggctttcagctcaaccaagaccgacacctgttttccattgtccgccgcttcggcgagcgccgcgataatcggggagttgccgctgacacggtagagtgtctgcttgatcgccagcacctccgggtcgcgggcagctttcttgataaaattgacgaccggctcaaaagtctcaaacgggtgggtcagcaatatatcgcctttgcggatattggcaaaaatatcatcctcattcatcagcgccggaaccggctgcggcgtatacggcggtgtcttaaattcatcaaagcccggcagaccgaacaccttcatgaggacggtcagatcaagcggcccgtcaatctcatagatcgcgtgcccgccaacgtgcagctcctttttgaggatgtctaagaggcgcttgtccgcctttttctcgatatccaggcgaataacctcgccccactggcgtttcttgagcttctgctcgatctccttgagcagatcctccgcctcatcctcgtcgatgctcagatcggcatttcgcatgacacggaacggatggcagctgataatatcataatttaagaacaatttgtcgatgtttcgctcgatgacttcttccagataaatgatagatttgccctcctggcacggcagctccaccacgcgtggaagcccgcccggcacgcagaccatcgcaaattccagctcgccgtctccctttttcttgcggaccagcgcagcaatatttaacgatttattgtgaataagcgggaacgggcgggaggaatcaaccgccatcggcgtgaggaccgggtagaccgattcctcaaaataccgatcaacgtacaccgcttcttccttcgtaagcttctcatgctcggtgaccacgcgcagaccgtgctgttttaagagcggcaggagcatccggttgtaggtccggtactgattctcgaccagctcatgcgtttttccatcgatcgcatccagctgttcctgtgccgtcatacccgcaatatcccgcttcgtataattggcgtgaaccatgtccttgagggatgccacgcggaccatgaaaaactcatccaggttcgacgccgtgatgcttaaaaatttcaggcgttcaaacagtggggtcgtcttatcgcgcgcctcacccagaatccggtagttaaattccagccagctcagttcacggtttacataattttcaggttctccgtatttcaacactgcatccgacatccttatacccctcttttctgcctgagtacaggccgtattccaaagacttcctcaaagaaatctgccttctggtcaaatgaatactgctccagcacgatactctccggacagtccgtcgtaatcaccagactgccgttccgcacagcgatgcggctgtcgctcagcttctggcggtggctgcggtccatcgaattggccagacgcaaaattgccgtcagcttcgcaatcaggatcgtcagctctctccgggaggttccaagccccgcatactgggacagatccgactccaggatgacctcatcgtaggcatattcctgaatgttgtagcgcacgatattggctacaacctcgcgctccagatgggaaattccgatgatctccgtatccatgatgatctggtacgagctttccgaaccgcgcgtgatgctgacaaacttgccgcagtcatgcagggtcgccgcgatctttaaaagcaggcgttcccgcactcccagaccatggtattttttcgttgcatcaaagatcatctccgctgaccgctctacctcgcgcacatgtgcgccgtggcagcggtagcgcttcgccatctggcgcgccgtcgagaggatatccgcctcaaaatcatgatggaagcggaccagacggttttcctgtgcgtactctgccgcgataccatcgcagagggtcgtccccggtgcccagatataggaagcgcccgtcatgtctaataccttccggtagagaatcgcacttggaatcagcacttctgcgtaatcctgcggcagctcatagcgctcctgaatctcctccgaggacatcccaatcagcttctcgcagaacacgccaaattcctttgccgtgaaccgcgccccgcctttttcatgcatgccgcggctgatcatatagttcattgtctcgccggtcgcaatcagcgtctcaatctgatgctcttttaaaaatatcttccgaaatgtgtatagttcattttctaccagctcatcgatgatcgccggaatcttccggtaatcgacgcgccagtgtgctgacatttcacttaagcgcagcacgccgagcagaaggttctgcgttgataccagtacctcctcatcaaaaagggagatctgggtgcttccgaatccgacatccatcagcgccgcaccgtttttcacggtgtgctggaattcttcctccctggctgcaacggctttataactcttaaaacgaagctccgagttgttcatcgtgcggacccggagtccggtacgcaccagaatccggtccagtaccatctggctgttccgcgcctcccgaagcgcgctgctcgcaaaggcccggtaatccgatacccggtatgttttcatcacttcccggaacttattcaggacctcgcacatttcctccacgatctcgtggctcaaacgtccgtcattgtacgtgtctttgccaagcgccagcgcatggcgcacatgatcgatctcgcggattccggcggaagcagaaatctcgaaaattcccagctccagttcgaaggaacccacatcaatagcggcaaaggttttaacggtcatattacttgatctctcctttcagcttgctgcgtaagtttgcaataaactgggtggcagtacgtccggacagcccgccgtggcttaactcccacctgttggcttccagaagcagatctgcctccggcatatggatgtggtatttgtctgccagcacgcggacgatgttctggaattctttcttgtccggtgagccgtagtagatcgtgacgccaaaacgcgcaaccagagacagtttttcctgcaccgtatcgttggagtgcagatcgtcgtccagctctcgcttatcgctgaatttctcgcggattaagtggcgacggttcgatgtcgcataaatcaggacattctgcggcttgatgccgagaccgccttcaatgattgctttcagatatttatattccagctcatattcctcaaaggaaaggtcgtccatataaatgataaatttgtagttgcggtctttgatctgctccaggacgtctgatagtccgcggaactggtgcttgtacacctcgatcatgcggagtcctcggtcataatactgatttaggatcgctttgatactggatgatttaccggtaccgctgtcaccgaaaagcaggcagttgtttgccgcgcgcccctcgataaatgcctcggtattctcaatcagcttggctttctgcagctcatagccgaccagatcgctcagctcgatatgttccacgcgcgtgatcggctcgatatcgacctgctttgcctcgtcatccatgataatatggaatgctttgttaagaccaaacttgccgacaccaaattctttataaaattcggtcacgatatcctgaaattcctgatcactctccgcattctccagggaaaccgataattcaacgatccggtcgcggatgcggtggttgaacgccttgctgttttccagcgcattttcgtaatgcttcatctccgaccagatgccgttctcagtctcgtccagacgggcaatatccaaggaaaaaagctctctgacctgtgcaaaatcgtggcgtgcaagctcgctcaagctgccgccgaccggtccgatgatctcacaggatgtgctgtaggcattttcattgtttgccatgcagaacgccaggaaacaatgccacaggtttccgcggaatccataggtcactgccagatcgatgagctgactcgcgcatgcatatgcatccgggcgtgcctcgccttcttctggttttaagaggctgcacatgtcgtcaaataactgctgataccgcaggttgcgatataaaatcatcgtattttttcttttttcttccatcattctgcctttccggttaccatcacatgctttacggcactttcagtgtcaaaaatgcctgcccgtggacagcaacccattctgtcttatcctaagctaaagagactagtaatttcctaatatttttacatttttcgcttcgcgcatgattccgtacagtgcattctgcacaccggcatcctccaggtttccctcgatgtccacgaagaagcggtactgccaactctcctccgggatcggccgggactcgatcatacgcatattgacgtcattgaaaataaaattgccgagcatgctgtacagcgtaccgctgcggtgcggcagctcgaaacagaggctgattttctctgcgcccgcctgatagacgcgatccttcgccaaaatcaggaaacgggtcgtattgtccggacagttgttgatcggacctgccagctttttgagcctgtaaatctcacctgccacctcacctgcgactgccgcctgtgacggatctttctcatcgcgtaccttctgtgccgccacagcattattttccatgctgagctgctgccagtcgtgctggtttaagaagtcgctgctctgcatcaacgcctgcggatgggcaaaaacacgcttcacatcggaaagttccgcgtccggtgtgccaagcaggtagtgatgtaccggcagaaatgtctccgccacgatcacattgtcgtattttaaaagcagatcatagttgtccgtcacggcaccggcggaagaattttcaatcggaagcaccgcaaaatcagcttttccctcctgaatctccaccatcatatcctcaaaccggcgtacatgatggatatccgcgtcttttccaaagaactgcagcgccgccgcatgaccgtaagcgccctctaatccctggaacaccacgcgttttccggcggtttcaagcttctccaccttatggaagcccagatccggaccgccgacgcgccctgcgatcgtctgatactgataccggcggctcagcgtcatcatctgcaaaaacagctcggcaaccgcctgcttgttaaactcgccctctgccatcgcctgaactgactcgatcttctgtttctcacgctcggcgtcgtaaaccgcctttccggtcgcgatcttatactctgccacctcgctgcaaaggcgcattctctcctcaaataacttttctatctgggtgtcaatctggtccagacgccctcttatctccagcaaatccatctcttagctgttctccttttccatctctgaaagcatccctgcgatcttttctctcgtatatgcgccgacaaacttccggttctccggatccagctctttcacgataaacggctcgccgaactcaatcacgacatggcttggacaaataagcggaatatgcttctcaaagacttccgctgttcccttgatcgctaccggaacaaccggacagccagatttctctgcgatctttaagcttccctctttaaatggaagcagatctgaaagctgttcatttttattgcgggttccctccggaaaaatccagacagaaacgccgcggcgcaccttctcgatccccgccagaatcgtttttaaaccttcttttatattattccgatctaaaaacagacagttgacattgagcatccattttgacaagagcggaatcttctccatctctttctttgccacaaatcccatcagtcccggaaccgtcgtatagccgaccaggatatcaaaatagctccggtggtttcccacatagagcaccgggcgatcctgcggaatattttcatatccgcgcacctctaccgtcacacctgccattttgagcagtttttcaaaaatattacgcaccatctgggtgctttcttcctccactgcgaccggatctacctgtccctgtttatccatacagtgcaatgtgccgatggaaccaacaaggaagctgacgatcgttcctactatctttatcgcgcgaaacatactgatacctctcttttctcttgtatctgtccgaaaccgtctggtttttatcctgctattttcatttccagacagactgctttactgtctcattatatagaaagaagcagggttttacaagactttccttgtaagacaccctgcctctgttactgttcacgcatacgtgcccagtatcggaatttgccgtggcttcgcatttaaatacggcaaattcctgctgccaccacgttttcttacggcactttcggttccaaaagtgcctacctgtgaacagtaacctgcctctctattttttatggattcacaatctccgtctttccgctgatcagcgcttccacctcgattccacctatctcgcacaagattccctcatagctttccagggtatcgctgtaatacacgctgtagatagacacatcctcagaaatctctccatccagatagttttccagcggattttctcccagatcccggaaagaaccacccagatccatcatcagctcccagctttccggatgaatgtcctgttcatccaaatcatgtagatacatccagagcgccatgcatagaatcctcgcctcggctttcgcccgcacttccttcgctttctgtacctgtccggatatgatcgggatcgaaactgcaacgagaatcgccacaatcccggtcacgatcagcagctctgccagcgtaaagcctgaccgtgccctagcggaactggttcttttctctgtcataggtatatcccaccgcctgcagcttcttctcaagctccgaccgttctgtatcaaacgcactgcataattcatctaaatccgggtaaaaatctctgagctgtgtgttcacaaagctcaggcacataatcggatcgttcggtatttttcctgccatctttttccctttctgtccttttattcatactcaaacgtaaccgtcacatagtaaccgcggtcattttcctcgatcgcctttaccacgccgtgatcggcgggaatccggtcattcagcttaaaaagccccgacatcgccaccgccggttcaatcatataattgacattaaacggcgtcaccgactccgtcacctctactgtctgtccgacttctaccagtcccggacgttccattttaaatacaacatctcttgtcacgccgtttttcctcttctttctggtctgatccccaattctggctgccggcatatcctcacgccgtgcctctgatttcaaattttttttacacgaaccataaccgccagcttaccagttttctagtatacggcacttttttccttttatcaactgcacccacataacctaccgttcgtttttttcacgcgccatccgccgcagctgccgaaatccaagccatgccagtaaaagcagcagcagacttacactgatcgtcagtccgtagtgaatccaccgtctccagaacggaagcgggaggttttccaccggcgcagtctctgtttccaccagagttcccggatccacttctatttctgtcatctcttccacatccagttccgctttttcatactccatccgcctccggtaacgctcatattccggaagtctgaccgttcccccgtacactgcccggcaatcccatacgcggcgttttgcctgtaccgccgcattgcggcaccagatgccagcctcatcctgataagcatctccctcccagcttgccgactcaatctgcacctcatcctccgatagccctgcacttgcaagcaggtcttccctgcacacctccaatggcagcactttctcatcatgcatcacggcagttccacccagccggtatgtgtccgccccgtattcgtgaaatacgaccgaaatctcaaatccatcctgccagtgttcgttctcataagaggttcttttcagatccagcataaccgataccgtcttccggctctcccgatcctccacctccatcggcgctctcgccgggatctcctgttcccgcgtcacggatggatagaccatctcccccgaaacctcccgcgttctgccgcgcaccggcaccgcctctatctctgtccccacaagccggtaggtaatttccccctcttccagatattcttccggcgcttctggtatctcagcctctttcaaataggaagaagaataacggatccgccgttctcccgccttatcttcctgtgcgtaagcctgtccgccggtgccctgcaggcacagcacaaatgtcagcactgccagcctccagccatatcttctgtcttctcttttccccatacattctccctttctgccattccccggcaaatgtctcctgccagccgaaccgcattctttcgtaagcacgttctaaatttccgtactcctctctcaaccttctccatcctttctaaaattgttattgttcacgcatacgtgccccgtaacggaatttgccgtggcttcgcatttaaatacggcaaattcctgctgccaccacgttttcttacggcactttcggttccaaaagtgcctacctgtgaacagtaacgatatgatacttatattcagcactgctcaatcatatgactgctatttttttgtttcataggacgcagtttcccctgaaacaaaaaatgcattatgaaatttcataaatacccggatatttctgtgaatcacagatgccctctttgcgggcagaatcatcgaatgccgtccggaaccggactttgaactgcattgtacctttattatagtctgccctatctcaaaatacaatttataaatcgctcccgcggcattttctacaaaaacacctttttatccatcatttacttataagtgttatacaaaaaatcgaatacgactttctgtttggtacggcaaaatgacttgactggacagcagattttaggtatacttgcatataggtacattttacaaaataagagcggaggaaattaaactatgaagtgtcttatcattgacaaagtatacgctggtattgctgaagaactcagcaaatacatggaagttaaaactgcagagaatctgccgtccaccaaggatcagttattagctgaaatcggtgacgtagacgttctgatcatgcgtgtagatccgaagatcgatcaggagatcatcgacgctgctaagaacctgaaggttatcggcgtttgctccgttggtctgaaccacattgatatggactatgcaaaatccaaaggaatccagatcttcaacgcaccgggcttaaacgctaacgcagttgcagagctgaccatttccaagatgttagatatctcccgtggtactttcacagctaactacgatgtaaaagtaaaacacgagtggaacaaatataaattcgaaggtcgtgagcttcgcggcaagactctgggtgttatgggcttcggtcgtatcggtaagagagtcggcgaacttggtcgtgcatttggtatgactgtcgttgcttacgatccattcctgaaaccggaagatttcgagaaagagcatgcaactggcatgtccgtagacgagatgttaaaggtagctgatttcgtatctatccacgtaccgctgacaccagagacaaaggatctgttcaacgctaagtccatcgctgagatgaaggatgatgcagttgttctgaacatgagccgtggtggtatcgtaaacgagaaagacatgtacgaggctctgaaagctggcaagatcggcggctacgcagcagacgttatggagaacgagctggctggcagcggtctgacaggtgatgatacattcgcaagcccgctgttcgagtgcgacaacttcatcgtttccccgcacatcggcgctcagtccgtagatgcttccagagacatcggacttcacatcatttccaaggtaaaagaggctctttccctgtaatcaggaaaccagtcttatactcatataggaaatcctgcggaaatcgttctgcagaaactgcataaagacaggaaccggatgatactctcgccggttcctgtttttttgtttcataggaaactactggaataccactggttcctccagcagttccgtccgcagcacaatatacggatacgacggctcttccccggtcggctcgcttctctccggtccttttaactcggtcttgacgatgatcgaattgtccgtcaggtacaactccggaaccgtaatgctgtaaccgccggtctcctgcttgccgtacccggcagctatgtagaggtcatttccgcttgtgtaagtcaggcggaaggaatcgttcttcttttcttctatgatctgcgccagctcctgcggcgtctcatcgggacctatgacggcaaattccagatcccgcaatttttctgcctgtttttcaccgccgcatgcaaccgcatagacccccgccagaaagattcccatcacaaccataaggcttagaagccattttttcctgcttttcttacttttcatcaaataaaaaacctcccgctcccctgcacgcagccacgcggcaaaatgctttgatttactgcattttatgaagcggaaggttgtgatattcaatcttttttcctttttccctggcatacgccagcaaccggtcgttcgccgccgcccagcccccatactgcctgcggcacgcaatcacgcactggcacgcatccagacattctctggcttcttgttccttttcctctgatatttcttcaaatgcggggactgcaatcaatctggacgccaatgtacaagccgccggataatctaagtcggcttccgatacgatccctgccgcaaacgtggttccagctctctgaagctgccagaagacagcgcgcccgcttcctcctcctgccagcacaaacacctctggtgccccctccggacgcggaagctccatactgccgcctgtctgacggaagcgcccttcctcgacctggaaaagctcggaaagatgttctggagtcagcatctcttccgggcgtccaaaccggctttcctgccccgggctgacgcacagcacccagtcagagacgcgctccgccagatcaagttcatgaatggataaaatgactgccaccttcttgcggcgcgccagctcctgcaagaccgacataaattccagcttataacggatatccagataggaagtcggctcatcgagaagcagcagttccggctcctgacagagcgcccgcgccagcatcacccgctgccgctgaccgtcgctgagcgtctggaagtcccgctcccgaagctctgatacctgcactgcctccatcgcctcatcaactgccttccagtcctcctccgagaggacaccaaaccgccccgtgtacggataacgcccggctgccacaacatcccggcaggtcatccactctgcatgaaccttttccgtaaacatgaccgccatcctccgtgcgcgctccgttcccttcattcccagaaggtccgcgccgtccaggtaaaccgcgcctcccagagggggaagctgcgcggcgacactctttaaaatggtcgattttccggctccattcggtccgactaaagtcaggatctcacccttctttatcccgatccggactggatttaagatctgttttccaccgtatccaacctgtaagtcctctgtataaaagtagatcttctcctcattttctggattcatggtattttctcctccgctgctctatgcttcaggtgctctttcgatgtttccgcatcatcacaaaaatcacgaccggcgcaccgaagacagctgttaccgtgctgatgctcaattccgtcggggcaaagaccgtccgcgccagccagtcgctgaacaggcagaacacgcttccgcccaggaaacagcccggaatcagcaccagcggtcttgtatcggcaaacagccagcggatcagatgcggaaccgcgattccaacaaaggaaaccggaccggcaaatgccgctacgcagccagataagatgctggacaaaatcaccataaagaaacgcagatgtgcgacattgactcccatgcttttcgcatacgtctcccccatctggtatgcgccgatcggtttggataacagaaacaccgctgccgctgagacaaaggtcacgcccgccatgactgccacattttcccaggtcataccagaaaaacttccgcgcgaccagttatgcaggttgacaatatccgcatcgctggcgaaggtcacaacaaaatccgtgattgccgagcaaatatagccgatcatcacgcccccgacgatcagcattgccatctgttccattttccgcgcgaccaggagcacaaacagcatagagagaagcgctccggcaaatgccgctgccaccagcatccccgaattgatcgtaatattccattccagaaatccgaccatcacaagtgctaccaaaagctttgaaccagaagaaattcccagcacaaagggacccgcgatcggattgtggaaaaaggtctgtaacagataccctgacagtgccagcgccccgccaaggatcagcgccgccagcgcgcgcggcagacggatctcccagatgatcgtccacgccattccacgcagcttaggctcccgcagttcctgtaaaaattccatgatcggaaccgatacactgcctgaacagacactccagataagcgacaggagcagcagcataatcagaagcagaaatgcgcctgcgatccgcacctgtctgcctgcctgcgccaggtttctttgttttttttcctgtttttgtctgtttgcttctgatactgaacgcatcgtttctcctatctatctttattacactttccatcctcacgactgcaatttatacagatatgtcccatcttcctggcttccgctgaaaatcgcatggatatcttccagcatcgctccaactgacatagattcctgatagagattcttcgtcgtacaccagacatttcccgcctgtaccgccttgaaatccttgagaaccggcgcttttgccaaaagctccgaaattgagtgaatctccccgtcgattgtactgttataaatcagataatcggattctttcgcagctgcataaaattcttccatctgcatattgacggtcgaagacctctttccgtcatcccccagatgcccgaatatgtatctgccgcccgctaattctatcattttcggtatataatcagaggaacggcgcacgttcacgctgccctggttcgtaatatagaaaaatgccgccgacggcttttccgcctgtgccgtctgttctgtttttacgctcccgcctgcgttctccgcatccgaaccttcttctgtaacacgctgcaaagctgcttcctgctttgcaaatgccgcttccgcctctttttctttaccggtcagcactccatacaggcggatccattccgtccgccccagcggatgtgcttcgtagctggaatgatccacaagcaccgggattccgaaactttccagcttttcttttacctccggcgaatggagaatcatcgtattttctattgccagaccgcagccctccgagacaatccgctcataatccggttcgctgtacttgcctgcgtagagaattgacccattctccatcgcctcctttgcctccgggatgtaccagcccgacgcatcggttcccgaaaaccggatatccgggagcgctcccagcatccggaacatatccatggtcgcggtcgctaccagataaatctgtttgaccgggcgcttaagcacctggatcgaatccggaagatcttccggcacctttccgccctctggaatcagaagaaaacggcttccatccgcaaccgaaactgcttcgtactgcatcccgtccgcatcctcataggtatcgaccgcaaactgggtcgcataggcaagctccatccgcgatttccaggccagggacgcactgatcgcctcacccggctgtggaagtgatgcctccgccacctgtgcatccacgttttctgccggctgggacactttcgtacctttacccgcctcattggatatctcactggcggatgtagacgacgctgccgccaccgcactctttcccgtatttccacagccactcaagagcagcacccccataagcgacagccctgccatcctaagtaaccttttctttcccgttatccatcctattttcttcatttttcccactctgcctctctcacgtgcgccacatacagcttccggatcgcctcaacctctcccagtccccggatgcggcattccacctggtatccggcgcgttccaggcggctcttccaggaatcctcctcttcacctgccatatcctgattcgcatggtcgcctgcaaccaccatgagcggctgcagtactgccctctgatagtgtttctgcgcgcccaatttctcgatcaccgcctgtaaatccggctgcgcctccacggttccgatgtaataatttgcatagccgcccgcgatcatcctatcctgcatcttctgatacacctgattggaagccgcgtccgtcccatgccccatcaggcagagtgccgtttttccatcgtcatatccgcccaattctcctgccatcgcccggatcaccgcatccagatccgcttcactggcaagaagcggtgctcccagcgccaaccgttcaaaacgcccctgattcgcttccacttccgcttttacatccatgtattcaaatccatccatcagatgggtcggctgcacaatcagacttttaatcccatcggctgctgcccggtcaagtgcctccttcaaattgtcgatcgaccgttgatcccgctttttcaatttatcaatgatcctctggctggtaaatgcccggcgcacctcatatgccggaaatgcctccgccactgcacgctcaaccgctccgatcgtcttttctcggctgtcattgtagcttgtcccgaagctgactaccaggattgcctgtcttggttccatctatccattcttcctctttgttttttatctttcaattcagaattttcccgttcctcctacgctgccatatgcctgaatctggctgacatatagctttatgaatcgaagctactatagcatattttgaaatagtttgcaatgaagcagaaaaaatggcactccgcccgtccaggcggaatgcccctttttctgctttcagcttcaattttaccagcttttctatttctcgtcccggctgcacgcgcgcagctggtgctcatgctcatatttttctttcgtcgccatcccgccccggatatggcgttccgctttgttgatgtccagtaccacacgcgcccgggatgcaagcggcggattgatatgggaaaggcgctcggccacatctttatgcacggtagatttactgatcccaaatttccgggccgcctgccgcactgtcgcattgtagtctatgatgtaattagcgatcgcaaccgcccgttcctcgatatattccttcatgggagttcccctgagaacgttttttacatcttattacatcggtttccggtttatgcaaattccctttcccaaacaaaaacactgccgattagtagttctccgcacggcggtgtttccgcaagtcgtttctcttcacgccagcttcccactctgccttctcctcatcggtctcgacaagcagtcccggaacttccatcggatgctcgttttcatccagcgctaccataaccacataagcggtattaaccagtttacgtgcgccgcttaaagactctacgaatgtatcgacacgcacttccatggaggttcttccaacgtaagtcagcttaccctcgataatcagggtattgttcaggtggactgcctctttgaactgcaggttatcaaccgatgcagttgtcggattgcagtgcgcgtggcggcgcgcaacaacggtcgctacaacgtcgatccattccatcagctgaccgccaaacaaacgaccagcaccatttaagtgactatttaatacaagctgtgtctggataacagctgaatccgctacgcggcgcataattctttcttccataatttatttctcctttcgagaaggatgcctcttccaatctcccgctttcgaaggacttccctgtgatatggtacctagtatactggctttccctcaaatttgcaagtattccgctgcaaaaattctgaatctttttagttatacatcctattggcagtaaactataaatgtaaaaaaacgaccgaagaatctgggggcagcgtctgttgtctttcgctgactcccatcatcttcagccgttctcttatttatcctcttcccgcgccgtgatcatccgatagatgaaatccacggttccatcgataccgtagctggcactgttgatacagagatcataattgttggaatgtccccagtttcggtttgtatagtaatgatagtactggctgtggacatgatccagatgctttaacatatggcgtgcctgcttgaccgtcagggaactgtcaatctccatcgcacgtttgatacgctgctcaaacggcgccgtgatgtagatactgatatgcgggatgttgttatttgccatgatggcatctccgcatcgtcccagaataacaaaatcttccttcttcgccatgtcaaccagaaggtcgctctcgttgaagaagaccgcatcacgcttcggcagtccatggaaacggctgaactcgcgcatgcgctggcgcagggtcagatggcgctccgggatgaatgcctcactcgggtttacattggcatcctgatcgtgcgccggctctttcttgattcccggcttgattccgtagctgacagaatcctgtatagaatccttctgagcctcgagacgtttcagaaccgcttcaaagatctccgcgtcgtagaaattgattttcagcttatctgccagcttaaatccgatatttacaccgccgcttccgtaggtccagctgatacatacgatcaggtggtcattttcggagaaacggtttttcaggttaaatgtattcagcttcgccagctctgcgttgataacgtcgccgctcgcgaaactggtcggcagactcatgacttcggtcagaatccggttgtactcggtcatgacgagcttccgctcttccttattctcgatggtacgcgccatgtttccgatcagggcaatctcacttcgaaccaggttaccctgcgggcgtgtcagcatcagatgagtcagctcatccacgcagcgcttccggtcacgattgaaaacacgtcccagagaagaacctaactgtgcataaacctccgcatccagatcgtaaatactctccgccagttcacggattcgtttttcatctcttccaggcaccgtgctgcccggcttcttccctgctgaatccttttcggctgcattttccgcacccgttacttcattcgcatactgggcgctgtccttttcaagcgcctgctgcgtctgattttccatattatctgtattggtatgttcctgattgttgctcatcgtcactcaccccctataaaaagaataacagcatatcaagtgcaaagaccggaaccagaataccgaacgaccagagcagatatccgaagaaggacggcatacgcacaccgttttcatccgcaatcgacttaaccatgaagttcggtgcatttccgatgtaggtgttcgcacccataaataccgcaccacaggagatcgccatcagcatcttgatcggaaccgttcctaacgtcgtcaccatgccctccgtaaatccaagcgcacctgccgttgttaaaaataccagataggtcggcgtgttatccaggaagctggacagcagaccggtcgcccagaacatttcaaacggctcggagatgcccagattcgcgccatttgctttcagaatcatcagggctggctgcatcgtgatgaaaataccgataaacagaaccgcaacctcctgaatcgcgccccaggtaaagtggttctcacggcggatctcaaccttcgtggtcttgaaggacaggaaggccgccaccagaatgatcacaatctcaatgatggccggatagcttaattctacctctccaaacagatggatgccaagcacctttccggctgcatcctggaactgcggcatggacggtaaggtaccgcttaaaataacggctgccacgatcataaccaggaaaatcaggttgtgcgcgccgcgcagctttacttcggtacccggtttgctgatatccggtttcagaccgctcgcgatatcctgacgatatgccctcttatcaataaaatagaagattgtcagcagcaccagcatattgaagaataagatcggcgccagatgtaagctccagaagaacggtacgccgcgcatgaagcccatcagcagaggcgggtcaccgatcggggtcagacatccgccgatgttggatacaaggaaaataaagaagataatgatatgacgtttcttctttctccatgcattcatcttgacaaccggacgaatcatcagcatactggcaccggtcgtaccgatccagcttgaaagcagggttcccagtgccagtagtcctacattgacacgcggagaacctgccaggtcaccggacatcgtgatattaccggcaacgcagaaaagtccaaataacaaaataataaaggtcaaatagtcattgaccaggcattccagaaccgtttccagtgctgtccccgcactgtaacgcatcgcaaacggaatgataaaaagaattgaccaaagagcaaccgcatgaggctggtgctcttcccaccattctgccttcacaagcggcagaatcgcaatacagagaagcagtcccgcaaatggaatacacatccagagcggcacagaggatgccgatgcaccgccttcctgttctgctgccagagccgtcatcggatttgccatcaaaaataatcccaggctcgcgcaaaacgcactcaatcttttcaccttcgtaacctcccaacttttttcttttttgttttacattttccatttcagccactcattataacaagtttatttcctaaatacaaccgtgtttttcacgttgtaagcgtgattttccgtgaatttttcgttaaaagtaccttatattaattcttattaataagtgttgtaagcctgtgctcataacataaacaaatacctcttttgtgtatagaaattatgtataatactgtaatttcacgttagtgcctttttgtgtaataggggattccaaggaatttcctattacacaaaaaaccgcccgccgatatcccgacagacgcttcctacattcacatataactttctcttgaactatactctctttccagagttcatatttcaattccatatcttccccgccatcttccatctttttcctgcagctgttttcgcgcttcattttaagccagccgcccgatctctcgcggtattccttcgtggtttctttttcgatatgtgccagttggcaaatctgccgctgtataacctgctctttcgcagcgttcacacatattctctctcgaacctgttttattatagcgcttttttgtaaaatttatttccgcttttttgtcaaatctttgtaaaaaaatcaagcagcaaattggagaaactgtctcatttactttttatcttctttatgctatagttagcctgtattttgcattcagatgtattacgaatccattcggaaattccggtgccatcccgtgccggaattctcaatgccttatcgtgttttataaatatcagaaggattttcaggagtattgtattcatgcaggcgaatatatttaagatcaaacgaaatgaattggctgacggttccgggctgcggactacgatttattttaaaggatgccccctgcgctgtgtctggtgttcaacaccgcaggcgcatgagcgcccgacccggattctctgggacagcaagcactgtctctactgcaatctctgtgtcagcgaatgtcccaccggaagtctggcattttcagacaaccgtctcacctttaccccggacacctgtacattctgccgtgcctgtacggatcactgtccgtcccgaatgcttcatttcgtcggtcagatgatgaatatggatgaaatcatggaaaaaattcttgccgaccgggagctctatggaaatggcggcgtcattctctccggcggcgatccgctgatgcagccggaagcagccaccgctgtcctgaaaaaatgtaaagaacacggcatccgcaccgcgattgagacgaccgctttcgccaaaccgctggccttttcccgcttcatcgccaacgcagacatgattatcatcgatttaaaacattattctgaaaagaaatatgtccagttcaccggcgtctcaaatcattcgattctggaaaatctggactttgccgtctctatcggaaaaaaagtggcggtccgcattaccattacccccggcatcaacgacacgctcatcgatgcccgcaggtatgcccaccttttgtctgagcaccacatcagacatgtaattctgctctcctattcaaatctggggatcattaaatatgaaaaatacatgcaatctccgacgcttgcccgcgagcagaccttctccggccaggatatggagaattatgcgaatatgctgcgcggactggggtttgatgtgcagattgagcagtagggaggcggcaggttttttccattgccgcctcccatacatttttccatctatttccttgtttctctattttttcccaaatttttcattgattttttttccacccaatgctataatgtgttcaatatttaatttatttatcaaaaaatgaacatgaaccatttgcaaaaatcctcatttttacaaatgatttaaaaggaggtttcccatgcaaaatccacaattccaaacagcgccagagccaaaacgcctggactggaccacgatggtcgtcccatttcttcttattataatactctgtctctgctttctggctgcgccagatgcatccaaggcagtgttggaaaatctccggagctttctcggggaaaacttcggtgtcggctaccttgccatcggactcggcatttttcttctgtcaatctacatcgccttttcccgctacggaaccatccggctcggaaaaccagatgagaagccgctctattccaattttgcctggggttcgatgatgtttacctccggacttgcggcggacattctcttttactccctgtgtgagtgggttctctacgccaatgacccgcatctggcagaaatgggcagtattcaggactgggcgagcacatacccgctctttcactggggtccgatcccgtggggcttctatgtcgtgctcgccgctgcctttggcttcatgcttcatgtgcgcggctgccataaacagaaatactccgaagcctgccgcccgatcctcggaaaacacacagacgggcttgccggaaccctgattgatctgatggcggtcttcgcactgctggccggcacaaccacgacttttacgctggcgacccctctgatgagccagatcgtctccgaactcttcggattcggcgacacccgcctcatcaccatcgcgattctggcagtcacctgcctggtatataccgtttccgtcgtgcgtggcatgaagggcatccagaagctcgcggcgtcctgcgtctacctcttcttcgctcttctggcgtatgtgctgctgtttggcggtgaagctcgctatatcatcgaaaccggcttttcctccatcggaaatctggtacagaactttatcggactctccacctacaccgacccacagcgcaccacctcatttccgcagacatggacaatgttctactgggcatactggatggtctggtgcgtcgctgccccgttcttcatcggaaccatctctcgtggacgtacgatccggcagacaatcctcggcggctacgtgttcgggcttggcggcacgtttgtgagctttattatcctcggaaactacagcctgggactccaggtgttcggaaaactggatgtcatggggctttatgccgccagtggcgacctctattccacaatcactgccatcatccgcacgcttccgctcgccccgatggttctcgttctgctcgcggcggcgatgatcgccttctatgccaccagctttgacgcgatcgtactggttgcctccgcctactcctacaagaacctgacaagcgaggacgaaccgcacatggcgatcaaaaccttctggtccctgagcctgattctactgccgatggtcctcattttcagtgataattcaatggcaaacctgcagaccgtgtccatcattgcagcatttccgatcgcgtttatcattctcctgatcgtggcggcgttttttaaggatgcgaagaaatatctttccagggaaatataattgtgatatcattaagtcagtttaaatatgcaaaggaggagtagcattatggcatgggatgatgttgcaggaaaagctgcaggaaataatggggacaaatatgttgttttacaggttgttttaacagaaaaactacttggcactggttcaggcacagcaagtcttactaatctgcaatcagaaattaataaacaagcggccaaaggataccggcttcacacgatctcaacaacatcttctggctctaagggttttcttggcggcgataaaattcaagctaccatggtatttgaacgaattgattaagtgttgttaaaaatatcccgaatgcactttccgatgcattcgggatatttttctttatctataagctctcccgcagatactcccgcgtcacactccgctccgcttccagcatctccttcggtgtcccggcaaagagcagactgccgcctgcgagtccgccgcccggtccgagctccacgatatagtcggcgtccttcatcacatccaggctgtgctcgatgataaacagtgtattgccctgatcggtcatccggttgaaaagcttcatcagacggcggatatcgtcgagatgcagcccgtcagtcggctcatccagaataaatatctgtccccgctcatccagcttgctcgccagcttcacacgctgcagctcgccgccggaaagcgtcgtcatcgactgattcagatgcaggtaaccgagtccgacctgtaccagcgtatcgagtttcttcacaaaatccgcatcttcaaaaaactggatcgcctgacggacggtcatatccatgacttccgcaatattctttcccttgtactgatatttcagcacttcctccgaataccgcgttccatggcagacctcgcagaccgtctcgatcgagtccatatatgccatatctgatataatcacacctttaccctgacacgccgggcaggcgcccttggaattgaaactgaaatatgcctgtgcgacatggttcgctttcgcaaaaagcgcccggatcgcatccgcgatatccagatacgtcgccggggtcgaacgcagattaataccgatatccttctgccggatcgagatcacctcgcctggatactggctcgtaaaatattccatcagggagctttttcccgaaccagccacaccggcgatgaccgtcatcacgccaagcggcagctttacgctcagatcttttaagttatgaagcttcgcgtgctcaacctgataccatccggtcggcttgcggtactccatcttcatcggcgttttcgtccgcagcattcgcccggtcacagtgtccgctttcagaagatcctcgtagcttccctgatacatgatctgtccaccgtttatgcccgcttccggtcccatatccacaatgtgatccgccagagcgatgacttcccggtggtgttccacaatcatcacggtatttccgtgctctttcagcttgatcagcgaatttttgagattctggatatcgcgcgaatgcagtccgacgctcggctcatccagcacatacatcatatcggtaagcggcgaattgatgtaacgcgcgatcttgatacgctgcgcctcgccgccggagagagtgtctgttccacggcttaaagaaagatagctgagtccgatctcaatcagcgcattcatccgcttcaggatctcggtcttgatatcgcgcgccagcggatcgtcgatccggcggataaactctgccgcctccgggatcggcatatccgaaacctcgcagatattttttccgttaatcaggcagctgcggatcttcgcattcaatctcgccccgtgacactccggacatgtaaaggtgctgacaatgcgatccagctctttcttatgaagctgtccttccttagatgtaatgatactgcggtacatacgcggataaatgccctcgtacttcgcagatttcggccagtttgccggcgggtttttcaggcggatctgcggcgaatagagaaataaatccatctcctccttcgaataatccttgatcttcttgtccaaatcaaacagaccgctgtacgcgtaccgcttccaccgccatgcgccggttgtgaacgccggccactggataacgccctcatcgtttaggcatttatcaaaatccaccagcttgtggatgtccagctccgtcacaacgcccaggccctcacagcgctcacacttgccgctcggatggttgaaggaaaagctgtccgaatagccgacaaacggtttgcccacacgtgagaagagcaggcgcagcagcgcatagatatcggtgtatgtgccgaccgttgagcgggagtttgccaccggctttttctgatcgatcacgatcgtgaccggaagattctccatgcgctcaacctccggacgaccatatttcggcagaaactgctggacaaaacttggaaatgtcacattcagctcccgccgcgactctgccgcaatcgtatcaaggcagagcgatgatttgcccgaaccggacacaccggtaaaaaccgtgattttctttttcggaattttcaacgacacatgtttcaagttgttttccgttgcattcacaatgcttatgtactcctgattttctcgttccatctggcatttttcctttcttaagctgcattttcccgtcccaggttcctttattttaaaggtactcaatgctatcctgatctgtacgcggctatcacgcacaaaagcagacagaaaatacccctaagaagcattttccgtctgcttttttatttgacttcctgctttacacgcactccgccgaacagcagaggcattgtctttcttgtatactctccaagcgcatagccaccgtctgaaatgcagtaatcatagatgattgccctctcgcagagtgcatacatatgtgcaatctcgtaatatggcatactgcgggtaatctgcccccggcgctgcccctcatcgaccagctgatttaccatcttatagtaaaaacggttctggtttaaaagatgcttatccccctttgtcaccacctgtgaggaatagagtgacgccagaagccctaccgggatatccgactctatcagatcatgtacactgaagcagagcgtcataagcttgtcaaagctgtccatctccggatccagcgcctgcattacctcttcatactttgcatcaaagatctctggaagagatgccagaagctcatcctttccactataataatgatagaagcttccctttgatgttccagactgcaggataatctcatcgatcgtcgtctcctcatatcccttctcatgaaacaatttccatgcaacacgggcaatttttgcttttgtgttattacccttcgccatttgccttttacctcttaacttctcaataatcgtaatttcagggaaacattcctggtcatctaatttacctttttgtttacctgaatccagccgaaagcagagtggataatcttcctcatctgctttcgacaatttaatttattttatcattcttttcctgtgaagtaaagagattgttcatagtgtctatttttaatatcgttttcacgtccggtgaactttggtatgtgcatggcagctgcactggggatgaaccggaatttctatcagatccgtggaccacgttttggcatcaatgaacagcatttttccaatcagcgcctctcccttacccaaaagaagcttcaatacttctgccgcctgcatacacccgatcatgccgggaatcacgccaagcacaccataagcagccgaattcgggtttccggatgggtcctctgtctccggacagagacagcgcagacatggtccgtccgatgcgaacacggtaacctgtcccgcaaattcacagatagctccatatacatccggctttcccagcttcatacatgtgtcactcagcagatagcgggttggaaaattatccgaagcatccacaatcacatcaaactttgcaagaatttcttctgcattttcagctgtaattccctctgggtatacttctacctgcaccgaatggttccggctctgaagctgctccgccgccagttctgcttttgcctttccaatgtcctgttcccggtaaaggatttgccgctgcagattgctgacatccacccggtcaaaatcagcaatcccgatcgtaccgactcctgctgctgccagatagaggctgacgggagatccaagtccccccgccccgactaccagcacccggctttccgccagctttttctgtccttcttctcctacctccggcaggagaatatttcttttatagcgttctttgtctatctccaaaccagcgtctcctttctgaatcaaccgccccccagtaaatgataaatcttcaaatcatctgcttcttcaagtgttactttatcatagtcttctggccagaccagctgcccatttaccttcacgaccagcttgggccaggtaaatttcatgtgttccatcacacccctgattgtcagtccttcatgccagtccggatatggacggttattcagtaccattatatccacttcccttctgcaacgtattaatgaatagtcttactgaagcggctcaactacttccaaaagctccggaagatccatgccaagctctttcaggtgtgcaattgtcggaacgccgtttaaattccagccgcgcttcggatataccgcatcaatcagcttctcatattccccttctctgtgctttctggtcgcagccatcttttcctttaaggacattttttcgacttcttcttttgtaaaaccaaccagctctaccagctgaccatcgtagcgctcctgacgggacagatattcttcttccgtaaccggtccctgggagcggtatggaatcgcatcgttcgcacgcagtcccttgcccagacgaatgttgaaaacacgctggaaattgtagacacgctcggacattttaatcatctcatccctatcaatcttgaccccagtaacaccataataaagatccagatagttatctacgtgctccggtaccttcgccggttcatcggtcaggctgttatcagccggtacaatatcattccacggcagcttgcaaagtcccagaagaccaaaccaggttctaaacatcggatagtaatacagcgcctccgccttatcctcaaaggtaggaatctggttatttacctgatccatgaaaatcagccatgcctcatcatgctgcggtcccttattggtcagaccatagccgccctgctgcgccaaggattctttggaagcatactctgaatattcaagtcccttctgttccatcgcaatatcattcatgaaatccatatcgccccagccctgcgctgcaaaatactctttctgcttgtggcttccaagtgccgcaatcttgccaaagccttcgtttcgcgccatctggtgcagcagctccagctccgcctctgcattgccccatacaagctccagaccgccggttctctccttattcaggataccattttcatagcattccatcaggaaggcagtcatggtgccaaaggaaatcgtatcaatgccatatgtatcacagtagaaattcacttccaggattacctgcggatcggttacgccgcagttcggaccaacaccggctgctgtctcatactccggaccatccacacatactttatgtcccttatacggacctgtctttaattcaaactgatcggctgttttagcacacgccatcgaacatccataccaacatccgtccgctccgccctgggtcagccatttatttctccatacctccggtgccatctcatcgatcttatccgttccgccatatttataattgcgcgtcggcagaatatcataatcgctcatgatacgcagggagtatgctgttccggatttacgcattgaattctgtttgtcatcctgtgtcgccacctcacgatggaatttcaggccatcccggttcaggatactgatatcatatacatggttcagatttgcttttacgcctttaaaatggcataccagcgctttaatgtgcttgtccgcaaagacacgtccgataccaccacgtccagcctgttttaagcggactacatttcttttcggatcatagaatgtaaaattcaacatagagaggttgcaatgatccgccgctgaaccagaacatacgaccgccacgtttttgcgatcattgtcatcctccgcatacatggttgtcagctcttctcccaatacatgtgcatctttatgctctaacggtgctttttcaattgaaacggttcccttattgccatcgatgacaataatcacgtcttcctccgcttttccagtcagctcgatcacatcaaatccggagaattttaagaatggaccaaaatatccgccgacgtttgaatcaatcgggatatctgtcatcggtgaaatgctgcataccaggcattttccggtaccgccgtactgcgtaattccggcaatcggtcctgccgacatggtaatggcattttccggagagtcccactttgtatccggcttcgttgcatcccacagataacgcaggcaataacctttgccgccggtaaatttttctttgacctcctgaggaatgtcgatcatatcgatggtgttatctgtcacattgattcgaaggcgcttatccgtatatccatgatacagcggctttggctcatatgtaacctgattgagaaccgtgtgggcctctttcatttttttgatttcttccatatctgcgtccgcataacgcggaagatcacacattttaatcatgcctttctcctccctttactcttctaccagacggatcgctccggtcggacatgcttttacgcacaatccgcacgccgtacatttggacggctccagataatcatcacactgtaccataacattctccggacagaatccaacgcacatcagacaaccggcacattctttcttgttcagccggtaaacgcctctcgcatcctccgtaatcacacctgtattgcacacttcagaacattttccacactgtgtgcacacagcaatatgatggcttccatcctccttgtcggtaatgcggatgcaggatttcattggatccgaaaccttgtaaaatgccttcgaacaggcttcttcgcactggtggcagccaatgcagagtgattcatctttctctaatcgtctcatcacagttcctcctttttgcctaatttcattatttcatccgaaacagatacatatccgtcccgaatcacttccaaaaatatggctcctgccgaaaggcggcagaaaactcctttttcatggtaaatacactctggaaaacacttttttccatacccggagacgcggaacaccgcccctcccgccgccagaagatcccccgtatttaactgagtggtatctattccctccgttatcaggtttgccttgtagcgacggaagcagagtcccggttctgtctgcttctccatccagtcccgggcttctcccgccaacagcgaagtctgcctttcacctcccgctgcatgccggtcaccctccattccgatcccccttcggaaccaggcgctctccacggcttttcccggctgtcccctctgccggaacacatataattcacgcacaactgctcccatctaatcccctcttttataaatataaaatttctccggttcttgccagcccataaccaccgagcttctccactctctctgcaaactcccggcttttcaaaaccgccagaaaatgctgtaccggtggaaaatccagaaatctgactggaatcgcaaagtcatactcttcccgtccaatctcaataaaatcaagtcccattgccctggctgccgactggattcccatgcccgcgtctgcatcgccgccggacacggcagccgccactgccatatgcgttgccgcctctctgtcatatccgtgaatttcttccggtgaaataccggcttccttcagcttataatcaaaaagaactcttgtccccgctcctctttgtcggttgacataattcaagccacgtaaatcttcaatttcatggattccaagcggatttcctttttttacgataattccctgaattcgctcaacgcccttgacaagtgccattttttcacccgcaaacagttttttcaggatcgcaatattatattctcctgtctcttcatccagcaggtgggtcggagccagatgcgcttctccccgctttaatgccattaaaccgcccatactgcctacatgcgtactggaaaggtaattacccgggtacatacacggcagcaaatctgccatcacatccagaatcagatcatggcttccgattgccactgccgtacttccaatttcctccagagaacggtatagctctacgtcaacggtatctcccgcctcgaccccctcgctgttctgaggaatcacacagaacccgtctgcccgcaccaggctcatcgctgctcccgccccgcgcgccagtggagaagcgacgagcttgtcgcccacttctcctactttcacccgcacatactctttatgtttcagggatgatacaaggcgtttagatatgacagcccgcaccgtcgtgccggctgtttctgtacgtcctgccagtttctgcagcacaggaattacaaaattttcaaagttgatataggcggataccggatatcccggaagtccgatcaccggttttccattgacaatcgccaatattaccggttttcccggcttgattgccaccccgtgtaccagaacctcccccaattcccgaagtacatgaaccgtaaaatcttcggttccagcactggagccggcattgacaattaccatgtcatagttttcaaccgcctctgccacctttgctttcaatgtttcatattcatccgcaatcggcggaaaacgatggggcgcaccgccatgttccgttaccagtgcctcaaacactctcgaattcgattcgatgatgtccccatccctgggttcctgtcccggctctatgatttcggttcccgtcggaaaaatcgctatcgacggctttttcaacacctcaatctctgtaattccgccagacaggagaacacctatatcaatcgggcgtatctcatgataaccgggcatcagcatctcacccgctacgatatcttctccgatcgggcgcacatgctgccatgatgcagctgcatccgtaatctgcaccgagccatcctcctgctccagcagatcctccgccatgataactgcatcgcatggtgcgtgaatcggatcgcccgtatccaccactgtaaaatctgtacctggatatagggtaagtggtttccgctccgatgctccctttgttttctctgcctcaaccgcgattccatccatcgccgccgcattgtaaagcggagaacaatatttcgcatagactgcctcttttgtaatccggtgcagactttccgtcacgggaatccattctgccttgggtcttaataattcctccagtgctttctggtaaagggcttttgcctcctccaccggtgtattattcagatataaatttctctttcccatctctgcctctattctgtttccaccaggctctgccgatcctttattctccgtcgcccttctggaagcaattcattttaaaaacggtataccttcacctgctcacctttcttcagtccctcctgattcatatcaatcagaacgtagccgtctgcctctgccatcgtcgaaatcaagcctgattttccaaataccggttctgcctccagcccttgcggagccatttgaagctttaccagcaggcaggttgtttttccgggtgcccccgccaggttcgttgtcataaaggcttctagcggaggttgatctggctgaccggttacctgcttccagagccacacaaataataagtggaaaacggtaagcgctgctgccggatgcccaggaagtcctcctaacagcgtatgtttctctttatcatatcccagaatcgtcggttttcccggtttcagtgccagcccatgggtaaatactccctccttggagatgcggtttaatatctccatagtcatgtccttctttccctgggaacttcctccggagatcagaatcaaatcacaggctttgaccgcctccctgattttgtcctctaaaagtacctcttcatccctcactgcctctgccgaaacaagctccagacctgtcttcttcacataacaggacagcgcccatgtattaatatcccgcacctgtcccggtccaggaacctgatcgatcctgaccagttcgtcgcccgtcgatagaactgccaccttccacggtttaaaaaccggaacctgaaccacgccaagcgctgccaatgttcccgcctgcgccgggccaatccgggttcccgctttaaggactatatccccggtttttacatcttctcccggaagcacgatgcatttcccatacggaacattttcatacagggcaacctcatctgttccgaaccgttcactgtattctaccatcaccatggcatctgccccttccggaaccatgccgccggtcggcacataggcacaggtgcccggttcaatctttgataccgccggatgtcctatctctacttcttccagcaccttcagaaaaaccgggatactttctgttgcgcccgccgtgtcctttgaacagactgcatacccatctacactggaacggcggaatgcaggaatcatttccccagagacaatatcttctgctaaaatacagccagacgcatctgcaagcgcaacccgctccgtctccggcaggcactcttttgccgcttcaagcagacgttcccgcgcctgcgccagcgtatcaactttcaataacttcataattcctcccttgcggcatgattcttcttcgcgaaggtacgcatccacgcgaagtgcttttgattcataggccgcctctccgaatgaaacaaaaaaacgaatacagaaaacattccgctctctgtatccgttcctgatgatgcagtctgcctcttacggctttctgctgatattcacttatctacatcaggctttgcttgggctggcggaatttactgctcttttccagaacttccgggtcttcatcccggtcatccgagagctattcctttccaatgcatcgtctgatgcggggaggcacccgcgtttccccggatacccattggcttttcttccatcctgtgaatcggttcacagcttaggcagaaaagctcgaaatcaactctgtataactgccgctctcgtgcgacaattctctttctcatgattttctaccagaaattataccacattttcacaaactgtgtcaatcatcccaagcaaaactctttccatttttttcacattcagcgcaatcatctcgcatttttattcatatttctgaacttttttcattttcgcgatatgaaacctctgtatctgccagatatcgacgtatggacgggtgagaggggtgaagaaggatttcttccggtgttccagacaccagaacattcccctgttccataaaatgtacctggtcacaaatcttgcggacatgcaccagctgatggctgattagcagccatgtcatcttatttttcgtctgctgctcccgcatcagctgttcaaacaattctgtactgtcaggatccaggttggaaagtgtctcatcaacaatcacaaacgcagggtcaaataccagagccctgataaatgataatttctgctgttccccgctgctcagggaacgggcatactgattttttttctgcagaagcccacatcgttccagccaggcatccatcttcgcctcatctgggcggattccccgtattttcagcggatagatcaggttctgatacaccgtatcatgcaaaagatacggtctctgtgttgtcatcgtaatatcccggggtgtcagtccctcgtaatcaatcctcccaccatccggaaccaatatcccctgtatcagcttggaaagagttgtttttccgcagccattggttcctatcagaccatggaccttcccgctctccagatacagttcctcgatttgaagcgtaaactgatctatcttcttttgcagtttagagattttcatccggtgtctcctcctgtctgaaatgttctgccaatgtctgtaccgcaaatgccagaagcatcaggatcactcccaaaaataccccttcataataatcgcctgcacctttcagggttgaaatcgcagttgtcattgtccgggtgctgttttttatatttccacctaccagaaagaccgccccgacctcactgatggaacgcccatatccagacacaaccgcaaaataaatttcatttttcatttcacgcagcagaagccgcgcggtctgatgccggtcagctcccatcgtcctggcaaacgcccggatcgaaggcgccgtgcggaccgcatatgaatataccattccacagacgatcggagtgatgatcagaacctgggctgccaccattcctttgatcgtaaatacccatcgaagcgccccaaacggacctttttttctcaaaagcatatatgtgagcagtccgatgacgaccggaggtgctcccatcaaggtccggttcacgcggactaccagcttttttcctggaaatttcgtctgctccagcacaagtcccagaaaaattccaagcatggacgcaatcaaggttgaccagaaagacatcaccagcgttacccggatagaatctatcactccgaccgtaccaaaaaattttgaaaacaggtttcccatattttttctcccagcatatccactgaaacaccttatgttctgcaggcgttctcattttctcaattcttaatgacagaaaaccggaaaaagtgcatcctcccttctccggtttcctgtttatacattataaattctgcaaggttcaactgcctgctttattcgtttaaatacgctaatccctgcactgccgcatatcatccggcagtattctatttctgctctgcattcgggaagaataacggctcgccgtactcctttacgccgtattcaccgatcagcgtctggatttccggagaacagatccacttgataaacgtattcgctgcctcgttgttgacatccggatatttctccggatttactgcgataacgccgtactggtttaaaagttccttgctgccttcacatacaatatccatatccgggaaatctgccttcttggcaagccaggtaccacggtcagacaggcagtagccgcctttttcatctgccatcgccagtgtatcagccattccagcgcctgccgatacatagtttggattgctctcataatctgtaattcccagcttctcccagattccggtctccttgttatgggtaccagagttgtctccacgggacacaaatgtcagctgctcgtccatgatctgtttaaatgcagcgttgatatcatccgtctttgcaatcggaccatccttcggtcctacgatcacgaaatcattatacataacctggaagcgctctacaccgtagccgctctccacgaattcttcttcttttgctttggaatgaaccagtatcacatcgacttcaccatcttttgctttctgaatcgcatcaccggttcctactgccgtccactgtaagtcaatacctgtatcctctaaaaagattggctttaagtaatccagaagacccgtattatcggtactggtcgtcgttgccatcagaagcgtctctccggatgcttccttggtctcctctgcactgctttcctcagcagcctctgcggttgtctctgcggcgctttccgcctccgtcgtctcttttgcacttccagagcaggctgtcatagacaatgctgtcatagccgccattgctaatgcaatgattctgtttgtcttcttcataaaattgttcttctcccttcttttgtttaagaatactctgaaaaacatttcatcggaacgagactctggcagaggatgcgccgccttttaccagctgcctttcttcctgataagcagcaggtcctacttctctttccaatgcatttctttccaaatgcgggaggcatccgggtttcccctgatacccattggctgtgaaccctgacaatatactgtgttaggtttttcagctcgaaatatagttttcctggcttctgctgtccgggtttttctaatacttcccgaaacatccttatacatttttactataccatgtcaaaattcttcttgtcaaccgggcaactttcacatgagcgaaattttttcattttttcaagcttcttatttattttgtcttttgttttctactgctcttttctactgttattctggatttttagtcttttttcacttctatcttgattttcccttttcatatttgtgcgatgctcttttaact

SEQ ID NO: 11027 - DNA, 72127 bp, Unknown
  gut microbiota DNA sequence
attttatgaatattcaaatcattttatcttttctacaattttcactttcttttcatgcataatatcctcacttttgccgattgtaagcccccattttctatgatatcttatatgttatattaattttcttttatagtcattccgcattccgcttgtttcagcgtgatcggatgattattttttagattcgtctgttaaaaattaaattaatacatttttttcaatttactcttgtattcttgagttggttgtagtattatagactcagaactagaacacagtctagtttttgcaaaggagggggaaaggatggcagaaactccttacatatttaacatccagaaattttcaacgcacgacggcgatggtgtccgcaccacgattttcttcaagggatgtcccttacactgtatgtggtgccacaacccggagagtcagcattattataaggaactgatttttcatcggcacaaatgtaccgcctgtggtcgatgcgttgcaaaatgtaaacagggagccaattccatcgtagacggcaagattgtatttgaccgttccaagtgtaccgcctgcggcgtctgtaccgactggtgcatcacagaggcccgggagttagccggtaaggaatacacggtagatgcacttgtcaaggaagcgatgaaggacaaaatcttctatgaacaatccggcggcggtgtaacactctccggcggtgaagttatggcttcccagcatatggactatgtggaagaggtctgtcgcaagctccacgagaacggtgtcagcgttttcatcgacaccagcggctacacagactatgagaatctgaagcggattcttccttatgtagatgtttttctctacgacatcaaagtgatggatccggaagaccacaagaagtatattggcgttgacaattcactgattctagagaacttaaagaaattaagtgatgaaggcgcaggtctttatatccggcttccgattatccagcaggtcaacgcaaccgatgaacacattgaaagtgtcatccatttcctgaaagaaaacaatattcacgcacgtcaggtaaaccttttaccttatcatgacatcggaaagggtaaatacgccagcctcgacatggagtaccatgatgatgagatgagcgtaccggtgtccgagcttatggaacactttaagtccatgttcgaagaacagggattcaacaaagtcaatataggaggatgatttaaatggcagaaaaaatggatacttcattcgtaatcaacacaccagaaggtctgttaaaagacaacgaccgcggatgtaccgaaagaattaaaagactgagaagactcagccattctacccagccgcatctggatctggaaagagccaaaattgaaaccgatgtttacaaagagtacgaaggttccgtatccgtaccggttttaagagctctcgttctgaaagagtacttctccaagaaaactctttacttaggcgatgatgagctgttagttggtgagaagggtaaagaccctcagtgttcaccgactttcccggagctgtgctgtcataccatcgaagatatgcacattatgaatgatcgtaaactggttaacttcaccgttaccgaagacgatctgaagcttcaggaagaagagatcattccgtactggaagaaccgtgcagtcagagagcatctcttaaaagctatgacccaggaatggagagactgctatgaggttggtatgtttaccgagttcatggagcagcgtggaccgggtcatacagccggcggcaagaacttctacatcaagggctacggcgactacaagaaagagatcgaggaggctatcaaagatcttgactacttcaatgatccggaagcttatgacaaagagcaggaacttcgcgctatggatatctgctgcgatgctatcattatcttaggtaagagatatcacgatctggctcttgagaaagctgctgaggagaaggatccggtcagaaaagcagagcttgagcagattgcagctaactgtgcggttgttccggagcacaaacctgagacctactggcaggcacttcagatgtactggtttacacaccttggtgttacaaccgagttaaacccgtgggatgcatttacaccgggtcgtctggatcagcatctgattccgttctatgagaaagataccgctgcaggtactctggatgatacaagagctcttgagcttcttgagtgcctctgggttaaactgttcaactctccggctccggttaaggttggcgtaaccttaaaagagtccggtacatacgtagacttcgcaaacatcaactccggcggtgtgaaggaagatggtactgatgcagttaacgctgtttcttacttaatccttgactgtatggaagatatgagacagaaccagccgaactccaacgttcagatttccaaggttactccggataagttcttaaagagagcttgcgagatcgctcgtcagggctggggccagccggcattctacaataccgatgagctgattcaggagctggtaaatcagggcaaatctctggtagatgcaagaaacgctggatgctccggatgtgttgagacaggtgcttggggaaccgaggcttactggctgaccggttacttaaacatcccgaagtgcttacagctcgctctgtatgatggctacgatgtaatgttcaaaaaacagatcggaccgcacaccggcaaggcagaagactttaaatcctatgacgaactgtggaacgcattcaagacacagcttgagtacatcatcgatgttaagatgcgcggcaacctggttatcgagagaatttacgcagaaatgatgccggctccgttcctttccatctgtaccgatgactgtatcaagaaaggtaaagactacaacgctggcggtgcaagatacaacacaagctatatccagggtgttggtatcggaaccatttccgatgcactttccgctatcaagttcaacgtatttgacaatcagaagtttaccatgaaagaactcatcgacgctatgaacgacgacttcaagggtcatgaggatatcctgaacctggttaagaataagactccgaaatacggcaacgatgatgattatgcagatgacatcatggtaagcgtattcaacgagtacaaagattatatcaccggcagacctaccaccagaggcggtgtatatcatgtagatatgcttccgaccacctgccacgtatacttcggtgatgttatgatcgcaagcccgaacggacgtctggcacatatcccgctgtctgagggtatctctccggagaagggtgcagatattaacggaccgaccgcagttgttaaatcctgctccaagatgaatcactgtgagaccggcggtactctgctgaaccagaagtttactccggctgctatcgcaggcgagaagggtattgacaacctggctgctctgattcgttcctacttcgctatgaacggacatcatatgcagttcaacgttatcgaccgccagactctgattgaagctcagaagaacccggaggaatacaaagaactgatcgtccgcgtagccggatacagtgactacttccgtaacctggataaaccgcttcagaacgagatcattgagagaaccgagcagagctttggaggctgtggctgctgttaattgctcgcaaccgtttgacaactctaaaagtcttcattgcatcatatgaatgccttctatgaaaatgatatagccccaaaagggcagaaagccccggcagcgaaactgccggggctttcttatttctttctttttctatctatcttcccattcttatcgcaatatccgattccttactgtacttcctgtccagctctactctgctatcatttttgaccttctcagacaaataaccgccagggcaactgccagtccgcctgacagcaccttgctgatcatataggctgttacccagtttcccggtatcagggatgctacgaaggtcatctgaccgcctaccacataggcacctgcaacagagaaagcggcatttaatacttttcctcgcttatccatcttggaaaacaatggcagcatcgcaaggctctgtataaaggaaaggaacagtccgacaactgcctcctcattgatacccaaggccgctccgatacgctggatcggcttttggagacgttttaacgccacctgcgacagcaccagaccgccgcacgctgcgatgaccatccggagtaccataaaaagcatttcctcaatcaaggcatcctcgacaaccgcatacttcggcatgaaaattccaaagactgccacaccaaacaggagaaaactaaaaatacggatcgcatttccgaggaaaatcatgatcttcatcgtcagcgccggaaccagcacaaatgccgcaatcagcaccatgcacagcaccagcaccgggatcatattaaaaaagagctgacggacaggcagacccagcatcagacctccgaccgccagaccagacggtatggcaatcagcccgaagatgaatccccgcatcagctctcctatttcatcttttcgaacggctgccagaaagaccggcaactggtatccgaccgtcattcccagactgcctgctaccatcgcaccggtaaatgccgccagcgccggtgtcgccgccagcttctgtgccatgccaagcgcccccatatccggcgccagaaggcagcttggaatgagcgccggatcaaatggcatatgctttgccgcctccgcaatcgcttccgcatgcgtctgcacatatgtaactccgatcgcataaaatccgaccgtggacatcgccagaccgcccatcgtggcaagccccttttcaaagttcggcatcagccccagctttcctcccagtatctcatccaaaagcccggctgccgcaaatacaagcatgatcgcaatgaatatgttcataagacctacctcccagcttttccctatttctctattcccctgttttcacttattttccctctatcagacacatttctctgtcaatcacaattcttttttacctcgccagcagctgtatcagcacgcccccgatcgtcagcatcagtgctccgcaggaacgcgtcacaatctgtgcaaatggaagcagttccatccgtttcgaactgctgagcaccgccacatttccggaaccgcccatgttcgtcgtacacatccccgctgcgatcgatgattccagcggataaaatcccatcttgatgccgatcaatccggcggtcagtgtgatcgccccgacaatcagcacgacactgagcagataaaacggagtgatcgtgtgtaaaatcgtctttaaatcaatcagcgtcgccccgattccggtcagcgccgccgctgtccagctgtggatcgcgaactgtccccactctctcgccgcgtcctccaggcgctccgaaaggattcccgttcccttcacaatcacaactgctacaatcatccacgcatacgtcggtacaatcgaaataaaatgatggcagagcgcccccagttcataaaatgccattgaaataaaaagccccgtacataagagtgcgaaggtcggtttcatcggaggctgtttcttcacttcgtgaccgtcattgacaaggcagccatttccggtcagggatggctttcgctcgccgatattattggctaagccgccaaaaatgatcgccacgcaatttcccagcaccgtcgccggtgcgatccgcgtcaggatctgtccggcgtccgtccccagaaccgacgaatacattgccgacagaggcactgctcccgccgtcatgccgccgctcgtcatcggaataccgatatacaggatgctttccagaaaactatcccccatcaccataccgagcagacctgaaagtatcacgccgactgccagcgatatgacagctgtcggaagcagtttcaccgttgcgcggatcagaagcccgcggtcgatattgaaaagacttcctgtgatcagcgctgagatatagaagaccagaaatccttctttgttgacaaaattgtccaggatctcatgcgtctgctccggaatcagccccagcgcctggatgaccgccgcccccagaatacagatgaccgagccgcccaggtacgttttcacaaccggtgtatgatttcccaaaaaattgagtccctcgcccagcaccatcagcgcaatcatgccgccgaccaagcctgccggaagacagtccatatacatacagaccaccaccagcgccaggatgcctagatacagagggatggaaaaaccagcgatcgtattagctttgccagatatttctttcctctcttgctgcatttttcatttcacctctgagtattaatttcttccacaacacttcttatatttcttcccagatccgcaaggacacggatcattcggataaatcttctccacctttttcgcggttaccggtgctggctgggacatttccggcaccatcgccggcatgccgccgatcatacctctctcacttaattcccacggtttatttccgcggttttcttttgttctcgtattgttgaacgcatccatgagaagtcttaaaaattcgcccatctgctgctcgctctggaagacaatcccttcttcatgcatcttattcatcagttctgccggtgattttccttcataactgctggtccacgtctcaaagcaccatctagccgctttctcatacggcacatccaatttttttatgaaataggactccagctccttataagccagcgcacctgcctcataccctttctgacagatttcatccaactgctgtgcagacggaatatagaattttttattctgctgctgtttcaacaaagcagtgaatccatccccctcaaaaactggaagatgtacatacaagcccctctcggaataaagcggattctctttcggcaggtcctgcattcccagtttctccatcgggaaaatgcaggattctgtgatgtcctccggcatttcctccagcatcccgatcatttcttcgatcgtgcctttcaccttcaatttgtacagttcatacaaaatttccagcggcgcaatctcataataatcgataaagaagctgatacacttcatcagccagccttttttgctctgaaccgcccggaatgcctcatcgtcaatcccgctaaaaccctgtgcaatctcttcaaagacagtaaagcagtcactcacttcctcaaaacttccaagtacgtatttatataactgcattccatccataatctcttctgcagaaattttctgtggctcggtacaggctttgcaaaaaagcaccatctgctctttcgtcaggcatgaaagtctgccccggagtgcctcttccgtcgttaaatattctacaattcggtcaatcaggtcatcctttttaagtcgggaacagttctttaactcgtagcttcttgcttcgtttaataagtcttctttggtccattcttttaaatattctcttaataacatacaatttccttttctcatcttacatcgtttcatgcttctcttcatatttttttattatacttttaaatgcacatggattgcaagatatatcgttacatatttctgcttcgcgcgagtgcgcatcattgacattacacaaaaatacagcctgtctccaaacttctcaggaaacagactgtatcgattaaggattatggtaaataaaggattgtcgtaactgttcagtaggtctgcgcatttactgcgctgaccgtacgaaaacatgggccagcaggcaaaaatcccattgccgcaggcaatttttaatggatttttgcgcgtgactgtgaaggtactgaacagttacggattgtctatattttacagaaatactgccagctcttctagcggcttgcgatctgcatgcagcctggacggatgagctgtctctgccggatatccaagcggcagataggccgtcggctgtaatcccttcatctctgggaactgctccagcaatttttctggattaaacataccaacatacgttgttcccagtcccagttctgctgcctgcagcatcatctgggaaaccgccaatgtcacatcgatctctccatgatttttcccgtcctcttcccttttccaggaaatctctggatcataggctgctacaatcacaaccggcgaatgaaaatgacacgccgtacatgcatccgctttcgccagagcctcctcactctgcatcacgaaaaagcgctgtggctgtaagttatgtgccgtcggggctttgcgtcccgcctccagcactttctgtaatttttctgcctcaaccggacggctgtcaaatttacgaagtgaataacgtgcatcacataattcttcaaatttcatagtaatcaaaactctcctttgtattgcgactaataactacgaatccgatccgaatcctcttctcccgttttctcgatcttccggatctccaccacatagctgctcttatcgttgaccttcacttccacctgatcacccacatggtgtccttcgatcgcttttccgagcggcgactcgatgctgatccggttttccagggaattgccccggatgctcgttaccagacggtatacttcttcctcgtcgtcatcctcaaaatacagggtaaccgtatcattcattccgacctcatccgggcgggattcttccgatacgatcttagcgtgcttcagcatattttccagatagcgaatacggctttcattccggttcttatccttcttagcagcataatattcgaagttttcgctcaagtcaccctgtgcgcgcgcctccttgaccgcctcgatcgcctctttgcggaccaccagcttccgatggtcgatctcttcctgaatcttctttacatcactttctgtcagctgctctctcatgtcttactctgccagtccctttttttctatcatttctacaacctgtgctacatattttccgcagatttcatccgtcggtgcctcgaccatcacgcggatcagcggctccgtaccactcggacgaactaagattcgaccggtatcgcccaaggcatccgataccttctgaacctccgcctgcacgtcgcggtctgcctgcgccgcctctttatccttgactctgacatttttcagaacctgaggataaatctgcacctcatcagccagctttgcaagtgtctctttcttctccagaatcacttccatcagctttaatgatgttaaaatgccatctccggtcgtcgcgtgcttgctgaaaatgatatggcccgactgctcgcctcccaggcagtgaccgttctgggacatattttcatagacatacttatcgccaaccgccgtcttctcataagaaataccctcgcgctcaaatgccttataaagaccgaagttcgacataaccgtggtgacaaccgtattgttgaccagcgtgccctgttctttcatgtattttccacatacatagaggatcttgtcgccatctaccagcttgccctcactgtccactgccaggcagcggtccgcatctccatcataagcaaatccaacatccagatgattttcaaccacatatttctgcagtccctcgatgtgggtggaaccgcaatttgtattgatattcagaccatccggcgtgttgttgatgacatgtgtctccgcgcccagtgcgtcgaatacgtttttcgcaatcgcggaagcgcttccgtttgcacagtcaagacctacccgcatatttttgaaagaccgtgttgccagggaaatcagataaccgatatagcggttgcgtcccgccgcatagtcaacggtgcgtccgatcgcatcgcgcttggcaaatggaatttcgcccatctcgccatccagatacgactcaatcttctcgatcgtctcctcctccagtttctcgccgcgtccattgatgaccttgattccgttgtcatagtatggattgtggcttgcggagatcatgataccgcagtcaaactcctcggtgcgtacaacatacgatacactcggagtagttgtcacgtgaagcagatagacatctgcgccggaagcggtcagtcccgataccagcgaatactcaaacatatagctgctgcgtctcgtatccttgccgatcacgacccggcagcgatctgctttcgtcttctgtccatagtaccagcccaggaaacgacctactttataggcgtcctccacggtcagcgtcacatttgcctcgccgcggaatccgtctgttccaaaatatttacccattttgagagttcctcctacatcatcaaatacagagtccaaaggtcatgtacatttatggaaatcccccactaacatacatgaccttctacgattttgattccaacctgaagaaaatcctgcagccaacggcgcttcacactttctgccgttgctgctttctatgtctgattgcacattttttactgaatttctttcagatagcgacctaccgcatcctgccaggacggaaggcgctcaaatccgttgtccgaaagtttttctttgctgatccggctgttcatcgggcgttttgcctgacccggataagcagctgtatactcagcagtgctgaccggcgtcaccttgacgtccatgcccgcctgcttaaagatctcaactgcaaattcataccagctgcaaagtccctcattcgtcgcatggtaacgaccatatttatcactctgaatcatatcaaccagcagacgcgccagatcgtatgtgtaagtcggggaaccgatctgatcatccacaacactgactgccccgcgctctttgccaacgcgcagcatcgtcttgatgaagttcttgccgttcacgccaaatacccacgcgatacggacgatgaaaaacttctttaccagctcctcaactgccagctcgccctcatacttcgactgaccgtaggcgttgagtggttcccggtggtcatccggctcccacgggcgggtgccctgaccgttgaatacataatcggtactgatgtacatcattttgatgtccagacctttgcagacctcagcgatatttctcgttccatctgcattgactttacggcagagttccatattctgttccgctgcgtctactgcagtatatgcagcgcagtggatcactgcatccggctttgcctcggtgatcacgcggcggcatgcctctgcatcggtaatatccatctcatcgacatccacaccgatgccagtaagaccctgttttttcagctcattcatcacgtcatagccaagctggcctttaacgcctgtcactaatactctcattataatctatctccatacattttttcgaagtactggctgtactcaccgcttaaaatgtgtttccaccagtcctgattgttcagataccagtcgatcgtctgacgaatgccggtgtcaaaattgtatttcggcttccagccaagctccgtctcgatcttggtcggatcgatcgcataacggcggtcatgacccggacgatccttgacgtaacggatcaggctttccggcttgtccagcgctttcaggatggttttaacaacctccaggttggtcctctcattatgtccgccgatgttgtaaatctcaccgacgcgtcccttgtggagaatcagatcgatcgcctcacaatgatcggatacgtgcagccagtcgcggacgttcgcgccgtcgccgtataccggaagttcctcgtctgccagcgcacggctgatcatcagcggaatcagcttctccggaaaatgatatggaccgtagttgttggagcagcgggatactgtcaccggaagtccgtaggttctatggtatgccagtacaaacagatccgcactcgccttggaagaagagtacgggctggaggtatgaagcggggttgtctccgtgaagaagagatccgggcggtctaacggcagatcgccgtatacctcatcggtcgatacctgatgataacgtttaattccataggtgcggcaggcatccagcagggtggttgttcccatgacattggtacggacaaatgcctccgggtccgtgatggaacggtctacatggctctctgctgcaaagtttactacgatgtccggcttttcttcctcgaagagtttaaacacgaagtcgcggtctgcgatatcgccgtgtacaaatttgtaatttggtttgttttcaaccggtttcagtgtctctaagttacccgcataggtcagaagatccagattgatgatctgatactccgggtatttatttaccatatggtgtacgaagtttccgccgatgaatccggctccgcctgtcacgataatcttcattgttttaactccttttaattctgatgtattttatcaacatatttcccatccagtacgtctttcagatatttgccatactggtttttcttgtatacctcgtatgcctccagcacttcttccttgctgatccagccgtttaagtacgcaatctcctccaggcacgcgatcttgcggtgctggtgggtctctactgtcttaacgaaattggttgcctcaactaaggactcatgtgtaccggtatcgagccaggtaaagccctgtcccagaagaatgacatccagatcgccattttccagatagatacggttcaaatcggtgatctcaagctcgcctctggcagacggttttaactgtttcgcatactctactacccggttgtcatagaaatacagacccgttacacagtaattggacttcggtttctccggcttctcctcgatggagatcgccttgccctgatcgtcaaattctacgataccgaagcgctccggatcatcgacatagtagccgaatacagtcgcgccctctttcttggcagaggcagcacgcaggcgtttcacaagtccctgaccctggaaaatattgtcccccagaatcatcgctacggaatcatccccgatgaactcctcgccgatgataaatgcctgtgccagtccatccggacttggctgcacggcatagcttaaatgtaaaccaaactgatgtccatcgcccaacaattccttaaaacgcggtgtgtcatccggtgtcgaaataatcagaatatcccggattcccgcgttcatcagaacggagatcggatagtaaatcatcggtttgtcataaatcggaagcagctgtttggaagttacgcgtgtcagcgggtaaaggcgtgtgcctgaaccgcctgctaaaacgatacccttcatatcttgttctcctcatatgttttattttcacgcctcttttctaaaaaaaggcagatctcatcactataagtaatataccacatttgcctgctgcttgcaaatttatttgctttgcacttctttcttgcattgtacaatcgtaactgttcacgggtaggcacttttggaaccgaaagtgccgtaagaaaacgtggtggcagcaggaatttgccgtatttaaatgcggagccacggcaaattccgttactgggcacgtatacgtgaacagtaacgtacaatccataagcatcattcatccactgcatacacaatcgtccgcgcatccgcaaattcataactgcacgtcacaaaggaatacaagtgggaaacctcctcgtctggcaattcgcgaaaccggcatccctccgtcatttcttctatataagaatgcatctccgaccgatccgcaaattccgtcctacgccgttccccctgactgcccgcagtgagcgctgcaatcagacggagtgtccgccttttcccatctggaaaatagagataagccgtccgatgcttctggaagaaatcttcgtctttcaggcggatcagctcggaaaaccggcttccgtccttcatatgatgcccgtaaaaaatcgaatgaaaatccgatgcatccggtgcactctcgcagtccagaaagacagtcccggctggatctggttttccatccagcccgatgctgcggtacgattcattgtcggttgtctggacaatcggttcgtcgatgtgagtaccgggaatgcgaatccaggcgatgacgtcggcattctgacattttaaggctgcgaaatctggctgccatatcggctctgacgcatctgaatcagattttccagataacttctgctctacatttccttcagattggaaacctctgttttccgcccttctaaccgcatcccccacaccatccgccagaaccagacatccaatcacgatcaaaaaagcacagaagatgcggcgtgcccagcgggcagcgccgtctcctgtgcgcttcttagtacccaaattttccttccagcgattcatcttcgcggatccaatcttctacatcgacttttcggtactcatttttcgtatcacggatatagacatgttcaattccggcattgattaccatgcgcttgcacatcgaacagcagctcgatttttccacatacccgccggttctcgcatcgacaccggtcagatacagcgacgcgccgatcatgcgctctctggaggcactgatcagggcattggcctcggcatggacactgcggcacaactcgtaccgctcgccgcgcggcacatgaagctcctcgcggatacagcgaccgatatcggaacagtttttccgtccgcgcggggcacccacatagccggtcgagataacctcatcgttattcacaatcactgccccgtagtgctttcgcagacaggtactccgctgcgaaaccatttccgccagatccaaataataattgactttatctcttctttccatataggatcccccttccgttttctctaattctttagatgccctcattcatcttcgccagcttcgccgcctgatcggctgcaattaagctgtcaatgatctcatacagatcgccgtccatgatcgaatcgatcttatacaaggtcagtttgatgcggtgctcggtcacacgtccctgcgggaagttataggtacggatcttctcggaacggtcaccggtaccaatctggctgcggcgttctgccgcttcctcgttctggcgtctctccagctccagatcatatagcttggaacgcagaagacggaacgccttttccttgttctgcaactgcgatttctcagtctggctgtagatcacgataccggtcggaatatgggtcagacgtaccgcggagtcagtcgtgttgacacactgtccaccgtttccggacgcacgcataacgtcaatacggatatctttatcatcgatgacaacgtccacatcctctgcctccggcatcacggcaaccgtcgcggtcgaggtatggatacgtccgccggactcggtctccggcacacgctgtacgcggtggacaccgctctcgtacttcatcttggagtaagcgccctggccggtaatcatgaaaacgacctccttgaagccgccgattccattttcactgacgctgacaagctcagttttccagcggttgcgctctgcaaagcgcacatacatacggtacagttcggacgcaaataatgccgcctcatcgccgcctgcacctgcacggatctcgacgataacgttcttttcatcgttcggatccttcggaagaagcagaatttttaattcctgctccagctcttcaatgcgctttttcgcagcatttaactcttccttcgccatctcgcgcatctcctcgtcggattcctcatccagaagcgccagactgtcctctacgtcctgttttgccttcttatactctttatatgcctccacaatcggagccagatccgactgctccttcatcagcttgcggaaacgatttgtatcgcttgccacttccgggctgccgagctcttccatcagctcttcataacggatcagcaaatcatccaatctgtcaaacatgatatcctcctctatcgtctaacggttccaccgtgcctttaccacgcggttaagccccggctcatcctttatcacttctatctcccgatacccggcgatggtcagtatccggctgaccgcctccgcctggtcatatcctatctcaaaatatacgcagccgcccttgttcagatgtttgctgcactccagcgccagaacccggtaaaaatacagaccgtcctcgctgccgtccagcgccagccgcggctcatggtcgcgtacctccggttccagaccgtcgatcaccgccgatgggatatacggcggattcgacacaatcacatcgtacatgacatccgcctccaccgcctgaaacagattgctctgcaaaagtgtcaggctgtgttcctcgatctctgcctgcaggcgcggtccctttgccagccacgttttcaggcggatgcaccacggatcctccgatacctgaaacgattctgaccgcgcagttcccttctgaatcaaaaagagacgtctcgcatttttctttgccacgcgcagcgccgcctcggaaatatccaccgccgtcacgttctggtagccgccaagcacggcaaggctgatcgcgatacagccggatccggtacacatatccaaaagtttcagatccttttccgggtaatcccgaagaacccgctcaactaacgtctccgtatcctggcgcggaatcaggacattttcatcgacagaaaatgtcattcccataaaatcctgcattcccagaatctgctgcagtggaatgcgctctgcccgtttctgaagcatttcctgatagcgcccatagcccttttccaggcgttccgcatggatcggacggttctgatccagataataatgcacccggtcaatcccgaacgccgcttccatcagataccaggcatccgttcctgcgtccggcacacccgcctcacttaagcgcgcgccgccctcatccaacagctctctccaggtcaggtctgttcttccgttttcctcgctcatcgactcatcccctctgtcgtaccgtgttctatttatgactcttccagctgcttttcccagcctgggaaattctccgtcaggtattctctccagtcaaaaactgcctcggtcgccgcgatcgccacctcaatcatcgagtcatccggctccttcgtcgtcagaccctgcatccacatacccggacggctcaccagatccataaacttcgaattgctccgtccagcgcactgcaatacctcatatgatatacccgcaatgaccggaaccagaataatacggctcaaaatccgcatccagatcgtatcgacccggatcaccataaacatcagaatactgatcaccatgacaatcaatatgaaactggtaccacagcgcttgtgctccttcgagctctcgcgcacatattttaccgtcagcggatgtccgtgttccacacagttgatgcacttgtgctccgccccgtggtacataaatgtccgccggatgtcctccatccgcgaaacgagtttaatatagataataaaaatcgcgatccggatcacaccttccagcactgccatcagatgatccgatgtgataactcccttaaacaggttcgcaatccccagcggcaggagcataaaaataccaattgccaggataaacgaaattaccagaactgctgccatgatcgcactctccagcttctcgccgaacacacggtctaaaaactgttcgaattttcccggctctgcatcctcatcatcctcaaaaaagctggcagaatacgtcagactccgcatgccgatgatcatcgaatctgcaaaccggaacacgccgcgcacaaacgggagctgtaaaatcttcgcttttttcgtgatactctggtatgtgtctttttttacttctatctctttgtcaggccggcggactgccactgcatagtcctcgcctttcatcatcatgattccttcaattaccgcctgaccgccaattcctgaatacttcatgctgtcctttcaaaataaaaaaagaagaaaacaaaaaggctgagtttaatgtcgccactaaaacccaacctttacatggttcaaacttatttgcctgcgttgatgccgtacttgcggttgaacttatcgatacgtccgcgggcagcggctgctttctgctggcctgtgtagaatgaatgacacttggagcaaacctctacgtggatgtctttcttggtagaaccagttacgaactcgttaccacagttgcaaactacttttgcctgataataggctggatggattccttctctcatttctttcacctctctgaatttttcattgcgatttccgaccgcttttttaattgcaagccgtcttaaaacggctctatataaagctccgcacatccaggcacgctattccatcatttaagcgttccttccactcgtaaggacgactcacgcagatgtcagaactaccgtctgttaatacagccttataattatatcatggtgtgtactttttagcaagcaattttatctatttttcaatactatttttcttcttacagtcctgttttcctgcctggaagaaagtcctcacagatgcgctattggtgaaacatgatttttagtaaaatgacccctttttccgcgtgatctccacaaattccgtattgttcttcgtcttggcaaacagatccaggatccgctcaacagtatcctccggtttctgcgtgttggtcgccttgtggacgatatcgaccgcttccgcctcggcggacgaaagaagcagatcatctcttcgcgtaccggaacgcaggatatcgagcgccgggaagatgcgcttctcggaaagtttgcggtcaagcaccagctccatgttgccggttcccttaaattcctcgtaaataacatcgtccatacggctgcccgtctcaatcagcgcggtcgccagaatcgtcaggctgccgccctcgcgtatatttctcgccgcaccgaagaagcgcttcggcatatgcagcgctgccggatccaaaccacctgaaagagttcgtccactcggcggaaccaccaggttgtaagccctcgccagacgggtgatactgtctaaaagaatcataacgtcccttccgtgctcgacaaggcgcttcgcccgttctactaccatctccgacacacgtttatgacgctccggcagctcgtcaaacgtcgaatagatgacctcgacattttctcccgttaccgtctcacggatatctgtcacctcctccggacgctcatcgatcagaaggatgatcaggtgcatttctggatggttctttgtgatggtcgtcgccacctgctttaacagggtggtctttccggcttttggcggggatacgatcatgcctcgctgtccttttccgatcggggacagcagatccatcacgcgcatcgccatggaagtcttaacccccggatattccaggtgcagacgttcatttgggaaaattggcgtcagattttcaaaattcggacgtttttccaccacactggtcgggtatccattgaccgaattaatatataataatgcggcaaatttctccgtcgccgacttcacacgacggcttccgcgcacgatatcaccagttttcagattaaaacggcggatctgggacggcgccacatagacgtcattttcacccggcaggaagttttcacaacggataaatccaaatccatccggcataacctccaggattccgttcgcctcgatgccgctgtccagctcctgaaattcatttttcagatcctccatgcgtgcattttccatctcggtacgggtgctttccatctgctgcaccggcgcggtacgttccggctgactgtactcggaggctgcttctgccatctgcggtgccggtgcggtatgttccggctggctatactcggttcttgcgctcatcgcttcattgtaattgttacgcggcacataggaatttctctgatacccctctcgctgcgtgtactcgcgtctgcggttatcctgataacgggtattattattctcacggcgtgtataggagccgtattcattccggcggtatccgccttcgctgcggcgctcatagctggaattctgccctcccgcagcccgttctccattggcagatctccgtggctgcgaatacgtctgtgccgatgtattctgccctgcatccgttctgcgcggctgcacgtgcatttccgtactctctgccggttccgccgatccagtcggatgctcactgacagaagcctggggcatttcttctttctgtcccccttccgccggcttctcaagttcgcacagcctgtctatgatctccgcctttttcagggtgctgatcccctttaacccctgtgccttcgccatttcccgaagctgcaccagagggagtgtctttaatttttctctcatataattctccttgccctgtttaattgtgtcatattctctgggattcaaaaatcagaaataagaaacgtgtggatgtcttccaggtacttacacgaaaccggacaggcagatacctgcccggcatacctttttaacatagccttttatgctgtgactgctctttatcctgcagccaccttggttttattataaacggttttcataaaaattcaagtagacattttcttcatacatatcaattcaggaacatagtaactgttcacaggtagaaattttctgaactgaaaattccgtacgatacagttccggcagcagattttgccgatttggaatgcgtagcatcggcaaaatccatctgaaaagaagcttttctcattcagagcccttcaggaagcgcagccactccccaatcttcttctcatacccattttctgacgggcggtaaaatgtgctgccctccagtccatccggcaggtactgctgcttcacataatggttcggataatcatgtgcatacttgtacccgtcgccatgccccagcttctccgccccgctgtaatggcaatcgcgcagatgggacggcaccgtaaagttgccctttaacctgaccgcctcctgtgcctcatcgaccgccatatacgccgcgttgctcttcggcgcgctcgccacataggtagccgcctgcgacaggataatccgcgcctccggcagaccaatccgctccactgccagcgccgcgctgaccgcaacctgaatcgcctgcggatccgcattgccgacatcctccgatgcacagatcatgatacgccgcgcaataaatttgatatcctcgcctgcatccagcatcttcgccagataataaactgccgcatccggatcggtaccgcgcatactcttgataaacgctgaaatcgtatcgtaatggttgtcccccgtcttgtcatacttcacggcacggcgctggatgcactcctgggctacatcgagtgtgatgtgaatcagaccatcttcactccgttccgttgtgagaataccaagctcgatcgcattgagcgccgcgcgcgcgtctccgcctgccatatcggccagaaaatcgagcgcctcgtccgtcgcctccgcgcgatagcttcccatacccttttccttgtcatggagcgcccgctctaaaagctcgcggatatccgcattttccaacggtttcagctcaaaaatacgggatcgggaaatcagcgccccattgacctcaaaatacggattttccgtcgtcgcaccaatgagcagaatcgtaccatcctcaacaaacggcagaagatagtcctgctgccccttattaaagcggtgaatctcgtcgataaacaggatcgtgcgctttccgtacatccccagcgcatccttggcatcctgcacgacctgttccatatcttttttccccgccaccgtcgcgttgagctgctcaaaacgcgcgctcgtcgtgttggcaatcacgcgcgccagcgtcgttttgcccgttccgggcggtccgtaaaaaatcagcgatccgagcttatccgccttgatcgcccggtacaaaagcttatcctttcctatgatatgcttctgtcccaccacctcgtcaagcgtggacgggcgcagcctggatgccagcggtgcctcctgctcgatcgtatttttccgcatataatcaaataaatccatcgtatcctctcaatcaatcagacattcttctattgtaacaaaagtatatccctccgccgtcaatgtgtcaatcgtttcaagcgctgcatcgaccgaagtctgatatgcatcatgcatcagcaccaccgtgtgaaccgccgcatttttacagatatgcttcacaatccgcgccgtattccggcttttccaatccagcgtatcgacgtcccagaacaccggcgtcatcgacactctctcctgaagttccgtactccatgaaccatacggcggacgtatgtattccggacgttttcccgtgaccgcctcgatccaatcggccgtctcccgaatctcctccacgctcttttcaatcggctggtgcgccagatccacatgtgccatgcagtgaaccccgatgagatgaccgtctttagacatctgtcgcaccagttcctcattacccggaatattttccccgaccagaaaaaaagaggctttcacgcccctctcgcgcaagccgtccagcagctttttcgtgtacaccctgtgcggtccgtcgtcgaaggtcagcgccagctccccgccggaaaagcattccggggaggaaaccgtttggttcgtctggtccgcctgctccacttccgccaaatcttcccactgcatccccactgccagcctgcacacgattcctaagaaacacagatccagcagcactgccgtgcacaggcagagcagttttttcctcatggaacccttattttgaatgatccgatttaccattttagatgtatcagccctgaactgtgacagggcatcccctttatatttgcgtttccgcttccatgtattatatgaacgcaaaaaaggatccagacctccgcatttctgtcaggtctgaatcctctttttctatttaatgtgctctcggaatctttccgccagccgcaaaagcaagtgcaggaaagactccgagcgtacattttaacctactagcgccgaaataccaaagtaggacagcaccacgataccaagcacaatccgataatatccgaaaaacttgaaatcatgcttgcggacatatcccatcaggaacttgatcgagtacacggacacgccaaatgcgaccaccataccaagaaccagataaatgaactccgcgaaagaaaatccgccgccctgaatgaaaaatttcacaatctttaaaaaactcgcaccgaacataaccggaatcccaaggaagaatgaaaactctgccgccgccggacgtgaacagccgatcagcatcgcgcccagaatcgtcgcgcccgaacgggaagtacccggaatcatcgccagcacctggaaacagccgatcagcgccgctgtctggaacgaaatctgcgtcacgcgctcaatcggaaaatgacggtgcacgtttcgattttccagtacgataaacaaaacgccgtagagaatcagcatcgctgctacgacatagccgttcatcagcttatccatgaaatggtcaagcggaagcccaatcaccgctgccggaatgcaggctataataatttttatccacaaacggattgtaccgcgcttctgcgccatcgatttgtgcggtgaaaacggattcaatttattgaaatacagcaccataaccgccagaatcgcacccagctggatgacaaccataaacacttcccggtacgcctcgctgacatccagatggatgatctcatccaccagaatcatatgcccggtactgctgatcggaagccattccgtgaaaccttccacgattcccagtacaattacctttaaaatctcaacaaaactcatgtctgctccttcctacacgttttctatctgccagtcgatcggggcaacaccatgttcttttaaaaattcattggtcttgctgaatgggcggctgccgaaaaatccgcggtacgcagacagcgggctcggatgcggtgcttcgagaatcagatgctttggattattaagcatcgatttcttcgcttgtgccggacgtccccacagaataaataccatcggacggtcctgctcatttaagatcttgatcgcagcgtccgtaaactcctcccagccgattccacggtgggaattcgcctgatgcgcgcggacggtcagaactgtgttcagcagcatgactccctgcttcgcccatttcgtcagatagccattgttcgggatgtagcagccgagatcatcgtgcaattcctgataaatattcaccagggacggcgggatttccacatccggctttaccgaaaagcaaagcccatgcgcctgtcccggaccatggtagggatcctgacctaaaataaccaccttcacctcggaaagaggggtaaaatcaaatgcattgaaaatatcattcgcatccggatatacaacatgcgtctcatattcccgtttcacagtatcgtataactttctgtaatatggctttttaaactctccgctgagcggagccagccagtcattactgattgctcccattgccctatcctctcgtccatgtcattttctgtcgttttctgtcaaacgatggttccattttagcacaatcgaagcggtttctcaagttttgcttcccaaatgtcccctccgcagataagtggacgttactgttcacgcatacgtgcccagtaactaagtggactctcaatcgcaggaagcaaaattgcggataaagccgaccgaattctgcggaatcgatacggtcctctcctgaatatctccgacaatctggtaaaacttctggtttatccgatacatatgcgatttgcggttaaaaaagaccgtcttttcaaagggccagcggatgacggtcggcgtcttgaaatccactcccagctcgagaatcagaagcgcatggtttaaggttccagccagccattcccggtagagattccagcttttcaaataaccttcctcgatatacggattcgccagaactgtgttttctgtcagcggcgccccacagtgcgggcagataccatctgccacctcgccgcgctcccagatatccttcgtacagcctttcgaacactgaagccagttcacattaccgcacggcgccgtgattttcgcttcatccaacgagctttcaaagatgcgcgcatcctttgcggttgtcacgataaaataattcttcccctctgtcatcgatgccagcgcccgatatgcctcctgtacctccgcgcctcccgccttctcccattcgcttccaagcccaatcagcagaaattcgcacgccttaagccgttcccgaagcgttttaagttcctcatctgctgccgtttcatttcttgtcttctctgccatcttgatttgattcccccgtttaaaaaagagtctgcatcttcgcggagcgttttttatttcataggacgcaatttcccatgaaataaaaagagcctggcatgcgctcacgcacacgccagactccccatctgtaatgcaattagctctatgcgaaattacttaaattactttaaggtaactttagcgccttcagcctctaatttagtcttgatctcctcagcctcttccttggaagcgccagccttaactaccttcggagcaccgtcaactacttccttagcctctttcagaccaagacctgtagcttcacgaactaccttgataactttaactttgttcgggccaacctctgtcagctctacgtcgaactcagtcttctcttctgctgcctcagctgcacctgctgctgctacaacaacgcctgctgctgcggatacaccgaactcttcctcgcaagcttttactaaatcgtttaactctaatacggataattctttgattgcctcaatgaactcagctgttgttaactttgccattttaatattcctcctgtgattgaattttaaatcggccttatgcggcctcttgctttactatgcggctctcacgcaccttacaccctgctttgcaggtaagggtcttatgcctcctgctgctctgcgatctgtttgataacacgagcgaagtttgtgatcggagactgcatgcttccaagaagttttccaagaagaacttctctggacgggatggttgcgataacctgcatgccctttgcatcgtagtaagtatcctctacaacgccgcccttgatctcaagcttgtctgcttttttagcgaactcagctaaaattcttgccggagctgtagcatcctctttggatacagccagagcggtcggaccctccagattcggctccagagcctcgaacgcggtacccttagcagcgaaacgaatcatggtgttcttatatactttataagtaacaccagcttctcttaactgcttacggagctgtgtgtcctgctcaactgtcagtccacggtagtcaactactactgcgcccttagcgccgttgaataattctgcgatttcagcaacaaccggctgctttaattcaacttttgccatgattggtttacctcctgttttatttctataaccgcctggtaaacgttttctgtaaaataaaatccctccgtcactcgcaggacagggggatagaaatatacaacgatatcagttccctcggcaggcgtattaaccttatgcctttcggcacctgctgtcttcggcagttaaacacgataagtactataacatagaagtcaagggttgtcaatagacctattaactttttttattttttaaaaatgcagccgcaacctccatatcctccggcgttgtcaccttgatattccggtaagaaccttcggtcaggcgcaccttgtgatcggtcatcgtctcgaccaccatcgcatcatccgtcactccctgctggtactcttcccgactcatcatcttgtcatacgccgcgcggatcagcgggtaagtaaatccctgcggtgtctgaatcatccagacatgcgcccgttccggcgtcacagaggcaaatccgtccgcatccgccagcttgaccgtatcctttgacggcatgcctgccactgctgcgctataacttcgtatatctgatacgatacgttcaatcatcggctcgtccacaaacggacgcgccccgtcatgaatcaggacgcagtccccctccccataggaaagctggctgccgagcgcctttaaaccctcgtagaccgaatggtagcgctcttttccgcccgcaacgatagcgcgcaccttggaaaatccatattttcctacaatctcgtcccggcagtacgcgatctcatccgccccggtcaccagaatcacatcatcgacccggctctcctcaaacgcgtgaagtgcataccagatgaccggcttttcctccagaaggagaaactgcttctgaatcttgcttttcatccgttttccctgtccggctgccagaacgatagcggcggtgcgggtcggatgcggtgtaattttctctttcccaaattgatccaatgtatgttccatctcgtttctcctccatgccagaacgatctcttaaaacactctttttccactttttgtcaaatcaatatttttaaaaaaactaaccgcaaaacaattcttcctgaaaaaatttgtattatctctcgcccagcttcaaattcggcaccgcattcagatcccagcctgcgcgtgcgcccttcttatattcatagtacgccgccgctccgatcatcgccgcattgtccgtacagaagatcggtgacggatggaagaactggatgcccgcctctttacaggccttctccatgcccgcccggagagcggagttggatgccacaccgccggcgatcgccacgcgcttatagccgtgctgtttcgccgcctcgatcgtgcgcgataccaatacttccacaaccgcattctggaacgaagccgccagatccggcacatggatctcctcgcccatcattttcgcatggttaatataatttaagaccgccgattttaagccgctgaagctgaaatcatatggattgtcgcccacttttgcccgtggaaactcaatcgcatgtggattcccctcttttgccgccttatcgaccttcgggccgcccggataaccgagcccgaccgcgcgtgccaccttgtcaaacgcctcgcctgctgcatcgtctcgggtgcgtcccagaatctcaaattcgccataatctttcacaatcaccagatgtgtatgtccgcctgacacgatcaggcacatgaacggcggttccagatccggattttcgatgaaatttgccgatacgtgcccctcgatatggtgtacgccgaccagcggcttcttcgccgcatacgcgagtgctttggcttccgccacaccgaccaaaagcgcaccaaccagccctggaccgtaggtaactgcaatcgccgtcatctcctccagactcatatgtgcctctgtcagcgcctcttcaataacctggttgatcttctcgatatgctttctcgacgcaatctccggcacaacgccgccaaacagcgtgtgaagatcgatctgggaagatatgatattggaaagaacggtacgtccgtttttcacgactgaagctgccgtctcatcacaggaactctcgattgcaagaatgtaaacatcttctgatgggtgtccgttctctgtatcatgcacggaaatctctgcccccgataccggagctttccctagtccccgttccaatgctcctgaaactggcatttccatccgttcttccttcttttcttctatattctctctcttttcttccgtctgcatcgcccttactcctcatcaaatcccaactctgccgtccagccatcgcgggcggctttcgctctcgggaatatctcacgcactttatccatataatcatccggacggatgagcgacgggctgtaatgagtcagccacatttccttcggctgggcctccttcgccaggtgcgccgcctcctggaatgtcatatgcttgtattctctcgccttggcttctttcccgtcctcgccgtacatgccttcacagataaacagatccgcatccttcgcgtactccgcaattaccggaagcggtctcgtatcggtacagtatgccaccttgattcccttccggtcacctccgagcaccatatccggtgtcagcgttctgccttcctcctcgatcgtctcccccttctgcaggcggctccagaacttctgcggaatctcctgcgcccgcgcgcgttccacatcgaaccgtccctttctcggaatcgaaatcgagtacccataacaggtcacattatggttgacccggtacgcatcgatcacatacggtccaatctgaagctgctgtctcggctccgtcagctcgataaactcaagcggaaacggcaattccggcgcgatcgtccgcagtgccgtcaccacgcgttccagtcccttcggtccaatcatcgtgatcggctccgtccgctccgcatttcccatcgtcaacaaaagtcccggcagaccgctgatatgatccgcgtgataatgtgtaaaacaaatcacatccaccggcttcgggctccaacccttttctttcaacgcaatctgcgtgccttccccgcagtctatcagcaaattgctgcccgagcagcggaccatcaaagccgtcagccaccgatacggcagcggcatcatcccgcccgttcccagcaaacatacatctaacatgaaacatcctcttttctattaaataaatgattcataataaatctttttaattaaaagtcatgcaaaaagctgtcaaaacagcttttctcctaactcccatatcatttaataatatcataaagaaatactatgttgcaagccagaaattcagcaatccaattcacaggagagacgcagatggcgcaccgcctgtcccgcgtttctccgtccccctcacgactctacaatagttccgtcctctcctccttatctgcctcaatcagaaattcccgcgtcactccatcatagcactcctcgcacagatcaaaatgatgcacctccccatctttctccgaaaaatagtcccatgccacatcaaaatgcgccgctccttcgcgcagaatgccttctttcaccgccagcttcttcccgcaccggttgcagacaaccgacagaagaatgccgctctctccatattttctcatgctctcctcgcctttctcttctatatacgcaaaatggagaagccatgtcctccacagcttctccatcattatactgttttttataccggtttttaagcggaaagtgctggaaatacttacagtaccttatatcccttcgatgtcaggcagatgctgacctccctcacatcgtccgtgtgaagcaccataaccggcttgccagaatcacgattgaaggagagatacaggtaatctacattgatattgctctcttccagggaaattaacagacggttgagtgctccgacctcgtcatccagttcgacgccaagcacctctgtcagacggcagagataaccagcttccgccagcactttctccgcgtgctctggattagaaacaaccatacggataataccgtactccgcactgtcattcgtgatcgacccccagatgttaatattctccttctgaagaagggatgtaatattctgtaaacgtcctttcttattctctgcaaaaatagatacctgactcagcatatgaacctcctaccgttcttttcttttaatttaacactgtaaagtgttacgcttttatctgttaaacagtatactcatttccatttcatctgtcaatgctttttccgcttcttttccaataaatcagcgcatcttccgtcggcccgctgtaataattcttccgaaccgcctctttctgaaagccatacgcctcatacagcgcaatcgccggggcattggatgcacgcacctccaaggtgatatcctcgacgttttcttcctctgcttcccttaacagccgttccatcagaagccgcccatagccgcgcccccggcacgcgccgtgaaccgcgatccgcatcagctcgccttccccggcaatgacgcggaaattgctgtagccacggacggtttcatcctctttcagcacccaggttttatcccagctgctcgtcagcagatcctgtaaaagcttctccgaccatgcatccgaaaagcattccagttccagtgcccggaccgcaggaagatcccccggctgaaaatccactatctgaacacgaagctctttttgcgttcccgttcctgccgccattatttcttctccacgaccacaataccggctgccagcttatccatctcgccctggcgctctgcgacctcgcgctcgcgctccgcctgcgatttccgcagataatccggcttgtgctcggctgccgtctcggtctttccctctgccagatacactgcgccaagcgctgccaccgccgaagctcgctgacggctcgcctgtgccggtgcaaacgaatacggcaccttcatctcttcctcgatcaccgcccggttgaccggcacaccgtcccccaggaaaatcacgcgctcgccgcgctcatttaactcggcaatcaacgcatggatatccgtaatgtactgttctttcacaatctcgaacttctcttcataccgatagagtcccgtgtacacctgctgccgtctcgcatccagcatcgggcagatgagcgccgaagccccgtacagacaatatcccatcgcatccatcgtcggcacatggatcagcggcttcccaagcgccagtcccagtcctttcgctgtcgcagagccaatccgaagccccgtaaaagagcccggaccgccggatacagcgattgcatcgatgctttccaacggcacctccagcattttcacaatctcatcaatcatcggaagaagtgtctgcgaatgcgtttttttcagattcaccgtatattccgccgtgatcacatcatccgtaacaatagcaaccgatgccaccagggatgcgctttcgattcccaaaattctcattttctctttcctcctgtcgccggctactgctcgtttactgaaattttccggtaatcaaagcccttttccagatccttttcaatcgtgatctggatcggatgttccggcaggatctcgcggatgcgctccgaccattcgatcaggcagatgccctcgccgtagaaatagtcctcatagccaatctcatccatctcgtccacatcgccgagacgatatacatcaaaatggtagagcggcaggcgcccatcgtcgtactcctgcacgatcgtgaaagtcgggctgttgaccggttcctgaattccaagtcccgcggcaaacccctgcgtaaaaaccgtctttcctacgcccagatcaccattcaaacaatacacctgccctgcctgcgcttccattccaagcttttttccaaacgcatacgtctcttccgggctgtttgtttctatcatcatgctcgaattcctcttctcttttcctgcggcagatttcttgtaagcatactgagaaaaatctgctcctccgaacctctgaacacgcgcttcggcatcaggtacgccttgtctcgacccaggtaaagcacatagattcccgcgatctttttcacttttaccagcttatcccagctgatctcacccttgccgttcgcctggcgggcacggatgccctcgtctccaatgtgaaatacaatctcagctcccgttttcgcatccccggcggtgcgctctgcctgtttccagattgcaaaaatctgaaagcctgtcaaggcaatcactcccagaatcaccagattcgtcacctgcgttcccagacgttcctcgctggctgccgctgcaataataacgagcaccgtcagtatgatgcatccgattccacgcagtcccgcccagaaattgtacatcgaataaataaaaatctcttttggctgtatttttacacgtaagtccattttatcttctccctaattttctatgccttatccgccgccccattccagtcagcgctcctgcatcctataaccaacggctaaatctgccgtggtttacttcgtctcccggattttcatcgtcagcgaaatgcgcttcttcgccacatcaaccgccagcaccttgacctccacgatatccccgacgctgaccgcctccagcggatgcttgatatagcggtctgtcatctgggacacgtgaaccagaccatcctgatgcacgccgatatccacaaacgcaccgaaatcaatgacattccgcacggttccttttaaaatcatgcccggcttcaaatccttcatttccagcacatccgtgcggagaatcggcttcggcatctcctcacgcgggtcgcgcgccggtttttccaactcgctcacaatatcgagtaaggtcggctcgccgatcgaaagctcttttgccagctttgccgtatccgcgatctccttgcggatattgcggatgccacccgccgcgatctccttcggatcatgtccaagctgctttaaaagtgcctccgctgctttatagctctccgggtgcacactcgtcgcatcgagcggattcttgccgccctggatccgcataaatccggcgcactgttcatacgccttcggtcccagcttcgccaccttcaaaagctcacggcgcgttgaaaatgcgccattctcctcccgatatgccacgatatttttcgcaatcgtcttgttaatgccggaaatataggcgagcagcggcgccgatgccgtattcagatccacgccgaccttatttacgcacgtttccaccacgccctgcagcgcctcgcttaaatttttctggttcatatcatgctggtactgaccgactccaatggatttcggatcaatttttaccagctccgccagcggatcctgcaggcgtctcgcgatcgatgccgcacttctctgtccgacgtcaaactgcggaaattcctccgtcgccagcttactcgccgaataaaccgacgcgcccgcctcattgacgataacatactgaaccttctccggaatttcttttaagagttccacgatgatctgctcagattctcggcttgccgtaccattccccactgagatcagggaaatgccgtacttgcggagcagctttttcacgatctccttcgactcttccacgcggttctgcggcgcagtcgggtaaatgaccgtcgtatcgagcacttttcccgtctcatccacaactgccagcttgcagcccgtccggaatgccggatcccagccgagcaccacacatcctgcgatcggcggctgcatcaggagctgttccaggttcttgccaaatacctgaatcgcgccgttctctgctgtttctgtcagccccgcgcggatctcgcgctcgatggccggtccgatcaggcggcggtagctgtccagaatcacttcttccatcacgcgcgccgcatccccatccgggcggataatcagctgtttctccatataccggacaatctgctcctccggcgctataagcttcacgctcagaatcttctctttctcaccgcggttgatcgccagcacacggtgtcccgccagctttttgactggttcggagaaatgatagtacatctcgtacaccgactgtatcttctcatcctttgcggatgcctccaaaagaccgtcctgcatcgtctttttacgtgcgtagttgcggtattttgccatctcgctgatctgctcagccagaatatcacgcgcgccgtctattgcctccgaaacatctgcaacacccttttcttccgacacatacttcgccgcctccgcctccaggctgccgcccgcttcctgcttgtaaatccagactgctaacggttccagccctttctcacgggcaattccggcacgggtgcgccgtttcgggcggtacggaagataaagatcttccaccgcaaccagcgtcaccgcatcgcggatctgtttctccagcgccggagtcagcttctcctgggcgcggatcgcaccgatcacctgctcctttttatcctccagattccgaagatagcgcagtcgctcatctagctggcgcagcacctcatcattcagggaaccggtcgcctccttgcggtagcgcgcgatgaacggaatcgtgtttccctcatcgatcagctttaccgccgcttcgacctgatttctccctatctgaagctcttctttcaatgcctgtataatatccatgcaaaaactctccttcaatatcaatacgctgtttaatcataccattccagcgcatatttcgcaagtcaatgcctaactggacaagcggctttattcatgatacacttttatcggattcaatctgccagatgggcatagattttgttttgccctattcagcggctgtctctaattttcagaaaaggatgtagctgttctcttttttcacagttatgaaaggattaaatatacgatgagttattacgatgaaacaccttctccgaaggaacattcagatacaaatgaaacccggcgcaatcgttcgcgccgctatgctacgatgtcaatgatgtgcggcatcttcgcatttttctccctgtttttgagtttttccgccgcgattctgctcggaatgtcggcgaatgtactgtttgtcctatccaaggaggaaggacagccgcggcgcggcagcgcagtggtcgggctgatactgggagttatgtctaccatctttggagtagttgagtttttctgcctgatccaggtgtaccatatgattacggatccgcaatatgcaccgttttttgatcaggcgatggacttgtatgagagtttgattggcccgttacaataaaatgattggcaaggggacctttttctgtgtatttcttgcgttaaaaagcacaccgcgtcatgaatgactttggcgtgctttttactttatatcctattttgtatagcgaatcgtctggcggatatcttcctcgaacgccgctgccagtttccggaagcgtgcttcggtcatttctccggttacgaccgcaaattcgtccatctccgggagttcgatggtttctgcctcaccgaaggctgcacgcacatcggcaagtttgtcggctgatttgcctgccagtcggaggaagtagctgaaggttacttcgcccatcggtgcaactggctgtttttcgtcggtccagccggtcgggatgttgtcttccatgtgtccggcgatctctacgatgtcgctgacgactgcgctggcggtcgggagttttccggcgccgctgccgtagaacatgacggttccaagtgtattgccgcgaaccatgactgcattgtatacgtcattgactgcaaagagcggatgatccggtccgatcatcatcgggcatacatagacgctggctttattgccttccatgcggctggttccaaacagtttaatcgaggttcccagctttgccgcatatttgaaatcggtatcggtaatctttgtgatgccctcggtcggcacatcttcgtaatttacttcttttccagttgccagtgaggtaagaatcgtgatcttgcggcaggtatcgtagccttctacgtctgcctccgggttgcgctctgcatatccgagttcctgcgctttcttcaaggcttcctcaaaggtctgaccttctcttgccatcttggtaaggatgtagttggttgtaccgtttaagataccgctgatttcctcgatcttctcgcctgcaagagactgggtcagcggacgcagaagcggaatgccgccgcctacactggcttcgaagaggaagtttaagttcttctcgcgtgcaatcgccagaagctcggtgccgtgtgccgctacaagtgccttgttggaggtcacaacgtgcttaccggctaacaggcacgcttttgcaaacttgtatgccggattgacgccgcccatcgcctccacaacgatctctacttcttcgtctttttcaatgatctcaaaatcatgaacaatctgcgcttcgtgcggatcacccggaaattcacgcagatccagaatatattttactgcaatctctttgccggttttttctgtgattttgtctttgttggtttctaatacttctacgactccggaaccaattgttccatagcccatcactgctacctgaatcataatctttactccctggctataatttttacgttgtgtactcccgaattttcttccatctcttcgaccatatgcgatatatttccggtatccgagcggacttccacactgagtgtcagcgtcgccacattgttgaccggaatactctgatgaatcgtcagaatattcgccttgtaaatcgctacgatatgaagaagatccgataaaagtccctgttcatcatccatctgcagcaccatggtaatcgttttgcccttggcgttgtcgtaaaatggaaaaatatcgtccttatacttataaaaggaactccggctgatcccaagctggtcggtcgcctcctgaatcgtcatcgccttttccgacgcaatgagcttcttcgcttccgccaccttcaaaaggacttccggcactgctttctgctttaacagataatactttgtcttttcttccattccatctccgcttatgtacgcaccagaaatacatttgtgtttaccaggaagatattatcacatttattgacactctgcaatctatttttttcataataaccgaattgtatctgtaaaaaaacagcctgaactgacggcactcgacagagtgttttcttctctgtcaaacttttgtgccgccaatccaggctgatttatcttcttttacgcctcttctgtcttctggtttttcaggctgatccactttaaatacgcactgataaacagatcaatatctccatccatcaccgcgttcacattgccattttcggcgttcgtccggtgatccttgacgagcgtgtacggctgcataacgtaggaacggatctggtttccgaagttgatgtccttgacatcgccgcggatgtcggacaacttctcggcattctcctgttgtttgagcaggtacagctttgcctttaacatctgcatcgccttgtccttgttctggaactgggaacgctcattctggcactgtacgacgataccggtcggcagatgcgtgatacggatcgcggaggacgtcttgttgatatgctgtccaccggcaccactcgagcgataggtatcgatccgcagatcgtccggattaatctccacatccagatcttcttcaatatccggcatgacatcacaggaaacgaacgaggtctgacgcttgccagccgcgttgaacggggaaatacggaccagacgatggacacctttctccgatttcaggtagccgtaggcattttcgccgttgacctgcagtgtgatggacttaagtcccgcctcgtcgccatccaggaaatcaagcacctcggtcgtaaagccctttttgtccgcccagcgctggtacatacgatacagcatactgcaccagtccatcgcctcggtaccacccgcgcccgcgttcagcttaaggatcgcgttgcagccgtcgtactcgccggacaggagtgtctttgtgcggagttcttccagctctttgacaaactcatccaacatctcctgaatctccggaatcatcgccgggtcattttcctcatagcccatctcgatcatgacctggatatcctcatactgctgttcaaggtgcttgtagccatccacggtatctttgagatttttcgcctcacggaccgtcttggtcgagcgctccggatcatcccaaaagcccggttcttccattgatttgtcaagctccgtgatgcggcgctccttattttccagatccagggaatccttgacctctttcagcgtctcatcgtaggttgataatgtatacttaaactgatctaattcaaccatgctctcaccttctccattctcatctatctgctgccattttcctcaacggttcagcattctttcagttatattttgttacggatcacacacatatagaccgtaactcttttttatatttggaaaaattcccggaaccaggtatttcgccatagtttcgggaattttctgcacagactgctgcaaaatcacggcagcctgccttctttcatctattaattcttcgcgtacagcttccgtccacaacactgtttgtacttcttgccggaaccgcatgggcacggatcgttcgggtaaatcttcttctcctcacgcttcttcggtgcctgcacggtgctgtcgtcacggttggttcccgttaccttggcagccggttcacgctcgaccttctgctctgcacggatgtggaacagaatacggacggtatcctcacggatcgctgccgtcatgctgtcgaacatctcatagccgctcatcttatactcaaccagcgggtctctctgaccatatgcctgcagaccgatgccttcgcgcagctgatccatatcgtcgatatgagccatccactttgcatcaaccactttcagaaggatcacgcgctccatctcgcgtacctgttccgcgcttgtaaactctgcctcgcgtgtctcataaagcttcgttgccgcctctttgagcatatgtttcagctcatttttcttcatatgctgctggtcttccgtcagctgaatcggctctaacgggataaccggaagcagcagggaatttaactcggacagatcccactcagccggttcctgctcatcagagatggacatatctacggcgttttctacgatatccgtgatcatcttcatgataacggaacgcatattctcgccatccagtacacggcggcgctctgcgtagattgcctcacgctgctcgttcataacctcgtcgtattttaacaggttctcgcggataccgtagttgttggtctcgatcttcatctgtgccttctcgatcgccttggaaagcatcttgtgctcgatctgctcattctccggtacgcccatggcgttgaacatattcatcagacgctcagaaccgaagaggcgcatcagatcatcttccagagacaaatagaaacgtgattcacccggatcgccctgacgtccggcacgaccgcgcagctggttatcaatacgtctggactcatgacgctctgtaccgataatctttaagccgcccagttctctggaaatctcatccagcttgatatccgtaccacggcctgccatattagtcgcgatcgtaacggcaccgtggatacctgcatctgctacgatctcagcctccagctcatggaatttcgcatttaataccttatgcggaatgccgcgtcttgtcagcatcttgctcagaagctcggaagtctcgatcgtaatggtaccaaccagaaccggctgtcccttttcatgggctgctgccacttcctcgacaaccgcatggaatttctcttttttcgtcttataaaccgcatcctcgtaatcaatacgctgtaccgggcggttcgtcgggatggagataacgtccatctggtaaatgttacggaactccttctcctcggtctgtgccgtaccggtcataccagccttcttgttgaacttgttgaagaagttctggaaggtaatggttgccagcgtgcggctctcacggcgcacatgtacatgctccttcgcctcaatcgcctgatggagaccatcggaataacggcgtcccggcatgatacgtccggtaaactcatcgacaatcagaacctcgtcatcttttaccacgtagtctttatcgcggaacatcaggtagttggcacgcagtgccagaatgatgttgtgctggatctccaggttctccggatccgccaggttttcgatgtggaagaaatcttcgaccttcttcacaccagcctcggtcaggttgactactttatctttctcattgactacgaaatcgcctgtctcctcgatctcctcgcccatgatggctgccatcttggaaaattctgctgattcctcgcccttttccagctgacgtgccagaatatcgcacacctcatagagcttcgtggacttgccgctctgtccggaaatgataagcggggttctcgcctcatcgatcaggacggaatcgacctcatcgatgatcgcatagtccagattccgcataaccatctgctctttgtagatcgccatgttgtcacgcagataatcgaaaccaagctcattgttggtaacataggtaatatcacagttgtaagcttcccggcgctcgtcggaattcatcgagtttaaaaccactccgaccgtcagaccgaggaatctgtgaacctcgcccatccactctgcatctcgttttgccagatagtcgttgacggtaacgatgaatacaccctttccagccagcgcatttaagtacgccggtgcggtggaaaccaaggttttaccctcaccagtacgcatctctgcgatacgtccctgatgcaggacgataccaccgatcagctgaaccgggtaatgctccatatttaatactcgtctcgccgcctcacgcacggttgcaaatgcctccggcagaaggtcgtccagcgtctcgccgttcgcaaggcgctctttgaacttgcgcgtattgtcgcgcagttcatcatccgataaggcagccatctgctcgcgcatacctagaatcttatccacaatcgggcggatcagcttcagctcgcgttcgctgtgggtaccaaacactttctctatcagattcatgcttttctctcctatttcttgctttctcattcttttttcgtttttatagctcaatgtatgatatgttttagatcgaaaagatcgtataggtatagttatacaatcttatttattctaacactaacagggattttattcaatgatttcatgatttttttacatttattctgcgcacgcgcccggctgagataagccgaacctgccgtacccggaaaatcccagccataaaacaagcccctccatacacgaacaaagggacctgctgtaaaacgctgcctccctgcctatccaggtaaaacgttttttcttctgccagcccgccaactttatggtaaaccagacaagttgcacaaaatatatgttcgactttcttgttgtccacattatccacattttgtccccagttttgtggataagttttgcacacccattttttcccttttttagggaaaatggagttttgcaccgacttatccacattatccacaatttccgtctgttcacgaagcacccattttccccggcgcattttgatttcttttttgttcagatctcataaacttgcatatttcttccaaaaatacaagcagatctattgacaaatgaagaaccctcgcattgcctccaaacccccgttttttctagctttttcggcctttttctgttgcaaaaacacacccattctgccctatcctgcaagactcttttttcatatttcattgtccgccgcacaaaccgcgcgcaaatcccttataaaacaacagcaattcgtgaaaaatcaaacgacacagtatttcgacctgtttttcaattaattgtgttgacaattttgcgaaaaaggttgaatttaacatccaaaagtggtatactatagccatcccaataaaaaggagcgatgattatgcgttataagattactggaagaaatatcaatgttaccccggggttaaaagcagctgtagaggagaagatcggaaagttagagcgatacttcaatcaggacactgaagtgaatatcacacttacggttgagaaagatcgtcagaagatcgaggttaccatccctgtcaaaggcaccatcatccgtgcagagcaggaaagcaacgatatgtatgtatcgattgatttggtagaagaaatcatcgagcgtcagctcaaaaaatataagaataaaatcgtagacaagaaacaggcggccgttgcattctctgacctcttcataaacgaagaatatgattccaacgacgaagtagatatcgtcaaagtaaagaaattcgctatgaagccgatggatccggaagaggcttgtgtacagatggaactcttaggacatagtttctatgtattcctgaattccgagaccgagcaggtcaatgttgtttacaaacgtaaaggcaacacctacggattgatcgaaccagaattttaattcatcgcttcgtactataagtagacaagtttcctagcaaaaaggggagctgccatgtggcagttcccctttttgcgttgtgttaagttccattcatatcctatttcttttcttagaacagacccgtgatccgtccattctcatcgacatcgatcttctctgccgccggcaccttcggaagtcctggcatcgtcatgatgtcgccggtcagcgctacgatgaagcctgcgcccgcggatactttcaggttgcggacagttactgtaaagttcttcggtgcgccgagcagcttcgcattgtccgaaaagctgtactgcgtcttcgccatacagatcggatagttaccaaatccaagctcagtcaggcgttttgcctgcttctttgctgcatccatgagtacaacgccgtcgccgtggtagatcttcttcacgatcgcatccagtttctcctcgatcgttgtatcggtctcgtagcagtagtggaactcgctctcagtctcgcacaggcggatgacttcttttgccagctcctcgccgccttctccgcctttcgcccatacctcggacagagctacattgacaccgacctcatggcacttatcctcgatcagctttaattctgcctcggtatccattgggaagcggttgatcgctacgacacacggaagtccatataccttggtaatattttctacatgctgcatcaggttcggaagtcccttctccagtgcttccagattctctgcgtttaagtcagccttcgccacgccgccgtgatgcttcaaggcacgtaccgtcgctactacaacgaccgccgacggtttcagctctgccatccggcacttgatatccaggaatttctccgcacccaggtcagcgccgaagccagcctctgtgatcgtgtaatcacccagctttaatgccatctttgtcgcaatgacggagttacatccatgcgcgatgttcgcgaacggaccgccgtggataaatgccggtgtatgctctaaggtctgtaccaggtttggtttcagggcatcctttaaaagagccgtcatcgcgcccgctgctttcagatcaccggcagtgaccggttcctcgtcataggtataacctacgataatcttggaaaggcgttctttcagatccgtaatgttgcgtgccaggcacaaaactgccatgatctcgctggcaaccgtgatgtcatatccgtcctcacgggtcacgccatccacgcggcgtcccagaccatctacgatgttgcggagctgacggtcattcatatcgacaacacgcttccaggtaatacgcttcggatcgatgcggagtgcattgccctgatagatatgattgtccagcatcgctgccagcaggttgtttgctgcgccgatcgcgtggaaatcaccggtaaaatggaggttgatatcctccattggaatgacctgtgcatatccgccgccagctgcaccacctttaacaccaaagaccggtcccaacgacggctcacgaagcgctacggttacctttttgccaaggcgtttcaatccgtctgccagaccgaccgtggtcgtggtctttccttctccggctggagtcgggttgatcgcggtcaccagaatcagttttccatccttgccctcggtctctttcagaagactgtagtctacctttgccttataatttccatactgctccagatacttctcgtctacgcctgctgcctgtgcaatctcaccgattttcagtggattcgctgcctgtgcaatctcaatatctgtcatcattactcctgtacctccctgtttttgcggttttgcctgttccggaagtttccacacagtgaatgttatctgctttatctgctgtaaagacgatccccccctgtgaatttcccagaaaggctgtgaatgttatctattatatactgtgtctgacaatttggaaagacacaaaattgatttttcacaaaaaattgcatccgattccagtttttctactcttttctcaagttctgatacataactttcgtccttgatcgatgccagattgatcttcacattaaagagggcacccacaaccgctgtccgggctaacatcgccgcaatcagaccgtcagaaacggcacccttattgcctctctttacgaccgcttccgccatcggaaaaatctttgccgctgactccgcaatcgcaagcggcgcttcggttgcctcttttaacccctgctgcagggcggcagtgcggatttttttctcctcctccgtctccttcggaagtttcagcgctctcatatatccattgaacgattcgctgtcctttttgatccctgacagcagctcctcatgcagcgcagcgccctcagctgccagcgcctgcatttcctcctgcaccccggcatatttttcctttccgatcgtcagatttgccaccatttccatcaatgccgcgcccagcgcccccaccatcgccgacacgcttccgccgcccggtacagacgccttcgaagcagtttcttctacgaactgatttacggaaagttctcttaattctgccatgatttttctccttttttatgaaaaagaatgtgccttggcacattctcgcgcctcgcgcggtcgcctgcgacataattcttcttcgcgcgagtgcacacattttcctatgaaaatgaaaaaataccgcaaaattgcttgtctcaccgatcagaaatcttctgccccgctggcaacgtaattttgcggtattcccaccgcgccctacggatatgaaatcgttccgtaagaaccgatatactcctttatctgcgtttactaatttaagaatgaaactgccttacacggtgttcggtagttggacggcgaaatcttgatgccgctctttgccgtacttgcgtggataacctgtccattgcctatgtaaagtgctacgtgattgatataattgccgctcgcataaaaaagcagatcgcccggctgtactgcgctgaccgcaacctccttgccctttgccgcctgatctctcgagcttcgtccggttgaaataccgaaatgtgcaaatacactcattgtaaatccggaacagtccgcaccgtttgtcagactggttccgccgtatacatacggatttccaaggaactgctttgcgtatgccacaaccgcagaacgggtagcatttgttacttcatttccagaagaggacgtaccgcctgtgcccggtccgccgcccggtccaacgccgcttgcagtggtcgctttcgtcgctgccacggtagtcggcgctttcgtctcaactgcctttgtcgtctccttggctgccgctgtcgtcccagctgccttgctttcgctcggattcgcctctattgttccgctgtaggaagtctccggtgctttggtcgtctctttggcagctgccgtggtttccttcgccgctgccgtggtttccgctgccctcgactcttcctcggctttcttctttacctgttccaggttctcgatcgccgcattcgcttcctgtttcagtttttcttcttcagctttctgctgctgttcctcagctacggaaactgcctgcttaaagtctacctgcgtcgtaatataatctttatacacatatccgaccagatcattatcgacggaaatcttggcaaaatcgccctcttctccgatcacctcatactctgcatcggcagaaagaagatccagcgtcttgccctctaagctcggcgtctctctcaggcgaagcgtagaggtatttgtaacctttgcgtaggttgtgccgacctccctggcaatcttggacgcttcctcaccggtcacaaaatactgtgctttaatataaccggtcacggaacccgactggatatggtaccatttgccgccctcgccgtccaccgtgtccagaattgtcgccgcacagttattgtaaatctttccaactacctcgctgcctgtgctcgcctgtgcgcgaacattgacataattggtcacacgggaaatcgcgatattatcgtagatcgacttggacatcgcgcggacaaccgcctcagtctcgccagttgtctcctttggctgggctttcgtctctgctggcacctgtgccgatttggctgtctgcgcgccgcctgccactcccgtctgaccggctcccgccactgccagaacttctttagaagcaaatgcctccgccagctctttttccgggttcaagctgctcgcatagtaattattgatcgccactgacgcaccagcgaccggggcatccgtctccagattcatcgccgcctgggcgctcatctgtcccgtccctgccatcacaaggcacgctcctgatgctatcagaaatttcagcgtttttctcataaggacctcctactcttctgtccgttctgttccgtcgttttatctcaaactgtaactgttcagtaccttcacagtcacgcgcaaaaatccattaaaaattgactacggcaatgggatttttgcctgctgacccatgttttcgtatggtcagcgcagtaaatgcgcagacctactaaacagttactctgttttcttctatgttaaaaatgagttatgcctgaagatatcgctctgcagatgccacgcagtttgcaccgtccgatgccgctgtcagaatctggcgcagcgccttggtccggacatctccggctgcaaatacgcccggaacgctcgtctgaccgctctcatccgcccggatgtagccctgctcatcaagctctaactgacccgcatacagctcactctccggtgcgattccgaccgcaataaagacaccatccacgtccagccgcctctcttctccggttttggtctgtctcagccgcaacgcctccacctgagcgttcccttcaatcgcaaccgtctcgctgttccagacaaattcaatattttcaagcgcctgtaagcgctcctgcagccgttttgccccgcgaagcttgtctctgcggtggacgatatatactttttcacacatccgtgcaagaaaaattgcatcttccagcgccgcgtcgccgccgcccacaacggcaaccgtccttccccggaaaaatgccccgtcgcaggtcgcgcagtatgaaacgcctgccccgcgaagttcctcttctcccggcacctccaacgtcctgtgatgtgctccggatgccagaatcacacagcgtgcctcatacgtctcttcctcgcagactactttcttcacatttcctgaaagctcgacctgcacgacctcatcctgtacaactcttgctcccagcttgtttgcatgctcccggaactgtctggaaagctcaaagccggtcacacccggaaatcccggataattgtccacctcccaggtattcagcacctgtccgccgctgattccattcttctctatcacaatcgtgtccagacacgcccgctgtgcataaatcgccgcactcaagccagctggtccggaaccaatgattattatatcatacatggtatacagttcctttcttccgaatctgttcggtaattgatccgctctatcgctgtgtcagatccatttggttttagtataacacattttggcactttcatacaatgctgtaaaacactcagaacagcaaaaaatggatgaaaatttcttacgattttatgacaggcggaaaaatgaaactatttcatgaattttaaatacatgctataattcaatcaaatatgatgttggggtcaaaagcttttgacccctctgataccgaattgctctgcactgcgtgctcccgcaattctcaaaaacattcgcatataaggagtttactgccatgaatcataaaactatcctcgtaaccggcgcttcccgcggaatcgggaaagcgattgcattaacctacgctaagaacggctgggatgtcgtgattacctgcctgaggcgggaagaagaattaaaaaagacccagcgcgaaattgaagcgctgggcgtttcctgccttgcctggatgggcgatgcgggcgattttgagagctgttcccgcctgtttgacgcgatccgggagcgcttcggttccctggatgtcctcgtcaacaatgcagggatttcctacatcggtctgttccaggatatgacgccggacgaatggaaccacattctcaataccaacctgacctccgtcttcaactgctgccgcctcgccgttccgatgatggtgtcacgcaaatcgggacgcattctcaatatttcctccgtctggggcgtctgcggcgcttcctgcgaagtcgcctattctgccaccaaaggcggcatcaacgccatgacgcgcgccctcgcgaaggaacttgcgccgagcagcatccaggtcaacgcgatcgcctgcggcgctattgacaccgaaatgaaccagtttctcgatgaagaagaacggaatgccctgctggaagaaattccagcaggacgtatggggcgtgccgaggaagtcggaaaactggcataccagctggggagcgaggactcctatttaacgggacagataattcaactggacggcggctggatctaaaacctgaaataaataaacggattatacgtgctgctgacgagatacatggtacacaaaaacagcagcacagccataatcacaatatccactgtctttgtcacttctttctcatacaaatgctcccgcagcttcgggcatatactctgcgcgatgcccgaaagcagcacgcccagcaccgcaagaaaaatcaccttcggattcacgaacagcgatgccggatagatgccgttctcccaggtaaacatctgatgcaggatcactttcgcatccgccagcgtatcggcgcggaagaacacccagccaaccactacaaccaacgccgtatagatgtgattcagtccccggaagcagttcttctccaatagcttcccaagtcccatgcgttccaccaccagaaacagcccatggtacaatccccagatgataaaggttgccccagctccatgccagagcccggtcgcaaaaaagacaatcagcagattaacatacgtccgcacctgccctttccggttgccgcccagcgggatataaagatattccctaaaccaggtcgagagtgaaatatgccagcgtctccagaactcgcggatcgaggtagagatatacggataattgaagttctccataaaatcaaatccaaacatttttcccaatccgatcgccatatccgaatatcccgaaaaatcgaaataaatctgaagtgtgtacaaaaccgccagcatccacgcattgaccgttcccagctgtgccagcggtttctccatcatccagtccaccgtcgccgcaaaggtattagcaaacaacatttttttcgccagtccgtaggaaaagcgcttgattccatacgccatcccctccgccgtacactgccggttcccaatctgttcgcagacatcgtgatacttgacgatcggtcccgcgatgagctgcggaaagaaggaaatatagagcgccagatgaaagatatttttctgcgcctgaatcgtcccccggtacacatccaccacgtaggaaagcgcctgaaacgtgtagaaggatattccgaccggaagagcaatctcgcggaaagaaagtgtatatgcgccgcccgcaaagcagcttaacagagaatttgcaatctcgactgcgaagttaaaatatttgaaatagcccagaagaaggaggtttaaaaacacgcaggttgtaacagcaaggcgcattctgtgtttactctgcatcctcccaatccacaatccaaagaaataattcagcccgatcgaaacaagcatcagaatcacatacttcggctcgccccacgcataaaaaaagaggctggcagtcagaaggacgctattgcggatatgcagatttttcgttataaaataaagaaaaaataccgctggcaaaaaataccataggaacacaagggaactaaataacataaatcataccatcctgtatttgttactgttcacgcatacgtgcccagtaacagaatttgccgtggcttcgcatttaaatacggcaacttcctgccgccaccacgttttcttacggcactttcggttccaaaagtgcctacccgtgaacagtaacctgtatttgttactgttcacgcatacgtgctcagtaacggaatttgccgtggcttcgcatttaaatacggcaaattcctgcctccaccacgttttcttacggcactttcggttccaaaagtgcctacccgtaaacagtaacctgtattttcttatatagcagataaatcatgtctatattccagacactctattatacgggcaatccaccttaatctgtcaagtgtttttgaccagaataaaaaatgtgcctttttgtgtaatagcgaattctaaggaatttcctactacacaaaaaaaccctgcctcccaggttcatcacctcggaaacagggttctctttactcgctggcacgggactgcggagtactgggtggagtaaatccgtccagccggcgctgtctcatatatttatcagagaaaaacatacaaaactctactgctatatgctaagaagatttctcttcctaattttaattagttgttcttagctgctgcttttgcttctttaatcttctcagtcagcatcggaacgatcttgtttaagtcacctactacgccgtagtcagcaacatcgaagatcggagcagactcatctttgttgatagcaacgatgatgtcagactcttccatacctgccagatgctggatagcaccggagataccgattgcaaagtatacgttcgggcgaacagtcttacctgtctgacctacctgaagatccttcggcttccagccagcatctacaactgcacgagagcagcttacggtaccgccgatagcctctgccagatcatccagaatcttgaagttctccgggcttcctacgccacgaccgccggatacaaggatcttagcatccatgatatcaacggtgttggatacagccttaacaacttccagaatatcaacatatttgttgttctttgtgaatcccggattgaactcagtaacaacagcttttttgccagcttccttcggagccttctgcataacacccggacgaacggttgccatctgcggacggaaatccgggcaagcgatggtagcgatggtgttgccgccgaatgccggacgagtcataagcagctgattgtgctttgtctctctacccggaaccggattcatcgggaaatcaccgatatcaagttttgtacagtctgcagtcagacctgtatggattctagcgcaaacacgcggaccaaggtcacgaccgattgcagtagcaccgatcaagaagatttccggtttgaactcttcaataacagatgcgattgcatgtgtgtacggctctgtacggtactcttttaactccggatcgtctacaacgataaccttgtctgcaccgtactctgctaactgatctgcaagacccttaacgtcagaaccaactaaaacagcggttacctctactcctaaatcttttgctaattctttacctttgccaatcagctcaaaagcgatattgctgataacattatccacctgctgtgcaaagacaaatacgcccttatatgcttctaagttgttcatcttattcaccactcttttctataaaataattagataatgtgtttctctgccagtttgccaacgatataatctgcggaagctgccggatcaagttctactttctcgccagcaccctttcttaccttatcggaagcttttgcgatctgtgtcggtgatcccttcagaccaaggttggaatcctcaacctctttcagatcttttctgccccaaacggtaatctcttttgcatatgcatcaaagattccgcccggagtcatataacgcggctcgtttaactctgcaagagcggttaaaagacacggaagctgtgcttttactacatgatatctatcatcatactgacgctcaactacgatgtatttctcagcttcgtttacttcacgaatcttctgagcgtagctgattaccggaaggccaaggtgctcggagatctgcggacctacctgagcggtatcgccatcgatagcctgacggccagtaatgattaagtcataatccaggttgcgaagtgcgcctgcgattgtctgggaagtagcccaggtatctgcaccaccaagtacacggtcagttacaagaacaccattgtctgcgcccatagccatagcctcgcgaagaacctcttcagccttcggaagacccatagtaactacggtaacttctgcaccatactgatcttttaagcgaagcgctgcctccagacctgctttatcatctgggttcatgattgccagcattgcgcttctgtcaagagtaccatccgggttaaatttaactccgcctttggtatccggaacctgttttacacaaactacaattttcacggtattttcactccttatttttttcttttttctctaggactgagattgttctgatttctctgcagactgaattattttaacagatcagcggagataaccattctctgaacctcagatgtaccctcgtagatctcagtgatcttagcatcacgcatcatacgctctacgtcgtactctctcgtgtagccgtaaccaccgtgaagctgtacagccttggttgtaacttccatagcaacctctgctgcatacagtttagccatagctgcttctacagaataggttttctgtgtcttcttagcaacggctgctctgtaaacaaggagctgagctgctttaactttggtagccatatctgccagctggaactgagtgttctggaactgaccgatagcacgaccaaactgttttctctcttttacataatcaacagttctctcaagagcgccctctgcaagaccaagtgcctgggaagcgataccgatacgtccgccatccagggtatgcatagcgatgtggaaacctttgcccttctggccaagcaggttctctttcgggatacggcaatctgtgaagatcagctcgtatgtagcagatccacggatacccatcttcttctctttggtaccgaaggtgaagcccggagttcctttctctacgataaatgcagagatctcttttttctttctgccctttacttcaacaacgcctgttacagcgatgataacgtaaatgtcagcctctttaccattggtaatgaaaactttggagccgtttaatacccactcgtcgccgtctaatacagccttggtctgctgaccctgagcatctgtaccagcacccggctcagtaagaccgaaagcaccaagcttctcgcccttagcaagcggaaccaggtatttctgtttctgctcttcagtaccgaaggtctggatcggatcgcagcacagagatgtgtgtgcagatacgataacgccggtagtaccacaaactttggaaagctcctcaacgcacatagcgtatgttaacggatcacagccctgtccaccatactccttcggaaccgggatgcccatgaagccaagcttctgcatctttttaacggtttcctccgggaagtgctctgtctcgtcaacttcctgtgccaaaggttttacttcgttctcggcgaagtcatggaataactttctcgccatttcatgctctttacttaatgtaaaatccatgtgtctattcctccatcattttcttatatacgcttaagaggcggctttaagcgccgccccgttgcggttcttaaaaatctggtactctattatgttttcatctggtcaagaagccagacttatgtacatattagttgtacttgtagaagccttcgccagacttacggccaagcttgccgccgcgaaccatctttctaagaagcggctgcggacggtacttcgggtcaccagtctcagactgaagtacttccatgatagccagaacaacgtccagacctaccaggtcgcccagttcaagcggtcccatcggatggttagcacccagcttcatagcggtatcgataccctctacagaagcctcgccctcagcgtagataccgatagcttcgttgatcatcgggatgaggatacggtttactacgaaaccagcgccctcttctacctgtaccgggatcttgccgatctcttcagagatcttcttaactttgtcaacaatctctaccggagtgtttaagcctgcgataacctcaaccagcttcataaccggagccgggttgaagaagtgcataccgataaccgggcggtcaagacccgcaccgatctcagtaatggacagagaagaggtgttggtagcgaatacgcagtctgccttgcagatagcgcccagctctttgaaggtctgttttttgatctccatgttctcgattgctgcctcaactacgagatcgcagtcgctgcagatagtcttaacgccggtatggattctggcaaggatcttgtctgcatcctcttttgccatctttccttttgctactctcttctcaaagttcttggaaattttcagtttgccgttggaagcaaactcttcgttaatatcacacaggcatacttcatatccatctacctgggcaaatgcctgagcgattccggaacccatggttcctgcaccaataataccaactttcatgacaaatcctcctgaaattatacaactataatttaactaactatctattgttaaactgctccactttccgtttctcaaggaatgcctgcataccgttcttctgatcttctgtctcgaagcatccgccaaacagtttttcctcgatcacgatagcctgatccatatcagtctgaagtccgtcgttcatcgccttcttgctgtttctgacagcgatcggagccatctttgcgatagtgcctgccagcttcttcgcagccggcatcagctcttcctgtgtataaacagcatttacaagtccgacacggtatgcctcgtccgctttgatgttgcgggacgcaaataccatctcttttgccttgcccggtccgatgagacgtgcgagtctctgtgtaccgccgaagcctggtgtgataccaagacctacttcaggctgtccgaataatgcattgtccgagcagatacggatatcacagctcatggcaagctcgttgccgccgccgagtgcgaaaccgtttactgccgcgataaccggaaccgggaaggtttcgatcttgcggaaaatatcgttgccgaatttaccgaagtgctcgccctgctccttggtcatcacgctcatggcagcaatgtcagcaccagctacgaaagatttctctcctgcgccggtcaggataattgcacgaatttcggaaaggtctactgcatcaaatgcagcttcaatatccttcagcacatcctcgtttaacgcgttcagtgccttcggacgattaatagttatgactgcgacgtgtccgtctacctcatagtctacaaatcccacttccagttcctcctaaaaagctcttgaattgaaatacgtaaaaccagaaacagccggagcgccggggataagccccgacgactccggttctgcgtcagaaattagtctctctcaacgatcgttgcgcagcccatgccgccaccgatacacagagtagccagacccttcttagcgtcacgtttctgcatctcgtataacagagttgtcaggatacggcagccagatgctcctaccggatgtccgatagcgattgcaccgccgtttacgttcaggatgtctttgttgaagccaaggtcacgagctacagcgatagactgagctgcgaatgcctcgtttgcctcgatcaggtcgaagtcttctaccttccagcctgtcttcttcagaactttcttggtagctgcaaccggtccaatacccatgatgctcggatctacaccgcccagagcgcctgctacccatgtagccatcggtttgatacccagttcttttgctttctcttcgctcataacaactacagctgctgcaccatcgttgatggaggaagcgttaccagctgttacacgtccgtctttcttgaatgccggacgaagcttgccaagaacctctacagtggaacccggacgcggaccctcatcggtatctacgataacagtctcttttttcttcttaacttcgatcggaacgatctcgtctttgaaacgtccagcctcgatagctgcgcaagccttctgctggctagctgctgcaaactcatcgagttcttctcttgtgataccccactgatcgcagatgttctcagcggtgatacccatgtggtaatcgttgaatgcatcccacagagcgtcatttaccatggtgtcgatcatggtcgcattgttcatacggtatccgtaacgagccttcatcagagcatacggagctgcggacatgttctctgcaccaccagctactacgatgtcagcatcgcctgcaaggatcatatctgctgctgcgtttacagcattcagaccagaaccgcaaaccacgttcagggtaactgccggaacttctaccggaagaccagctttcagagacatctgacgtgctacgttctgaccaaggccagcctggataacacatcccatgtatacgtgatcaacctgctccggagcaacgcctgctctcttcagagcctccttgataactacggcacccatctcagctgctggaacagtactgagctggccacccatagaacctactgcggtacggcatgcacttgcaattacgactttcttagacattgaaaaaatcctccttgaaaatgatccaccacgtaaataacacaactgcagtaaatagtaaaatagtgataaatatgatagtgtatttgtatcttaacaccccacgcggctcctgtcaaataattatcaatggatttataaagatttaagattctcatttttccccgtacaatccacttatttctacatcgttttgatcgcctttaggcggaatgcacaatttttttcttccgttttctcaataaaagtggtcttctctggcattataaccaacatggtattttgtttgtgaattaatagacaaagtcatttcttttctatttacatacacttatatctgtaattcataaatatgaatatgtcgtcattttcccctattttgtcctccgcctctttcgttgacaaggggtagtggagatgatacactgataaacaacgggggatgtccgaatcacgcatttgtacggacttcttcatattattaaaaaggacaaggtgaataagtatggattacaagaaactgtatgcagaaaagctggtttccgctgaaaaagctgcttccgtcgttaaatctggcgactgggttgactatggctggaccaccggcactccggtagcagtcgatgctgctatcgcaaaacgtcttccggaactggagaatgtaaacttccgcggcggtatcctgatgtgggtaccggagatcttcaagatcgaaaacccggcagctcatatgacctggaactcctggcacatgagcggtatcgagagaaaggcaatcgcacagggattcagcttctatgctccgatccgttattccgagcttccgagatactatcgtgagtccgcaaccaaaccggatgtagctgtattccaggtcgctccgatggacgagcacggttatttcaacttcggaccaaatgcttcccatatggcagcctgctgcgagacttccaaggttgtcatcgtagaggtcaatgaaaatatgccagtctgcctcggcggatttgagaacggcgttcatatctccaacgtagacatgatcgtagagggcagcaacccgaccatcgcagagatgggaggcggcgcagcagcgactgatgtcgatgaagcagttgcaaaactgatcgtagacgagatcccggatggtgcctgcttacagttaggtatcggcggtatgccgaacgcagttggttccctgattgcgaaatctgacttaaaggatctgggtgttcacaccgaaatgtacgttgacgcattcgttgatattgccgcagccggcaagatcacaggcgctcacaaagcactggacaaaggccgtcaggtatacgcattcggcgctggtaccaagaaactgtatgactacttaaacaacaacccggcctgcatgagtgctccggttgattacaccaacgacgtccgcaccatcgcagccctggacaacttcatgtccatcaacaacgcggttgacctcgacctcttcggtcaggtaaatgcagagtccgcaggaatcaagcacatcagcggtgcaggcggacagcttgacttcgttctgggcgcttacctgtccaagggcggaaagagcttcatctgctgctcctccaccttcaagaacaaggctggcgagctgcagtcccgtattctcccgaccttaaatcagggttccatcgtaaccgatacacgtgcaaacctgcactacctggtaaccgagtacggtaaagtaaacttaaagggtcttgcaacctggcagaaatgcgaggctatcatctccgttgcacatccgcagttccgcgatcagctgattaaggaagctgagaagatgcatatctggagacagagcaataagatctgataagaactcaagatctgataaaatcggcaggattcggagacaaaatccagcaaaccatctatggtatctgagactcccggttctccgatacatcagatacgtttattttctaaaaaagtgcttttcctctcaagaaattttctttgagaagaaaggcacttttttatttatactttttttcttatagtttttgttctacaagtctctgtctaccatccgctactgttccagagacttccaccggaagttcggaatcacatccgaccacttattaattccgatgattgattttgcaaaattcgaagtttccagcgtgtatctcttctgatcaatgtcgtggaaaactctccagagctttcgatcctttaccgctacaatctcattgccctgattcatatcacaggaccacagaccgaagcttaagcctgcccttacctctgacggcgcatcgacctgacgactcagaatgtacgcgtcgatatacgggttactgtccacgatatagtaagaatatgcaaatgccgccgcctggatatccgacacatcgccgcgcgtcagactctgtgcagtaaatccttcctccgtcagaatgacatggcgcacctcgccagatgctgtcttcatcgaatcctgattcagataatcggtcagtacatgcaagtttgcaaagttgacaatcggtgaatctgcactctcggttaccagccccgttgccggatcatcccagaattccggttccgtcatcgggtacggatacggatggtaggcaatgccccagtccatctggccttccgttactgccaaggcgttaaacgtatcaacaatgcctttgcccgtataatgcacctgatcgttcaggttctcatacggagctccccaccagaaatcaagtgaaaaataaacccggtcattcgcgcttgtgctcttgatcgccgtgtagaacgtgcggaatgcctgctgatacgtggatacatatgcattcaaatctgccggtcccatgtagttccaaatctggttgttgatctcattgcccagaatccagttggaaatcttcgcataatttgaattatgattcttgccgctgtaacgatccgccaaaaacgcgaagatcgcacgcgttgtctcaaatccttcctgtgtcttcgtgttaaacatataataattggcgctcgaagatttcgcagttcccgcatgaaccagttccgggtgcgcgtcattccagtcatttaaaacgatcgccgtcacagatatatcttttccgatatatgtactgatcaccttgtcataattttcaaccaccgacttattaaaatgatatgtttttccatcgtactcataatcaatgccacttcctaaaaactgggaaaatgcgatattgaccgccacatgtttgacacccagtgtaaatgcatcgttgagcatatttaactggatattcaagccctttttcgtcagcggcgtcttaaacgcatcctgattggatgcaaccacctccggatttgtgatataatgtgccgcgccaactgccgtaaatgtagttccgtcaaacactgccggaacaaaccggctgtaaaggcggtcctgggcagttcccttgtttaaaggaatcgagacggtcctcgtttcccctgcgcctacgctgctgacataatcagtccggcttccaatctccgactcatacggccgcaattcaaacagataaatctttccgtccgtccccgttgtatcaccgttgcttgaaagtgaaatatccactgtattctgccccgaaccaatcagacaggagccgatcgaagcggttatctgaaacgtctgcgccgccagtgctgtgaacgcagccgccacactcaggcagaccgctgcagccaggacaagcgccgttttcatccattttttcatcctgttccttcctttccgtctaatatcctatggtatttgatcatacttcattcttccgtcagattcaattactattttattaaggattattacaactattttggaaattctgtatgattcccagcattttatcttttccaagccttgatttctttcttattcctattctttccacttgcaaatattggttttatatataaatcccttagagccgcaagtttaaaaagctacagtttccggaaccatcaagtattccttccgccatagctttttgatattagcgattatttagttcttaatgctctcatcgcatttaaaattgcaatgacggaaacaccgacgtccgcaaacacggcttcccacatattcgccactccagccgcgcccatcagaagcacaaccgccttaaccgccagggcaaacacgatattctggtgcgcaattgccattgtcttgcgtccgattttaaccacacctgcaatcttcgccgggttatcatccatcaggacaatgtccgccgcctcgatcgccgcgtcacttcccatgcttcccattgcaataccgacatctgcgcgggagagaaccggtgcatcgttgatgccgtcgccgacaaatgccagcttccgctttccggtcatctccgccagcatctcctcgaccttctgcaccttatccgccggaagcagctccgtgtacgcctgatcgatgccaaccttcgcagccaccgcctcgccgaccgctttccgatcgcccgtcagcataacagtacggcggattccagccgccttcagtccacggatcgtatcctccgtctccggcttgatcgtatcggcaatcaggatacttccggcaaattttccgtcctttgccagataaatcacagtgccgatgccgtcgcattcctgatacggtatatttttactcttcatcaggcgtccattacccgccagaactttgtgaccgtcaatcgttgtctcgataccatgaccggaaatctcgttggtttcaccaatgcgggttaagtcgatcaggggtttgcgtaccactccctgcacaccctctttggactgcacctcttttattgtgtcattgtcagcatccagaacgatttctgctgttcccgcattcgccttttgagtttctgcttctgccaaactgccttttctctcacgatacgcctcccgtatcgattccgcgatcggatgcgtcgaataattctcggcatacgccgccagctccagaagctcatcctcactgattcccgccggatgcagctccgtcactttaaactcgcccttcgtcagggtgcctgtcttatcaaatacaaccgtatccagctccgaaactgcctccagataattgcttcccttgactaacacaccgatgcgggatgcagcaccaatgccgccaaagaagctaagcggaaccgaaatcaccagcgcacacgggcaggaaattaccaggaaaatacaagctcgctgaatccactcgccaaattctccgcccagcacaatcggcggcacaaatgccaaagcaaccgccgcgatcacgaccaccggcgtataatatctggcaaaccgggtgataaagttctccaccttcgccttcttgctgctggcattctccaccagctccagaatccgtgccaccgtcgaatcatcaaattctttcgtcacgcgcacccgcagaagcccgctgccattgacacatccgctgatgatttcatccccggctgccgcacggcgcggtaccgattcaccagtcagcgccgaggtatcgatcatcgattcaccctctaccaccacgccatccagcggaatccgctctcccggctgtaccacgatgatgtcatccacttccacatcgtccggatcgacctgctctatctgtccatctttttcaatattggcatattccgggcagatattcatgagatcgctgatcgactggcgcgaacggttgaccgcataactctgaaacagctcgccaacctgatagaacagcataaccgcaaccgcctcagaaaactcgcccacaccgaacgctccgaacgtcgctactgtcatgaggaaattctcatcaaatacctgaccatttttaatcccccggaacgccttgtatacaatatcccatccaataatcagatacggaattaaaaatacgactaactctgtccacggctgcggcattccggcaaatacattcatttttttcgctgctgccgccgcgatatatacgattgccgccgcgacgatccgcttcagcatcgttttctgcttctgattcataaagcctcccttcattctggaaacacattcccagaaaaaaagatataggaaaatgtgccggcacagctcatttgcctatatctttttactttgcccttctgtgcattacacaatctgattttattcttttaaaaagcagcttttgatccgattatgccttttccaattttacatattaataatgcagtccggttccaccttcttgcacacttctacaacctctttcatgatctcgtcgaaacgtgcgtcatccgcatcgatcgtcattttctgcatcataaagctgacactcgcatcattgactccatccagcttcttgatcgcatcctccatctttgctgcacagtttgcacaatccagatcagttaatttaaatttcttcttcatgataatcctcctctttttattgagttataaatttttaatgtttgcttttcgagacctgcaattttttctttacagatagcaccgctttcacattcattcaatccattatcatcattcaaggaacttgctattctttaatatgctcaaagccctggttgataatccggtaaacatggtcgtctgccagcgaatagaacaccgactttccgtcccggcggctcttgacaagctgcgactgcttgagaatccgaagctgatgcgaaatcgccgactgcgtcatattaagcagctgtgcaatgtcgcagacacacatctctgactcaaacagcacaaacaaaatccggatccgcgtcgaatcaccaaataccttaaacagctccgccagatcatacaaatcatcgtcatccggcagcattccccggactgactgcacaacctcatcgtgaacagcacactcctcacagcactctacatcatgaattgccatccgatttctcccttcatgctacgcgtttttgccctgcttcactgcttctttcgtgaaagcagtttgcaggattttatcaagatttctttgaaatatttttatttatatgaatcattgttcatatgttcattatatgaatgtaactgggaaatgtcaagaaatatttgtgggaatttaaaaggagtaaatgaaatgttttctcaactataaaatgctgcaaaaaagactgttcatacagacaaaatccactaagtaatgcgcgtaaatgtgcttctttttgcccggtttacagatgatactctgtaaaccggcacagttcaaatatctattctctacatcctatgcttttttgtctatttatgaacagtccgttcttttttattcattattatatatcttttgcagtttattttttcgacactgcttgagctatattatccattggtatattatccatcgtctgatgatcttttgcctctttctgcaaccccgacttagacttctaatagaatctctcctcgcccggaatcgcatccaaatgttcctgccatttctcagccggtacatcatgaaccgataccgtcacaaccttcggatccttctttaattcttctgataccagcgttctgaccttctcagccagcgctgccttctcttcccggctccgtcccgggtacatagatattgcaatgtgtggcatgattttcctcctttgtactaatagcactcttccaaaatatccaagatttccgcgtgcgtcagctgccgatacccgccgtcattgcggatacatgaatcagcaatcgttttcagcaggctctgatctgtgattcccagttcccgcagcgtccccggcaaaccaatctcatgaataaacgcctgcaatgcgtcaattccgccaaatgccagttcttcctcatcgcctccatctggtgacattccccagacatttacggcaaatttcacaaatttcttgatgccgtcccggcaaattcgacgataatacgccggatggatcacgccaagtcccatgccgtggttgcagtccgtgtaagcccccatctgatgttcaatcatatgcgcctcaaaatcacactgttttcctaatttgataatgccaatctccgccatcgtggacgcccacatcaggttgctgcgtgcctcataattttccggttcccggatcgccaccggcaggttcgcaataatactccgcatcaacgcctccgagatcgcatccgaaagattatcctcatccggtgcactgaaatatgtctccatcacatggctgagcatatcaaaaccgcccgctgccgtctggagtggagaaaccgtgtaggtatatttcgggtccatcatcgcaaacaccggattgcagcgcggataattccggctcgtcttaattttctgttcctcatgggtgattaccccctcgccgttgacctcgcttccagtgccgaccacggtcacaatcacgcccaccggaaccggctcaaaatcaatctcgccctttttgatccagtattcctcccagacgtccttgtccgtcgcagccgccattgagatcgccttgctgcagtccatgaccgaaccgccgcccactgccagaatcagatctacctgattttcctgtacgacttttttcccttccatcaccttgctgtaggtcggattcggcatgatgcctgaaaattctatcacctgttttccagccagctttaagacatccatcacttcctgataaatgccattcgtcttgatcgagccgccgccatatgccagcattaccgtttccccatacggcttcaccgcctccagcaggtgctctttcacacagcctccgccaaaataaatctttgtcgcattttcaaatgtaaacgcccgcatcgttccctgtcctttctgaacccgttccggcaaatgcttttgcatccgcctgatgttctgccttcttctttgtagatatgtttttttgaatctttattttgattatttttctcctttatctcagattcatcaaatgttcatctataactcacactagatttgacaagttctctgtaagtgttcatattatatcacgattcgcatcttcgatgcttaccgctgctgacgcagctatcgtgatcgccattcgccgttcgccataaatctgcaagcagctctctggctcacttgcgctcattataacatattacctttttacattctatctatttcagaaatttcacgcatatattttcatttttatgaataaaattgcacaaacttatatctgcatgtcatttttattcctccatccacttccaaaatattttccgaaatttatgatttcttcacattccgaacatacttttatcacattttttcgatatagtaatacgcgtaaaggcaaaagacctttcataatatactttttcatacctacgccgacaggagtccgttcctgtcggctcctcctattttaagggatacatctactcaagcgggcagtttcatgataaaataaacacacagatagaatcatctcacaaacacagattctatgttaaatttacaataaaaatagctgcatgaatcacatatattaggaggaacttctcatgaaacacgaactgacgcaggaagaaatcctggttgaaataaaagacattctatcagaatatgtagaaatcacccgcccgctgacatcggctgaccgcctgatcgacgatctggggctggattcatttttgatcgtatactttatcacagagatcgaagactgcttcaagatcgatattccggaaacggattttatcgagcttgtcacggtcagggatctctgcgaacggattcagctggaaataaaaaagcactccacttattaataccagcgtgtcatcggcaagtcattattaattccttttgtaaataaaatctggtgcagacgcagattttccatatccaggatataaaatccatctgctgaaccacaagaaatcatttcccagagacttagaatcattacgcccgggaaaatatattttttaatccacgaatcgcccggatgttcctccagcacactgataaattgcagcagaaacagtccgttccttccatcttaacctgaaatggatactcatcaaacttttggttatatctgtccctgttctttcagatatgccagaaaacccacacagccctccagaacatcttcatacgtcgcgtcaaaatcacccgtataccacggatccgcgatgtcacggtctgaacctgcaaatgtgaggaatttatatattttcccctccggatcgcctttcagcatccggtttaaatttcggatattggcactgtccatacctatgatataatcaaatttctcataatccgcccacgtcacctgccgcgcccggtgcggcaccagaggaattccaaccttcctcagcttattcaccgtcccccggtgcggtggattgccgatttcttcggtgcttgtggcggcgctgtcgataaggaagtgggcggaaagcccttgggatgcgactttatgggtgaagacactttgggctagggtggaacggcagatgttgccgtggcagatgaaaagcacttttatcatagttttgtttctccttgttttgccccggaatgccctgttttgcaaggaatttcggggatttgtaaaatgtgtgttttgactggcatcttggcaaaatagggcaagattgagcaagttgttgcgggctgttagtagtaaagttggtagtaaaatcaaacttcctactactaaggcttttcatcagtaggaacatccgaattcactttcttcttttcttcagcgttttctattaaccgagcagcctctaaatcccctgagattctactatatgtttcttccatttcgtccgaaaataatttgccataagaattcagcgtgtctgctgttgcagtcatactttcgattgcaggcattttacacatagcttttatactattggcttgtgccgccatttcgcttgctattcttgctgcagggatattaagagcatccgtagtcgccataatattattaattcctgttatttcgggcattgtcggtagtcgactagcctgtgctgccatttcacttgccatcttcattccagaactatgatataacgccttagccgctgccattgcagagctaccaatttgcggcacattatatacgctttgaaaatgctgagacaattctgcgcctaatgttaattgaggcattatatctgggatatttatctgtggcattgcagcctcaataacaactctaccaaatgatgctaatgcagatttcatactttctacccactttggaacataatctccaagaatattagaaattacatttcccaatgctgaaacaacatctaccaagtgtgtttccgtatatatatcctcttctaacacattaatagcatctaccaaaagtttattaacagcttttaatgattttctaaccttttcatattcttgttgtgttatccttttatggtgcataactgtatttctgtatggttgcaactcttcaattttttctttgaaattttgaaattttttatattgcccaaagaacctgtcccacaaggaaacacttcgacatttatcaattatgcttgtcatctcttcttttgaccaactttgaatatgttctttcgccagttcactttctaatacctctgacaaattttgactactgaacggcacaaaaagatattctttaagttgttcatacgtcaattcatttaatgcaccttctactaactttgttttattccccttacccttcaatgtattttgcaaactttcactaaaggatttttcataccatcccactccaaatatttttataacggtaatataaactaattctcgagttcttcgttcaaaaattccaaatagcggcattaacttacaacaatacaactgtgagacctcatcatatgtaattacaatattccaatcttttctgtgctctccctgtattagtttatttatacaacagtccaaaacccttgctgatttagccgatgtatattcgcattcaaattttacaaataccatattagcattttttgtcgacaactgatattttacatttacacactcttcatttaaatcaaactcaaaattttcgtcttgaagattattatacagtttcttaaatacattttttactgcctgtttcattcccatctgtaatttttgcttgcttccatccttaggaagaacaattatatccacttccatatttttcactcctatcctataatgctaatctttatcttttttatctaatggggaccaaaacacaaaaaatctattaagaatacctattgaacttgaaaaaacaaattcaaccccacatgcaataaatatacatatccataaatattgagaataaatagccgtgtattcatttacaaaattattatcaaaaacataacccatcattagaaatattagaacattttcaaggctgcttgaaaaacggaatgatgcccctatcctaagcctgtgaaaataatctattctttcattattattagacactttatacataatttcataaataattgctgcaataacaaatattacgaatgctatgattaccaaacttgtaaataaatgtgccccaattcttgcaatatctaaaattatactttgtattttctcgcttatcagacctttaatacacttctgcacattccaaaccctactggtaaacaaaatcaaaatcaaccacaaaaaagttacggattttagatgaaataacctatattgccttttttctttattttctcccaataacagctcaaaaattttaattaaaaattctcccatgatatatctcctcaagtgcatttttctcatagaactttcattatattatatcgtcattttcacttcttttccatagaaaaaacgccccagccataccggagcgtcatccatcttctatatcaaattaccttaaacatcttgtgcgacataggcttctcttttttctgttcaacctctgtctgtgctttcctaaactcttctatccgtttcagttcttcctctgcatcattgaatccaatatgtgtgtacacattcattgtgactgatatatccgaatgccccatgaggtactgcagtgtcttgggattcattcccgattttgccatattcgaacaataggtgtgtcggcatacatgaggcgtgatatttggcatctgcacccggtaaatgtcattgtatctgccaaccatatgattgaagcggtgctgccaatgcattgcaacaagtggcattccattatcatcgtaaaataggaatccactatatccgtctatggatttttccacttttggtgcatttctatcctcaatgattgcctgaaacatctgtgccacatcctctgtgattggcaatactcttgttccagcatccgtttttgtggtttctatgatgtaccgcatatccgatgttctctgcaactggtggtcaatatttacagttctgttcacaagatcaatgtccttcagcgtcaagccacaaaattctgatattcgcattcccgtatgaaagagtatgtacaccacttcataatatttgcaatacaccacatcgtcatgcacaaactttaggaactttctcatctggtcttttgtgattgcctctcttgtaactgcatcatttaccaatactccggcaagctgaaatccgaaaggattctttaccagaatgtcatcatccaccgccatctgaaaggctggtcgcagcactccccggatggtatgaatggaactgtagcttttcccatcttcctgttgcaattttataagaaacagctttgcatcggatgttttcacacttcgtatcatctttttgccaaatgcttccttcgcaagtaatctctgcactgttacatatccctgtttcgtgctttgccttactcctgtctttgttttcaaatatcggtctaccagttcacagactgtcatctgtccgtctacgatattcacaagcaaatctaaatctgtgtttacctgcttttctaactccctgagagaaagacatggttttttgcccttgggaagtttgtccgtaggttccagtttccaactgtatacaaaatgtggtttgcaacggtgtacaaagggaacataataaaaaacttaataatggactgccaatcttacacaaagtaccgcccaaacgagactacgggcggtatttttgtatcatggcggagaaaggaggaacttcccacgggggcttgactgaaaagttgagccccttttttcatgccaaaaaacaggaggtaaatgcttatggcagatgataaaaccacaaaaacgccggaacagccggtaacggatagcgggccgggcaaggaaacaccg

SEQ ID NO: 11028 - DNA, 24735 bp, Unknown
  gut microbiota DNA sequence
tagagataaaatacttgggattcacattttacaatcaattcaaagccaagaagtataaagccaaagctcatgaaaagtcagtacaaaaggtagtaagaaaatggaatgaccaaaggcaaacaggaagtgccagaagatgatgcccttgacttttctccaaaaaagttttactatcaaactactgttagatagtattaaaaactagatatcggggtaatgtaaaaaagaagtggtttgaaagttgaagaaaggcaggggcgatcaggacatgaataagaaagcatggaaagcgggtgcggtatcggcactggcagttggagcggggctggcggcagcggcgtcgaagcggaaaaaggcaggaaaagtggttaagtcggcttcggattaccggaatacggaacgcggcagccaggagaaaaacagcaagggaatttattattcgaagggaaattatgaggcatttgcgcgcccggagaaaccggcgggaatcgagggcaaatcggcttatatcgtcggaagtggattggcttctctggcggcggcgtgttttcttgtgagagacgcacagatgccgggagaaaatatccatattctggaggcgatggaggtagcaggcggtgcatgtgacggtattcaggatccgacccgtggatatgtgatgcgcggcggccgcgagatggaggatcattttgagtgcttgtgggatctgttccgcagcatcccgtccctggaggtgccgggggcatcagttctcgatgaatattactggctgaataaacatgatccgaactactcgctctgccgtgcgacggtcaaccgaggcgaggatgcacacacggacggcaaattccgcttgagccagaaaggcagcatggagatcatgaagctgttcttcacgaaggatgaggatctgtatgacaaatccattgaggatgtgtttgataatgaggtgtttgattcggatttctggctgtactggagaacaatgtttgcgtttgaaaattggcacagtgcattagagatgaaacgctattttcagcgttttatccaccacattggcggacttccggatttctcggcacttaaatttacgcgttacaaccagtatgagtcgctgattctgccgatgcagaaatatctggagacggcaggcgtccagatccagtttggcaccgaggttacgaatgtgcggtttgacatccagggtgagaaaaaggttgcgaaggcgatcgagtacgtgaagggcggcgagaagaaggaaatcgcgttgactgaggatgattttgtctttattacgaacggaagctgtactgagggaacgatctacggcgaccagaatcaggcaccggtagaaggtgcggaagtgcgtaccagcggctgctggagtctgtggcgtcagattgctgcgcaggatccggcatttggacatccggagaaattctgctcggatatccagaagacgaactgggagtctgcgacggtcacgacttcggatgagacaatcatttcccagatccgcaagatttgccgcagggatccgagaagtggacgcgtcgtaacaggcggtatcgtgagctgccgtgattcaagctggctgctcagctggacgatcaaccgtcagggacagttcaaagcgcaggataaggacgagatctgcgtctgggtatacagtttatttacggatgtaccgggcgattatgtgaagaagccgatgcgcgcctgcacgggcaaggagatcaccgaagaatggctgtaccatctcggaatcccggaggatcagatcgaggaactggctgagaaccatgcgaactgtacgccgacgatgatgccgtatattacagcattctttatgccgcggcgtgccggagaccgcccggacgttatcccggatggatgtgtcaatgcggcatttctggggcagtttgcggagaccccgcgtgatactattttcacgaccgagtattccgtccgcaccgcgatggaagcggtgtatggcttgtgcggcgtagaccgcggcgtaccggaggtatggggaagtgtctacgatatccgcgagcttctggacagcacggtcaagctgatggatggcagatcgccgctggaaatgaagctgccgatgccgcttgaagcactcaaaaagccggttctccggaagattgacaagacggtggttggaaagctgctgcgcgatcacggcgtgctgaaagactggatggtgtaagagactgaggaacgcaggtgttactggacacgtatgcatgaacagtaacacgcaggtaaatatggctgcgttagataaaggaagacaggctgtcacaaacagaaggccccggacggaaatcgttcgtttggcattcgtgtggcagcctttttttgtgtaacaggaaattgtcgtgaggcacattctttttcacttgcccgtttttctctgacatgatacaataaagattggcgtaaatgtagaaaatttgagaagaaaacgattttgaaaaggatcgtttgatagatgtgagggaaaatagatggattatttactttgtatcccggcgcgggagacaaatacgagagagaattgtgagaaaatacataatgttctggcgcgcatgtccgatacctacaaactgcggattgtaccggaaccggttaagaataagcagtttccatgtccaccgtattacaagaaataccggatctacaagccggtaaaggaacgcgatacgaacggagaggcatatctggaaaaagaagaggaagagatgctcttgagttcctgcaagacggaggaagagcaggaactgatgaaaagctgtatctatgcgtaccagtattcggcggcgatcgtacttaaaagcttccgggagaaggaaaagaaaaataagatgcaggttcgacctctttcggagcggacacaggcgccaagaggcgtaagtggtccgaataggggaacacgtctggaaacaccggaaaaagccgaaaagccggaacaggagcgcagcgcacaagaacgtccgtctggcagtgacagaccggaacgatcggagagaagctatcggaaccgtacagcggatcgtgctgctgaggggaatactgagcgcacgcagggcagagaaagagcttgctcagagagagagagggcagcgcgtgtttcgggagccgagagagcagcggacagacgtagcggaaaccgcgcggtgccggaaaatgagaaacgggaagaccgcccggcttctggaagacgggagcggtttgagcgccgtccaccgcgcagaggagaacgaccagaagtggagaaaaatgaggtcgtgagagatccggcgcagggcgaaattccgttccgcgcttacatggagacaggcagcctcccggcgttccgggatacggcagcaacggtgcctgtacagccgatacagcggaagaaagaaggttatatgccgatggagcgcaaaccggccgcgcagacgcaggagccggaaccacaggtgtaaggtatgtgaccgaaacagaacgataaaattaaatcatagaatttatagaatggcatcgaaacaataagagttccgatgccatttgagcatcaaacaggactatgctttccatttctttattccaaccattcagttctaatcccccctattttccgcatatgaataaatgcagtctgtgaaaagtacagaacagggacagaaaaagggggaaatgcgcatgtatgagaaccggacggtggaagaggtgtgcagggagttttcggtcgatttgcggacaggcttatcggcagcggaagtggaggtgcggcagcgccattatggggaaaatgagctgcgggaagcaccaccgcggagtctgattgtgcgcatcggggcacagctttgcgactccctgatttttgtgttgtttgcggcagccgggatctccctgcttttgggcgagtacggcgatgcgggggtaattctggcggttgtcgtattaaatgccacggtgggcgtgattcaggaggggaaggcggagaaagcgctcgaatccttaaaacggatgacgcagctggaggcggttgtgatccgggaaggaaaagagcgggagattgccgcgcgggagctggtgccgggggatctggtcgtgctcgatgccgggcggcaggttccagccgacctgcgtcttaccgagacagctgaaatgcgggcagaagaatcagcgctgaccggcgaatcgcgggcggttgagaaaaacagccattttttagccgccggtgcgcttccggtggcagagcgtaaaaatgagacatttatgacttcttacgtgacggcagggcggggaaagggaattgtcatcgccaccggcatgaatacggaggtagggcggattgcttctctgatccgcgaggcgccggaggaggagacaccgttgcaaaaaaggctgtcggatctggggaaactattgagtattcttacgatcgggctgtgcgttttattatttgccctcgccgtctggcagaagcgcgacgtgatggaaatgctgctcactgcgatttccctggcggtagctgccgtgccggaggggcttccgacgacggtgacgattgtgctggcgctgggagtgacgaaaatggcgcgggctggcacgatcgtgcgccgtcttccgtccgtggaaacactgggggcagtcagcgtggtctgctcagataaaacggggacgctgacgaaaaatgagatgacggtgacgacatgttatgtaaatcgacaggagtatacggaacaggaattggcgcgctctaaggaaagagaagtgggaaaacggcttctggaggtatttgcgctgtgcagcgatgccggggagacggtgggggatgccaccgagcgggcgctgtacggattttgtgaaaattgtggtgtttctccggagcatctgcgtcggagatatccgcggaaaggggagattccctttgattcggatcggaagagaatgacgacggtgcatgagcagggagaaaactggatttcttgtgtaaaaggggcgccggatgtgattcttaaaaggtgtcgttatgagatggaagaggacaaaattgtgccgctgaccagggagaggcggacagagattgaggcggagatcacgcgtatgtccgcgcgtgccctgcgagtactcgcgggggcgtatagggagcttcaaacaggaaaaatgccggatggaaagtgggagaaacaggtgggacagctggagcagaacctggtatttctgggtctggcaggcatgatggatccgccgagggaggcagcagccggggcagttgaggcatttcgcagggcatctgtgcggacggtcatgatcactggagatcatgcagacacggcgcttgcgatcgccaggcagctggggattgccaaacggcgggaagaatgcatgacgggggcgcagctggaaacgctggatgagggagctctggaggaacgaatcggttctgtatcagtctttgcacgggtgtcgccggaacataaagtccggattgtgcgggctttaaaacgcgccgggtgcgtgacggcgatgaccggggacggcgtaaatgatgcgccggcgcttaaatcagccgatatcgggatcgcgatgggaaaaggcggaaccgatgtggcgcggcaggcggcggatatgattttgacggatgataattttgcgacgatcgagagggcaattgaggaagggcgcggcatctatgaaaatatacgaaaatctatactgtttctgctttcctccaatctgggggagattttaaccatgtttgccgccgttgctatcggaataccggcgccgctgggagccgggcacatcctttggatcaatctgattacggactcgcttccggcgctggcactcggcatggatggaaacgaccgggagaacttgatgcgtcagccgccgcgccggacgggcgagtcgctgtttgccggaggcgggtggttctgcatggtattttacgggtctctgattgcagcagtcacgctgggggcatttttcagcagacaggagcttttgcgggcacagacgtatgcatttaccgttctggggctgtcggagctctttcatgcggtcggcatgcgctcgcttacgggctcggcattttcacgcagtcttgggaaaaatccgctgatgcttgcggcagtccttgtggggattctgatgcaggttgcggtgacggagattccttttttgatgaaactccttcacacggtgcggctgcgcccggcagagtggctggcgcttctcctgttatccgccacgccgctgttagtgcatgaacttctagcatttctttttcggaaacggcattgatatagcgaaaatgcagtttacagataggcatttttgaagccacggaaaaatccgttactgggcatgtgtgcgtgaacagtaacacgcggtaggagattgggcagatttcgaaaacaggcttgttcttttggacaaaaaaacttataataaaatggagtccaagctgattttgtcagaaaagtataaaaagttgctgtccgcagactggcattattgaagcctgaggtgccgcatgaaattagaatggcagcaatcatagatacataggaagatgagggaagagatgagggagaaacagacgagagaggacgcctccggcgttcgaaagaaaccggcagcttcatccgcacgatcttcgggcaggcggggcaccgcaaagaaaagcgggaaaatcgatgtcggcaagcgaaagaaagcgggcaaaaataacagctggagcggtgggcggatcgtgttccatgcgatggcaaggatctttggaaccatgttcaagacgcttctggtgtgtctggtactgctggtgattggcggtgccggatttggagcatataagctgattccgctctatgaggactataaaagccagatagagggagtggtggaaaacagtacgctggatacattccgtttgcaggaggcaagttatatttatgattccaacggtaatgtgctggcgaagctgacgggagacgaggattccagttatttgaagtatgaccagataccgcagaatgcagtcaacgcatttgtggcgatcgaggatcggacgttctgggaaaatccaggcattgatataaaaggtattttccgtgtcgcagtcaattactttttgactgagggagcagaaaagcacggcgcgagtacgatcacccagcagttagcgagaaaccgttttctgacccgcgaggtgtcgatggagcggaagatcaaggagatgctgatttccttagatctgacgaagaaatacaccaaagagcagattatggagttctatatcaatgatatcagcttcgcgaacacgtactacgggcttcaggcggctgcaagaggttattttggcaaggatgcggatgaactgtccttgagccagacggcatatttgtgtgcgattccgaactcgccgacgtattacaacccgtaccgtcatccggaaaatgcgctgacacgccgcgataagattctggaagatatgctgagtatgggatttattacggagaaagcgtgcaaagaggcaaaggcggaggagatcacggtcaaccgccagagagtgccgctgcacaactatgagacgacgtatgcgatcgactgtgcgattcgctatctgatgcgccgtgacggctttgaattccagtatggattccgcagcgacgaggcttacaaagagtacaatgccaattacaacgaggtgtacaaccaggagcgcgatgcgctctacacgggcggctataacctttatacctcgttggatccggacaagcagacgatcctgcaggatgcattagatggagttttgtcctttgatggcaatacatccgaaaacggcgtttacaagctgcaaggcgcgtccaccgttattgacaacaagacgaaccgcgtcgtggcgattgtgggtggacgtagtcaggagacggatacctacacattaaaccgtgcgttccagagcccgagacagccgggaagttctatcaaaccgttgatcgtgtatacaccggcactggaaaatggttacacatcggaaacaaagattccgaatatcgatattgacgcggcgaagcagaagggcgtggatgtgaagtccctttccggcgagaggctggagcttcgaaatgcggtcgagcgaagtaaaaatggtgtggcatggtatatctatgatgatatcacaccggatgtcggcatggcatatttaacccagatgcgcttcgcgagcgtgcaggcggcggactattatccggcgacctccctgggcggctttaccaccggtatgacgaccgaggagatggcgggcgcttatgcagcgctgtcagaccggggacagtaccgcgaaccgacctgtattatcaagatgatcaataaccagggcgaagatatttttgaagattatgaatcggttcaggtttaccaggagagcagcgccgtgatgatgaccgatattttaaagggagttgtcacaaaaggtacggcggcatcgatggggtggagcggcaatatagaggcggccggaaagaccggtacgaccaacggcagccgtgacggctggttctgcggcatgacgccatattatacgatgacggtctgggttggctacgaccagcagaagacactttccagcctgtacggcggcacgtatccggcgaagatctggaaaaatgcgatggaaaagatggtagaggggcttccggcggcgtcctttgataccccggagacggacaatggacgcggagaaggaacctatctggcaggtcatccggatgcatttgaaatcacaaccagcggatataccgcggcgaatttcagaagggatcatttgctctcggatgaggcggcgaagcttctggagtctgcaaagagcggcgattccggccgcagcagcaaggagttaaaagaagacgccagcgccaagatcgagcagatcaagagcgaatccatcaaagagcggatgcagcggatccacaagacgggtacggcaggaaaacggtattcagccccggcggtggtgccggaaacacctgccgagacagttgaagatccggcagaatctagcacgacgatcgtgccggcaggaccgggcagcgacatcggaccaggacacggtccggcgcaggaaccggcagtgggtccggcggcggagattgggcagtaaagaattgaaaatgagaagagtcatttgatgcagagacattaaatggctcttctttgttttgtagaaaagaattgttctatgaaatctgttcaagatttatgtggaatcaatggcggaagaatatttgaatgagaataaaattgaccgattgtttatgcaataagggaaatatgggggaaaatggattggaaatgtacaatacaatgaaataaaacatgataaaagatcaatacgatttaaagttcgtcaaataaaatcagaaaacgacttgaaaataaaaaaaataaagtgctaatatatcagtaagatatctgagatatattaaagaaaacaaagtgcatgtactaataaaagattaaaaaagaaaggaaggaaaaagagtatgggcgacaaaatcagatttggtattatcggcggcggtatggcaggtccgttaaatgcaggagcacttcgggatatcccggaagcagaggttgttgcattctgtgacgtgaaagaggatgtggcaaaggaattcagcaaagagtacaatattccgtcttattacacggattataaagagatgctgaaacgagatgatatcgatgctgtctgtgtagtaacacctccattcctgcatgagcagatggttgtggactgtgcgaaggctggcaaacacgtaatgtgtgagaaaccaatttctgtcgattgtaatgcagctgacaggatgattgcagcatgtaaagaagcgggcgttaaatttggtgttatctttatgtaccgtttcatggatcaggctcagctgatcaagaaagcgctggatgaaggcaagcttggtaaacttctttcggttgattgttctggaaaatgcttccgaagcgatgaatactatgcttccggtgcatggagaggtacatggaaaggtgagggcggcggttccctgattagccagaccgttcattttattgacttaatgctttatttagtcggcgatgtagagagactgactggtaattatatgacaaccctgcatccggatattgaagtagatgacgtagccaacgcaatattcaaatttaagaatggggcgttgggaagcctggtaagtagtagtgcagtccgtccgggttatccgcgtcacatcgaaatccatggtgaaaaaggtacgatcaagattgtggaagaagagatcgtagaatggaaagtagaaggcatgaacgaggatgattacctgaccaaggtaaaagttgactctggtgatacagcaacgggtgctggctatgtggcaaccgaaaatcacagaagacagcttactgatttcatccatgcgatcaaagaagatcgtgagccgatggtagacggcgtagagggaagaagaacacttgaatttatccgtgcgatttatcagtcgagcgaccttggtaaagaagtgcatttcccgatccaggaagatgaaaaatacggaaagaagacagcttggtaataaggaggtatagattatggaaaagaagatgtatacagagacgttggaaaaggttcgcaatgattatgcggttcgcaatattgataaattagaggcagcgatcaaagccggtgatatggaaaaagcgctggagctgcacaaattaaatgtagagaaaaagacaggatttcaccatttcgcagtccgctgggtaaatcagacattacgcaatttcaagaaatgggcaccggatgaggcgatctttgaatgtatggaagactatgcattatggtgctatccgccatgtctgcaggactggatggagaaatataaagcgggtcaggctacatataaagatttcccaatggaagatttcctggagaaccgtgcagtattatggtctgctcttcatgataacggcgatcagatttgggaagaggatgaggagaagattacctttacacttccgcgttgtaacagcggcggctggctggtaaccgaatgtcaagacaaggtacagactttagataaaccggatccaagagcttataataaggaaggattccagtgctactgcctgaactgtacaaccatgtgggagtttggttggtacaaatggtttggatggccattattcattatggatgtgccgactatcggcagtgacggtaagtgcgtgatggttatgtacaaagatccgaaagatatcccggattcttactatgagaaacgcggcttagagagaaagatctaataaaaaaccggcggcagtttcaccggctgccgcctttgtaaaaactatccaggaaagggggatacattatgaaagaaaaggggaacccacttctccagataattcgaaatgtaaatgatgcggtagtagttgttcttttccttgcgatgacaattacagttattattcaggttttttttcgttttgtaatacagagtcctcttagatggaccgaagaattagcgagatatctgatgatatggctggtattgatggcatcggcgattgcgatgagaaatcgttctcaccttcaggtagatgttctgacatctgcacttccgcaaaagccgaaacgcattttgaccgcgattgtagatcttttaacgattgttttcttatgtattatgacatatttcgggttcaaagtagtacagtctacgacggctcagacgtctccggcgatgcagattccgatggctttgatttacgcggcattcccaaccggtggagttttgatgattatggaacagctccttacctttatcgaacgcttaaaaaacaagaatgcaccggaagaaccgagagaatttatagattagtaaaggaggctgcgatatgttaggatttttatttatctgtattttgtgtctgtttctaatcggagcccctatttttgttgcactcggaatgggaacgacactttcgattatgcttgagggaaatttcccattggttctggtaccgcagagaatgtttgcgggtcttgacagctggccgatcatggcgattccgatgttcatgctggcaggaaatctgatggatcagggcggtatgtccaaacggattgtagattttgcaagtgcgtcgatcggctttgtaaaaggaagtctggcgatggtagccgtactggcatccatgattttcgcggcaatttccggttcagcaacggctggaacagcagcaatcggttcgatcatgacgcctgcatttaaagaaaaaggctataacatgagtttcgtaacggttctgctctcagcagcaggaagtatcggaccgattattccgccaagtatcttaatggttctgattggatattccacaggtgcatctgttggtcagttattcctcggaggcgctattcctggagttatgattggtgtggcactgatggtctactcctatattcacgcttccaggggcggagatgcatatatccagacaaccaagtttgatccgaaagaagtacggagaacgatgttttctgcacttcctggtttaggacttccgattatcattatcggtggtatcatcagcggtatcttttctgcaactgaagcagcggctgtggcggttgtctatggcttcctggtaggtatgtttatttacaaagaaattacattgaaagatttacctggtatttttgttaagtccgcgcagacagcggctggcatcatgattatcacaggctgcgcttatatctttgcatggtttatcacagcaaaacagctgccgcagctcttaatccaggttatgaatacattcatcacaagtaagactgcattccttattttcttaaatattgcgctgttcttagttggaatgtttatggaaagtttctctgcaattatcgttttaatgccgatcttattcccggtagcaaccgcttatggaatcgacccgattcactttggtgttattgtctgcatcaacctggcgattggatacgtaacaccgccttatggagcaactttattcgttgcctgtggattgaccggcaagagtgtaagagaggtattcccgtttgtaattcctacgattcttgcaatgttagttgtactgattattgttacatatctcccgcagacctatttatggctgccgcagttaatgggataagaagatgaaatgaaaggaggatttattgatatgaagaaaaatgtgaaacggtttgtaagcatgacgatggcgatgctggtggcagctggctctctggcaggatgtggaggaggcggcagcgcttccacaggagagtccgcaaaggcagcggctaatacaggcggttcatccggtggtgcggtgaccgtaaaggtttccttatcacaggcagcaaccgaacctccggtaaaagcagcggaatattttaaagagattgtggaagagcgatccaatggcgaaattaaagtagaaatatatccggataaccagcttggcaatgagcgagatgtcattgagggtatgcagcttggcaccgtagagatggcgatgacgtcggtagcgccgttctccagctttgttccatctgttaatatattctgccttccgttcctctggagagataaggaacatatgtattccgttctggactctgacgagattggaatgtcctatagcggtgactgtgaggagaaaggcttccatctgatgggcttcctggatttgggaaccagacatatcatgacaacgcagaagacgatcaacagtatcgaggatttaaagaatctcaagatccggaccatggaaaatcaggtacagctggattcctttaccgcattcggcgcaagcccgctgccgatggcatacggcgaattatacacagcgctgcagcagaacattattgacggtgcagaagcggccaatacaaactattattccaagaagttttatgaggcagcgccgcactgggcaatggttggatggaccaacgacttaggtatctgcgtagttgctaagaatttctatgattctctttcggacgagcacaaacagattatcgatgagtgcaccaaagaaatgatcgataaagagagagaactttatacagcatctgaggatgagtgcttggaactgttaaagggagagggcatcgaaatcacagagccggatcgcgaaccatttatcgaggcagcccagagcgtatatgatcagtggggcgataaagtaggcggaagagataaaattgacgcaatcgttaattttggaaaataaaatgtgttcagtgacagagaaaggcaaaggtgtatatgggatttgattatcaaagttttttgaatgacaagatttttgaagaattaaacaagataaaagccttttctccggaggttattgagcaggaagcggcggcgcgaaaaaaaccgggatttccgcatgataagctggtatttgcggcagcggatcacaatgccagaatgatcaatgagtacaaaggaaatccgattggtttaagtaataggcgggagtatttatcccgcctggtgcggatgctgcagagtgatcagattgatggaatcgaggcgacaccggatattattgaagatttatttatcctcaataagttgcagcgggaacgtggagaaaaggcgtttctggatgggaagatgctggttggcactgtgaaccggggcggtctgaaaaatacggtatgggagatggacgatatgccgtcctgttatacagtcgatcgcctagtgaaacttcggatggacggtgtaaagtttatgatccgtctgaatccgatggatgagcgaagcaaatatacggttcggtactgtgcagaagctgtcaatgcagcagagtcagctggtcttccaatttttatcgaggcgctgtatgtagaaacgacggaaacggggtttacgatgaagacggattcagagagtctgtgtaaggtagtcggcgtggtaggcgctcttggctgccgtgcatccggcaaatggattgaagttccgctgaatcatgaatatgcagttccgacggcggcgaccacctgtccggtgctggtagttccagacgaggtaaagagtgagccgattgaggttgtagaagagtacacgaaagagatcggaatcagcagcaatatccgcggaatcttgctgggacgaaatgttatgtacaatgaatcggatccgcttccaatcgcggaagcgatcgcggatatctggcataagggcggcaacgcggaagaaaattacaagcgatgcgtcgaaaaattataaaaaaaatagggcatatcaggttactgggcatgtatgcgtgaacagtaactatatcagaaacggggtatatacaaaagtctaattgaatttgatccttatttgcgctattataaaaataagcattcctgtagactaaaagaagttggatgcaaatcacagatttgttctacaagaaagatgagggaaacaatgcgagttagtgatgtggcatacgagaagattaagatgatgattattacagccagacttcgccccggacagacattagtagaggctgaattgatggaagagctggggatgggacgaactcccatccgtgaggcactgaatcgactggcatgggaaaactttgtgaaaattgtcccgagacaatgtattatggtaaatgagatttccttatatgaagtggaatcgatttatcagatgagatttgctctgtctccacttgaatcagagcttgctgctatgaatcggacggaagaagatttaaagcggctgaaagacagcctggaagtcctgagagaggagacagatgcggaagaaagagttcttttggatcgagcatttcatagaattatttcttctatgactaggaatccgtttcttgagcgggagatgaataattaccaggatttgagtattcgtcttctgtttttaaaccggattaatttatcttcgattgatgatatggatattggacatcatgaggaaatttatcgttgtcttcaggagagagatgtagataaattgatatcggttcagaaagcgcatgttcaggcatttaaagaaaaatttatccgctgagagcgggaacttcccttcgctgaaaggcgaagggaaatataagccacataagatatatttgaagtatattactaactcggactttaagttgaaaggagaccagctatgaaaaaaattgcttttattggaagtggaactatgggtacagctcttgcaacggcagcctgcaagggaattgatccatcggaagttgtgattacagatgtggttacagaaaaaggacagaaattagcggacgagctgggatgcaactttgttgagaccaatggagaagcgatcaaggcagctcattatgttgtgttctgtgtaaaaccgcagtttttaaagagtgttctggaagaggtgaaaccggtctttgcggcatgtgcagaagaagggcaggaaaaaattatcgtttcgattgtagcgggtgttgaggtttcaacctatatgaaagaattagagttagaaggaaagaatgttccggttatccgtattctcccgaatacagcctgcttgattggaaaaggttttatcctgatcgaacagggcgacagctacacgaaggaacaggaggacgaattccggtatattctacgtgaagccggtggatttgacagccttccggcctcccagtttgtggcaggcacggtattaacatctacatccccggcgtttatcgcaatgtttgctaattctctggcagacggcggcgtttacaatggtcttttacgttatcaggcgagaagatatgcactggaaggaatccttggaaccgtgcagctgtttttacagagcgaaaagcatcttgagaatttaaaagatgatgtgtgttctccggctggtccggcgatgatcggtgtgaagacactggaagaccgtgggttccgcagcagcgtgatcaatgcggttgtcgattcttataaacgatttgatgaaattggaaaattaaaataatcgttgcatcatcctgaaaaagcccccctttatatttttataccaccttagcagccggtcggtttccctgatgaagagaagccggccggttttccattaactgcttgggatatctggttttgataagtgttgtttccggtactgtgctggtgtgcagccaatgatccgtttgaatgtggcgatgtaattgctgacctggttgtatccgaccagtccggcaatctgtgagatgggcagatcgcggtgaaggagggaaacactggtctggatgcggtaattagttaaatatccatagggagttgtgtgaagaatattttgaaaaatccggcagcattctccgacgctgatattggctgatgcagccaggtctgagagctgtaaatcatctgcgtaatgtgcatagatgaacaggagaatggattgcaggcgctgctggcgcaggaggttaatagaggtagaattcccactgctgtgaaaattggaaatcaacagattccacatcgaggtaatcttaatgcagatagaatattcattgcctttaacctgattggaaagaaataaatcggttatttttttgtgcagtccgatcaactctttctgccattcggattccgggtgaatagagaaagcggagaatttcccgccggcggtatagggcaggacgtagtcctgatccatgcggcttccaggaaaaaaggcaagaaggcggtaaggaaaattgaggctcgcataggagccgtcttccgacatctgtgtgacggcatgaatcagggaggtgttgacgaaaatcagatctccagcctgtccgggcagagaaagattatctacctgcattgtcaatgttccgcttagtacgagggtaaactgcagctcatcatgccagtggaagtcgcgcagccagcgtcccggcggctgcatggaatgaatatcagaatagtagacattgaccggaaaatcttgatcttgatagtggttgatttcctgtaactgggaagtagatttcaaaggatcccttctttctataaaaattcaatatgttaagattttggtatttttagttattgatattgtaccatttccacataagaattgctatacttttaaacgaaaagagatttatagcaggtgctaaaaaaataaatcccacagaatgggaatgtgagtaaaaaataggaggaaatcagatggcagcaatcgaaagaaaaccatacatggatcggattgaccgattaaaacagagagtattaaagaccaagccagagatggatctggaaaatgcaattatcctgacaaagggcttccaggaatcagagggacagccgctgtgcatccggaaagcatatgcatttaagaaacagtgcctggagaaaactgtaaaaatctggggggatgagctgattgtcggcaatgccggaagcaagcagcgcggcggtattttaagtgtcgatacctgctggtcggttctggatgaggagctggataccatcagtacccgtccatatgacccattctatctgcgcccagaggatcggaaggcatttgaggagatcatccgcccgtactggaagggacgttccacgtatgagcagtggctggtacaatgcccagattttgcggcaaccttacgtgactgcggcgctctttacatcaaccgtaaatcggttcgtggctggggcgagacgactgcgggttattccagagtcattaaagaaggcatggagggaatcaaggcgcatatccataaagtgcttgatacacttgatattacccgtccgggtgactatgagaagattgaatacctgaaagcgatggagctggcagctgacggtatctccgcattgggacaccgctatgcggcagaggcgagaaagctggcagaggcagagccggatgagaagcgcagaaaagaactgttacagattgcagggacctgcgatcaggttccggaaaaaccggcgcgtaccttccgcgaggcgattcagtcgatgtatatttaccagacctgtattttcatggagcagaatgcagcaagctacaacccgggacgtatggatcaatatctttacccattttataaggcagatatcgaggctggccgtttgacagaggaagaggcgcaggaacttttggactgcttatgggttaaattctctgagcagtgcctgttccaggatcaggtaaccgcacagttttccgccggttacccaatgttccagaacgtatgctgcggcggtgtggatgagcgcggcatggacgcagtcaatgacgtgtcgtacctgattttgcaggcaaccgcagaagtacagttatatcagccatccctgtctgtccgctacaatatggcgaagaatccgagcagcttcttaaagaagattgcagaggttatcaagcttggaaccggtttcccggcatttcacaacgatgaagttggtatcgagatgctcctgaacaagggaatcccgttaaaagaagcatataactggaatccatgcggctgtgtagagacgaacctggaaggaaaacagagatgctacaccgcatatgcagacttcaacttaggttctgcggttgaatttgccctgttaaacggcaagagccgtaaatatggcattcaggcatctgaggcgaccggcgatccgactgcctttaatacctacgaagagtttgaagaggcagtcaaagagcagatccgctatgaacttcgcggaaccgtggcttccagccatgtatgcgatgacattggcttccagagggtcgttccggcactttccctttccttctatgagtgcgtagagaatgcgaaagattacgcatggggcggtgcgaaatataaccttggaaatggtattgatgcgatcggcgtagcagacctgatcaacagcctgattgcagtaaagaaacttgtatttgatgagaaaaaagtaacgatgcagcgtcttctggatgcactggatgcaaactttgtgggttatgaggatgtcaagaagatgtgtgatgaagctccgaagtacggcaatgatgacgacgaagtaaacgagctgaccggtgatatgttctgttttatcgcggactatattgagtcgttccacagcaaattcggcaagatgacgccaggtattcttccgctatctggaaatactccgtttggtctggaggtcggtgcacttccgtccggacgtctggcttggaaaccgttagcagacggcgtatctccgaaccagggaaccgataccgagggcatgggcgctgtattgaaatccatttcccacattccgcatggccgtttcaatcagggaaccctgctgaatgtaaagatggatacggtattccgcgacagcccgaactcgacaaaagaactgatgaactacctgcggagtctctgctccctgggcgtattccacacacagttcaatgtcatcgatacggagaccttaaaagaagcacagaagcatccggaggattacaacggactgctggtacgtgtagctggttatacagcatattttacagagcttggaaaagaagtacaggacgatatcatttccagaacttcacattccaatatctgctaggaaaaagagtgaaatctgccgtgtttcataaaaaatacggcaaatcagctaccggggatgtgcatcatgcgcggtggcgggcagcaggcaaggtgtacttgacaggaggaacagcgtatggaattaaaagcaaatattcttcggattgagcggttatccctctccgatgggaagggaatgcggacggttgtattttttaagggctgtcccctgcgctgtgcctggtgttcgacaccggagtcacagtcggggcagcgggaagtctactatatgaaagagcgctgcaccggatgcggtgcctgcatccaggtctgtccggaacaggcacttcgccggagcgaaaaaacgggagagatcgtgagggattacagccgctgtaaacagtgctttcagtgtgtggatgcctgcaattaccgggcacagcagatctatggcaaggagatgaccgtaaaagaggtaatgcgcgagatccagaaggatgagatgtttttcttctattctggtggtggcgtgacactttcaggaggtgatctgttctgtcagacggattttgcggaagcactgctggaggcctgtgatgatgcctgtatcaatgcggcggcagagttagatatgtttacttcgtttgaaaatgtcaaacggatcgtgccgcatctgcagatgttttatgtggatgtgaaaaccatggatccggaaaagcataagaaatggacggggcaggacaatgcctgtattctggaaaatatccgcaaatccgatgcgatctgcgcgccgcattcgattcatgtccgtgtgccgctggtagaaggagtcaatgatgatgtggaaaatattcggaaaacggcgcagttatgccaggaacttaaaaattgtcaggaattggaatttctgccatatcatagactggggcttcatgcataccggcagctggggagaaaatatcagttagaagaacatacgtcgatgagtcgttgggatgtgtatcagaaaatggaatttctgtgcgaaacggattggacatttgatatagcgatatcgggattggaggtgtataaagctggaataggaaaaacgggagtaacagaggaggtgttaaaagcgtaaaatacgataaaaattagtattggataaaaatggataatgggaaaatgcgtaccgtgtaagataaggttggttggtgaaaaatagtcttgcacggtacgtttatttctatgaattttctatgaatttcaattttcctctggacaaataagatgagttagtgtatactaacttcatcagcagttagacagagctaactttcggaggataaaatatgagtgttgtaattgtaggtggtcatgaccgcatggtcagccagtacgtgaaaatctgcaaatcatttaactgtaaggcaaaggtatttacacagatgacggcggatttcggcaaacagatcggagcgccggatctgcttgtactctttacaagcaccgtttcccataaaatgattcggacggcggttgatggtgcaaagggaagccggacagaagttgtccgctgccacaccagcagcaaaaccgcgttggaagaaattttgcaggaacactgtgcagcttgctgacgtatttaaaggcgaagccacggcaaattccgttactgggcacgtatgcgtgaacagtaactccgtcggtttctggaaacgatagattgatttcgatatggtttgaaatattcttccaaatatggtattctagtatatagtattatggtaactggtcggcagtttgggaagactattctgcgggagacgggaaggcacgaagccaggccggttatgtgttagaagtttggagggaatcactttgaaaatacagcagtcagcagaggattatctggaaacgattcttatgttaagctatcgcaagccgatgatccgttcgatcgatgtagtcaatgagctggggtattcaaaaccaagcgtcagcgttgcgatgaagaatcttcgtgaaaacggttatatttcgatggatcatgagggatatatcactctggagccgtcgggacggaagatcgcggagatgatttatgagcgtcatacattactgacaaagcttttggtagcgttggatgtgccaagagaggtggcagtggaagatgcctgccgcattgaacatgtgatcagcccgcagagttttgaggcaatcaaagaatttgcagccgcgcatctggcaaagctcgagaaagcaaaccggacagatgagccggaaaaatagatggctgtttaagattcggacagttatattctcatcataaatttataattgcagaggacacggaagagagaccgcacgcgtgaacgtggcggtctcttttttcataggaaattacgtcctatgaaacaaaaaaacgcttcgcgggatttgcactcgcgtgaagaagcttttctcaaataaaagcgatcaggcgttgagcatctgtaccgaaaaatcattaaaagtacccagaaccgccagtgtgtagctgtaaccgctgcgaagccggatatttgtgttgacgatggcgaatcccggattggtccggcggtagacggtcagctggtagatgccggggatgatgtgcatgtagcgcgtataattcatgtaatccagatcggatacgaccagacgtccgttcaggtatatatcgatgggttcgcggatggaggcggcattgtagaaacgcaggtgcgcgatctccgatgaggtggaaaagaacggcgagagaatgccccaggtccagagcgcgccatttggagatggcttccagttggaaccgccgcagtttatgcagccaccggtgttcgggctgccatgattattggacggcagggtgggcatcacatccccgtatggtccgaagcccggagatacctgaagatcattggatgagctgtccggatatgttaagataacaggaggctgagaactaaatccagactgtgccgtatcactggttccagctgctgccgcatccgtctccggtgccgccgccggagtcgtgtcagcatccccctcaggcactgctgctgcatcgtagttgtatgtttccataaaaagatacctcttttcatattggctatattgcagtatatgaagaagaaaaaaggagagttactatttgcaggcaggaattttctggactgaaaatcctgttcgatactgtagaaaagtgtattttgccgatctggaatgcggagcatcggcaaaattcagttatagtttacatgattttgtgaaaggtcaagaatgaagaaaataaaaaagagactcgaatctcgaatctctttccagtgacctgtccgggaatcgaacccgggtttacgccgtgagagggcgtcgtcttgaccgcttgaccaacaggccatatttaattttattcaatcgaggcgacgtgattcgaacacgcgacctctgcgtcccgaacgcagcgctctaccaaactgagccacgcctcgatatgattttctcgcttttgaagcggtgctcatcagcgactcctatatactatcacgccttcaaaaaaaatgcaagcgtttttttgaaaaaaattgaaaaagttttaaaaaattgaaaaaaccctttaaaatcaatattttcacgcttttaacttatatttcgaaattattatgaataacgtaagaaagcgaaaggatgattaaagtcttgctaaggatgcgccgaaactcttttcattttggataaaaagaataaaatggggaacaaagcatagtgagcttgcattgaaaaatgaatgagtcaggaggaattaagtatgaacatcatcgcagccatcttatttggaatatatggagtgatcggaggcgtgagtaccgtcgtatgtaccgtgagcattccgggtatcattatttggaaaatttaccggaaaacgaaatatcataaggcgctgacggattaagtaaaataagggtaactgttcagtaggtctgtgcatttactgcgctgaccgtacgaaaacatgggctagcaggcaaaaatcccattgccgtaggcaatttttaatggatttttgcgcgtgactgtgaaggtactgaacagtta

SEQ ID NO: 11029 - DNA, 58351 bp, Unknown
  gut microbiota DNA sequence
taagaattataaaaaaagggtcttgcaggtgaaagattttctatctgcaagacccttttttgcttaaaatcaatgtaattatcggacaatatagacatcggcgcttctctttccatactgcagtgcctgactgtgggaattgaagaagatgtccagtttgtttccgcggatgccgctgccgctgtcctcaacggtatagacaacgccgttgatgcggagtttagttccgagcgggaatacgcgcaagtcggcggaaatggtatgtcctgcctgcggaatggtgccggatttagtgcggttctttccaccacggcagcatctgcggcagctgcagtaagcagttgtcgtaaaacgtccggcgtagatttcagcaggtgcctctgcttcctgtgcctcggcagcagcatttgtgtcagtattttcagtcattgcagcttcgccagcgttctctgcctccacttgtgcagactcatttgaaaatgcagcgacttctgcctcggaagcgttcgtgtcagccgcttcttccgcagcagcgtttgtctgctttctaatcagctccggatcggaagccggaccagatggtgtctgggctgcttcggtggaaatgccgtttgtttcttcaccggctgccgcatctatttgggagacaagctcagttccggcatctgtggctgccagtgtattcatggtgcctgccatgagacagaccaggctcattgccgttgtggcaagtccgcgccgcatggtgttcatcatattcatcaaataaaaacctctcatttcaatttagattcatttgtctcatcgcaacgattgtgtatctcacaaatattgcaatgcgtttacaaatgttataatttgttactattatattacaaaaatgttaaatgtcaagccggagagcctgaaatagggctctgggagcggtcggaggttcgacaagtcgaaagcttgttcggacgcaaacaggaaagcgggtgagtgagtttctacctatagaaagtgtgaaaatcagcgtgcctaaaaacagggtatgcagaatgaaaaattttattcgaaaaaagaagaaaaaattttttttaaaaaccgaaaaaaatcattgacaaatacttgcgtaagtaatatagtatgaactgtagatattagcactctgatagattgagtgctaacaaaaaacttccagagcgggtttaagagaccggcggaagcggatgcacggaaggagagattggatggaactggatgagagaaaagaaaagattttgaaagcgattatccagaactatctggagaccggagagccggttggttccagaacgatctccaagtattccgatttgaaactcagttcggcgacgattcgaaatgagatgtcggatctggaagaactgggatatatcattcagccgcacacatcggcaggccggattccttcagataaaggatatcgtttctatgtggatcagttgattcatgagaaagagacggaggtcacgcaggtgcgtgatatggtcatccagagagtggatcgggtggagcttctgttaaagcagatggcaaagcttttggcgagcaatacgaattatgcgacgctgatcagcggaccgcagtatcaccagacgaagatcaagtttatacagctttccagagtggaagccgggaaactcctgattgtcactgttttagaaggcaacattatcaagaactcgattgtggcactcgatgcggagctgactgatgaggacatcctgaatctgaatattcttttaaatagcggtctcaacggattgacgatggagcagattaatctggatgtcattacccggatgaaagggcaggcaggcgagcgcagccacatcgtggatgtggtactaagcgaggtggccgaggcgattcgttccggcgaggaagatttacagatttacaccgaaggtacgacgaacattttcaaatatccggaactgagcgatggtgcgaaagccagccagctcatcgggacactggagcagaaagacctctggagagagattcttaccgaggacgatgcggacagcgataagaaaaatgagattcaggtctacatcggaagtgagacacaggtgcagtcgatgaaggactgcagtatcgttactgccaattatgaattgggggacggacttcggggaacgataggaatcgttggaccgaaacgaatggattatgacaaagttgtatcgaccctgcgctcattaaagagccagctcgatcagacattcaatcataaagataccgagtagcacggatgtgcaaaataaagaggtgagagacatggcaaagacagagatagattccaaagcagccgaggcagcaaatgaggagcaggtaaaagaaacagaaacccaggcagaagctgaggtagtgaaggaaaaggaagcttcttcggaagacgcacaagcgccggagggagaaaaagagaaaaaaggatttttctccaaaaagaaggataagaaagatgagcagatcgaggagctgacggatcgcctgaagcgcacgatggctgaatttgacaatttccgaaaacgaacggagaaagaaaaatcagcgatgtatgagattggcgcaaaggacatcatcgagaagattctcccggtggtggacaatttcgagcgtggtttggcgaccatcccggagggcgaagaaaaaagtgctttcgccgagggcatggataaggtttacaagcagctcgtaaaaacactgggtgatgcaggtgtaaagccaatcgaagcggttggtcagccatttgatccgaacttccacaatgcagtgatgcatattgaggatgaaaacctgggtgagaatgtggtagccgaggagttccagaaaggctatgtataccgcgacagcgtggttcgccacagcatggtaaaagtggcaaattaaaataggtaacacgtaaacagctggcacccagaattcggtgctggtggttgatttgatataatatagacagacaggcggcagaatttaactcccatggggagaaagagaactgccagaaaaagataatttcaggaggaaataactatgagcaagattatcggtattgacttaggtacaacaaacagttgtgtagccgttatggaaggtggtaaaccggttgttatcgcaaatacagaaggtatccgtaccacaccgtccgttgtggcatttacaaagacaggcgagagactggtcggcgagccggcaaagcgtcaggcagttaccaacgctgagaagaccatttcttctatcaagagacacatgggcagcgactacaaagtaaccattgatgacaagaaatatacgccgcaggagatttccgcgatgattctgcagaagctgaaagcagatgcagagagctacttgggcgagaaggtaaacgaggcagttattactgttccggcttacttcaacgacgcacagcgtcaggcaaccaaggatgcaggtaagatcgctggtctggatgtaaagagaattatcaacgagccgacggcagcagcgcttgcgtatggccttgataatgagaaagagcagaagatcatggtatatgatttaggtggcggtacattcgatgtttccatcatcgagatcggtgacggcgttatcgaggttctggcaaccaacggcgatacacatctgggcggcgatgatttcgataaccgtattacccagtggatgatcgacgagttcaagaaagcagagggtgtagacctttccgctgataagatggcgcttcagagactgaaagaagcagctgagaaagcgaaaaaagagctttcttccgcaactacaaccaatatcaaccttccgttcatcactgcaaccagcgagggaccgaagcatctggatatgaacctgaccagagctaaatttgatgaactgaccagagacttaatcgagagaaccgcaattccggtacagaacgcactgaaagatgctggtatcactgcttctgagttaagcaaagtacttctggtaggtggttccacacgtatgctggcagcacaggaagaagtaaaacgtctgactggtaaagagccgagcaaatccttaaacccggatgagtgcgtagcaatcggtgcagctatccagggtggtaagctggctggcgatgccggtgccggtgatatccttcttctggatgtaactccgctgtcactgtccatcgagactatgggtggcgtagcaaccagactgattgagagaaataccacaatcccgaccaagaagagccagatcttctctaccgcagctgataaccagaccgctgttgatatccacgttgtacagggcgagagacagttcgcaaaggacaacaagacactgggaaccttccgtctggatggcattcttccggcaagaagaggtgttccgcagattgaggttactttcgatattgatgcaaacggtatcgtaaatgtatctgcaaaagaccttggtacaggcaaagagcagcacatcacgattacctctggttccaatatgtccgattccgatatcgataaggcagtcaaagaggcagctgagtacgaggcacaggataagaagagaaaagagggcatcgatgcaagaaatgaagctgactccatggtattccagaccgagaaagctctgcaggatgtaggcgataagatcgatgcaaacgataaagcagccgtagaagctgacttaaatgcactgaaagaagctatcaacaaagctccgatcgaccagatgaccgatgcacagattgatgaaatcaaggctggtaaggaaaaactgatgaacagcgcacaggcactcttcagcaaggtttacgagcaggcacaggcagctggcgcagcaggagcacagggcggtgctcagggtgcagctgatgcaggaagtgcaccgcacgacgataatgtagttgacggcgactttaaagaggtataatataataggcagccatttttcaaagaaaaatgagcggattacgaatgcttttgaggattgcgggagcaggtagtgcggagcaatccggggcatcggggtatcaatagaaaaacgcagtgaggggctgtcgcaggaatctgcggcagacccccatttgtaggttgtggggtaactgttcagtaggtctgcgcatttactgcgcgtgactgtgaaggtactgaacagttacgttttgggaagataaatagatacgatagaaactctgccggatgcggtcaaatgtaccggcggattttgggaaggaagagctgaaatggcagagagtaagagagattactatgaggtcttaggcgtcccgaaggatgcggacgatgcgacactcaaaaaagcatacagaaccctggccaaaaagtatcatccggatgcaaatccgggcgatcaggcggcagccgataaatttaaggaggcatcggaggcctacagcgtactgagtgatccggagaagagacgtcagtatgatcagttcggccatgcggcttttgacggcggtgcaggcggcgctggcggattcggtggttttgatttcaacggcggcgatatgggagacattttcggagatatcttcggagatatttttggcggcggacgcagccgcggcggcagaagcaacggaccgatgcgcggcgcagatgtgcgtaccagtgtgcggattacttttgaagaagcgatcttcggctgtgaaaaagagctggagttaaacttaaaggaaacctgtgagaaatgtcatggaacgggtgcaaaaccgggaacccagccgcagacctgtccgaaatgtaacggtaaaggcaagatcatgtacacgcagcagtcgttctttggtcagattcagaatgtacagacctgtccggattgtaacggaaccggaaagataatcaaggataaatgcccggattgctacggaaccggctatgtagcgaagagaaagaagatcaaagtgacgatcccggcaggtatcgacaacggtcagatgctgcgtgaccgcggcaatggcgaaccgggtaccaacggcggtccgcgcggagatctgctggtagaagtagtggtatcccagcacccgatcttcaagcgtcaggatacaacgatctactcaaccgtgccgatctccttcgtgaaagcagcactcggtggtccgatccgcatcaagacggtggacggcgaggtagagtatgaggtcaaaccgggaacccagacagatacgagagtccgtctgaaaggaaaaggtgttccgtctctgcgtaatcgcaacgtgcgcggcgaccatttcgtgacgctggtggtacaggttccggagcgcatgaccgaggcacagaaggaagcgcttcgcaagtttgacgatgccatgaacggaattgcaccggagggcgagaaacataagaagaaaggactgttcggaaagctggagaaatagaatacggacaggacaaaaatagaaaagagctgtcgggctgacataaaaatgcggctcggcagctctttgtttctgtttcatagaaaattacgtcccattacgcgttctgtaacagaatatagttactgttcacgcatacgtgcccagtaacggaatttgccgtggcttcgcatttaaatacggcaaattcctgctgccaccacgttttcttacggcactttcggttccaaaagtgtctacccgtgaacagaaacgtaacagaatataccagaaaatgacagagttttgtaagttgacttccgtttaaaacttatatacaataggacgatggaggaccagcaacacagatggcatggatttttgccggaaaaatatgccaaatgataaaatcattccttgaatggcaggtccttccgggaataggaacccgtattggatttttaaagggagaataggaagatgacagatagaaacgggaatttgaataaaaattcacgttccggcagccgcgaagatgggcgggaaccggtgagacgaaatacggcgatgaatagccgggagattgtactggaagatgaagattatctggatgagccggatgaggactatttggatgatgattatttcgaccgggatatggaagaacggatcctgagagaagcggagttggatatggaaaacatacaccagccagagagtcaggatcagaaccggtgggaagagccggaacgcctgccggagaaagagccggaggagacagccagtcgaaagcgcagccgcgcccgtggaaatcagagcgcgggcacagggcgggaggcagcccatgcggcgccgcagcggggacaggattccggaaggacggcatcctggacggaaactaccccggaaaaggcagctctgaaagctgagcatagaaaaacaaccggtaaaaagacggcatggatcgctgcctgcacggcgggcattctgctcgtggcagccggaggtgtctatgcgggaatgtcccagaaatataagactcgtttctttccgaatacgcagatcaacggtgttgacgcgtctggaaagacagcggcagaggtgcaggaactgattgcggaaggtgtgaatggttacacactgacgattactgagagaaataatcagacagaaaccattgccggaaccgatatcaagctgcatgcggagtttgacggcagtctggaaaagatggtagcggcgcagaacccgttcgcatggctgtggcatatgaaacaggaagaatatacgatcggaacgatggtggcgtatgacgatgcggcgctggaaagccagatccggaatttatcgtgtttagacccggagaaagcggtagaaccggtcaatgcaaagatttctgagtatgtgtccggacagggatattcgattgagcccgaacaggaaggaacggcagtcgaggcggagaagctgacacaggcggtaacgggtgcgatcgagaatctgcaggatcatttatcgctggaggaagcagatgtctataagaagccgacggtattgaaagacgatgcatctctggcagaacagctggataagatgaataaatacgcgaaaatgagcgtgacataccagtttggcgattcgacggagaccttaaatggagatcagattcatgggtggctgattgccaatgcagacggaagtgtttcggtagattcctccaaggtgtcggagtacgtgtctgagatggcgaaagcacacaatacttcaaacaaagcgaaaacattgaaaacatcgtatggttccacgattcaggtaagcggcggaacgtatggctggaagatcaaccaggcggcagagacggaagcgctggcagcgatcattgcctccggcgagagtacgacgcgtgagccggagtattcccagaaggcggcgagccatggggcaaatgactacggcgatacttacgtggagatcaacctgaccggacagcaccttttcttctataaagaaggaaagctggtggtagagtcggatttcgtatctggaaacctggcgaaaggctggggaaccccggcaggctcgtatccgctggcatataagcagaaaaatgcggtcctgaagggtgagaattaccggacgccggttaattactggatgccgttcaataatggtatcggtatgcatgatgcgaagtggagaagcagttttggcggtgcgatttacaagacgggcggttcccacggctgtatcaacctgccgccgagtgttgcaaagacaatctttgacaatatttcggcaggaactccggtgatctgctacaatctgcctggtacggagaagagtacgacgagcggtacggcaaaaccggcggagacgaagccggcagagaccacggcgccagcagaaacaccagctccggcagagacgcaggcgccagcaccggcagaaacacaggcaccgggtccggcatcgaccacagcgccgacgcaggcggagacgaaagcgccggagactgcggcaccgacccaggcaggaccgggaggtccttcgggggataatggtggaaatattgcagtgggaccaggagcataggaagaaacgggaataaaatcgagaaaaaacctgcataaaatgatttacaccgaaaacatattgtgttatactaaatacgtatgagtccgccggtgctcagttttttgacgactccgacataaacttagcatacggtaagaataattttaaggaggaaatcacaatgatttcaaaggaaaagaaagcagctattatcgaacagtacggaagaaaagcaggcgatacaggttcaccggaggttcagatcgcaattctgaccgctagaatcgctgagcttacagagcatttaaaatccaatcagaaggatcatcattcccgccgcggacttctgaagatggtaggacagagacgtggtcttctggattacttaaagaaatccgatctggaaggataccgtgcactgatcgagaagttaggcatcagaaagtaattaagattaaaacgtatagggtggagcaatccaccctagttgtttatgtagaagaaaagtccgagaccgctgctgtacccgtaaagcggaaaaacatatttgcgggcagagcagtagtttcggtattacttttcacagaaaggcacttttggaaccgaaagcggcgtatgagaatgtgaaggttcttctgcaaaacaagatgaaaggagatatgagatgtacaagagtttttcgatggaactggctggcagaactttaacagtggatgttggccgtgtggcagctcaggcaaatggtgctgcatttatgcattatggagatacaaccgtattatcaaccgcgacagcttctgacaagccgcgtgacggtattgatttcttcccgttaagcgttgagtttgaggagaagatgtattcggtcggaaagattccgggcggatttaacaagagagagggaaaggcatctgagaacgcagttctgacagcacgtgttatcgaccgtccgatgcgtccgctgttcccgaaggattaccgcaacgatgttaccttaaataacctcgtattatccgttgaccaggactgcagcccggagtataccgcgatgttaggctctgcaatcgcaacctgcatttccgatatcccgtttgatggtccgtgtgcgaccacccagatcggcatgatcgacggcgagtttatcgtaaacccgaccaatgcacagaagaaagtatctgatatggctctgaccgttgcttccacccgcgagaaggttatcatgatcgaggctggcgcaaaggaagttccggagaacatcatgatcgacgcgatcttcaaggcacacgaagtaaaccaggagatcatcaaattcatcgacactatcgtagctgagtgcggcaagccgaaacattcctacgagagctgtgcagttccggaagagctgtttgcagcgattcgtgagctggttccgcaggaagagatggaagaggctgtatttacagacgagaaacagaagagagaagagaatatccgcgcaatcaccgagcgcctggaagaggcattcgctgataacgaggagtggctggctgttctgggtgaggctgtatatcagtaccagaagaagactgtccgcaagatgatcctcaaagatcacaagcgtccggatggccgcggtatcaccgagatccgtccgctggcagcagagatcgacattctgccgcgtgtacacggttccggtatgttcacccgtggacagacacagattttaaatatctgtacactggctccgctgtccgaggcacagaagatcgacggactggatgagaatgagacatccaagagatatatgcaccattacaacttcccgtcctactccgtaggcgaaaccaaaccgtccagaggaccgggacgccgtgagatcggtcatggtgcgttggcggagcgtgcgcttgtgccggtacttccgactgcggaagagttcccgtatgcaatccgtaccgtatctgagacgatggaatccaatggttctacctcccaggcaagtatctgtgcatccactctgtccctgatggcagcaggtgtaccgatcaaagctccggtagctggtatttcctgcggtctggtaacaggcgacaccgatgatgattacatcgttctgaccgatatccagggtctggaagacttcttcggcgatatggacttcaaggtaggcggcactcacaagggtattacttccatccagatggatatcaagatccacggtctgacccgcccgatcatcgaggaggcaatcgctaagacgagagaggcaagactctacattctggatgaagttatggcaccggttatctccgagccgagaaagaccgtcagccagtacgctccgaagatcgttcagatctccatcgatccgcagaagatcggcgatgtagtcggaaaacagggcaaggtaatcaacaagatcatcgagcagaccggcgttaagatcgatatcgaggacgatggcagcgtatctgtatgcggcaccgatcaggcaatgatcgacaaggcagtttccatcatcaagggcatcgtgaccgacatcgagccgggtcagattctgacaggtaccgttgtccgtatcatgaattttggtgcattcgtagagctggctccgaacaaagatggtatggttcatatttccaagctttcggacaagcgcgtagcgaaggtagaggatgttgtcaacatcggcgatgaagttactgtaaaggtaatcgaggtcgataagatgggtcgtatcaacctgagcatgaaaccaggcgatctggctgaaaataaataataaatagattgcaaatgcacacgatgtgctgcaatcatccatcataaaatcaatgtgcctgcatcactgcggcgcagaccagataaagtaaggaatgctgcaaggcagagaagcggttcgcttctgctttgctgtgttcctttttactttacaaagaggaaaaatatgttagaggtaacagggatagaaaaacggtaccgcggaaggacgatcctaaaaaatgtctcttttcgggcaaatccaagggaatgcatcgggattgtcggcggaaatggatgcggcaagacgacgctgctctcgatcctcgcggggatccgcaagccggatcgggggagtattcggattgacgggcaggaggcgcttggaagacatcgtctattagaagaaaaaatcgcctatgtgcctcaggaaaatccattgatcccggagctgacggcatttgataattaccgtctctggttccgggggaaacggcgggagatggagcgggatctggaatgcggcgtcggtcatgtgctgggcgtggaccgattcttgaaaacgcaggcgggacggctttcaggcggagagaaaaagaggctgagcatcgcggcggcactctccggacgcgcggatatcctgattctcgatgaaccgggggcagcgcttgacctggaggccaaggagcagatcctgacttatatcaggagctatgtgaaagcaggggggacagttcttttaacgtcccatgagatgggagagataggggcgtgtacaaccctgtatgtattaaagaacggtgtgctggttccgacggaggcagggctttcggcgcgggagctgatacagaggttttaaggttactgggcatgtatgcgtgaacagtaacgttttaagagtgagaaaacaggaggaggtacaagatggaagagggaaataatgcaaacaatacaaacaatacaaacaatacaaacatgtcaaacaattcaaccccgctaaacccggcagaggcagcggcgcaggcgcttacggccgcatctgacacagcggatggaaccagtgcaggcggatccgctggtgctggcggcggaatcggtggaaatgctgcaggcggcagtgacggtggcagaacgggcggaaatggttccggcaggaagaaatggctcattccagccggagcagccgcagcggtggtcgtgatcggcggcggtgtgatgctcagccatcaggcagatccgaaggacacagtgatcgatgcgttcaagagtatcacggcggaagggcagttaaatccgtctgaggagatctttgggacgaaagagctggaagaccttttacagaagggatctgcgcagacgggtatggagttaagcatgacaggtatttccgatgaatccctgaaccagatgagcggtgcgggcatcggtctggatgtgaagcgcgatgtggacagcggacggcagctgctaaatctttccttgcagtatggcggcggagaattggcggacgcacagctttacatggatgatacacagatcatggcggcgattccggcactttccagccgtatgtttacccttgactatgtcaatgatctggaaggacagctcattaattctccgtatgcggcgcagaagctcgaagagcaggggattgatattgaggggctggcaaattatctgggacagtacaaggaagcgctttcggacgaggagccgatgatggatctgaaagcactctggaaccgctacaaagagggaagcaaggcgattgatgacctcaaaacggctatgaccgtcactaagaatgacaaaaaagagtttacgatcgacggacagagcgagaactgccgcggttaccatgtgactctgccgaaggatgcgctgattcgctttgcaaagacgacgagagaatttttcctgaatgatgagacactcaaacaggatgtggtgcgctatctggaactggcaggcgatgcaagcagcatctatgcagcggacggggacggagagagcgtggatccggaggaacagcagaaggaactctgggcgcaggcggaagcggtgctggacaatctggtagaggaaatggaaaataccatcggggatgtgacgatggatgtctatgtgagaaaagacggcaaaatggctggattttcctatgagacggatgcaacggttgaggaagaaaatatccgtttttacggcgatgtttcctttggcggcggttacaacatgctgtcgaatgtgaatggggcgttaaatattgaggattcggacggtcaaattatcacggtttccctggataaaacaggcgcttacgaggctggaaagagctggagtggtcaggtaattgcgaccctgcaaggcgacgaagagaaataccagtttatcctggatggcgactatcagatcgcggacggcagctatgaggtaaagctggatctgcagagtaacggtgcgtctcaggcgtcgctcacggcgaatggcacggtcagcaacctttcaaagggcgagagcgtccatatcgatatggattccctgcgtctggaaactacattgttaaatggaagcagttcttatgttgaatttgccggttcctattatgtcaacccgctggaggatgagatcgtgcagccggacggcgttccctttgatgtgctggcttcctccgaggaggattataaccaggtcacaacggagataacaggcaacctgttcgcaattctcctgaaagtcatgtcataggcggcggaaaatgcgaacatatatgatatatctgctgctgaccggaaagcgcctgctccgccagctgccgtattttctggcagggctggcggtgatggtgctgctcgtcggcatggcggcattttcggcgtctaaggttttatatggggaaacatctttaaagaaaatcgaggtgggtgtggtgcttccggaggacgatgcgctttcggaaaagataaccaaaatgattgcctcgctggacagcgtggaaagtctctgcgacttttcgtatctggaacacgatgaagcgtttcaaaagatgaaaagcggggagcttcaagcggttttcgaggtgccgtccggcatggcgcgcggcattttggacggtacgaaccagcccgccacgatctggtttccggatgagagcgggctggaaagcgccgttttccgggaactggcagagtcgggcagttcgatgcttggcacttcgcaggcggcaatctacgcggcaaataaatgtttaaatatccagggagtgccggaacagatttcggtgtctgaacaggatttgaaccgtatctttttaaaatatgcgatgaaccgcgaggcccttttccggaagaaaacggtcagcgctgcaggaaatgtatcgacggcggtcttttatggaatttcggggattgtatttctgatgattcttaccggaatcccggcagcgccgtttctggctccccagacggaggcgctggaacaggggcttcggcgcatcgggatccggcggtggtatccgcttttctgcaaatgcttgtgcatgacgcttcttctgatggcagtcacggcgggcggctatggctgggcggtgcagaagggatatgcgctggcggggcgggaagaactggcggcgtgggggctgacctgcacggcagtttcggcgtggattctgctgttttatgaggtgtgcagaagttcggcagcggcgattttgacgttgtttgcggtcaatgtggtatttctctttctggcgggcggcatcatcccgtccgtctttctgccggaactggttcagaaagtcggaaatatgacggtgacggcgctctggatggatggaatccgctttattgcttcgggcggggagacaggggcggttccggtgctgtggaaactggctgcggcggcattggcatgctttgcactggcgcttgccgccggaaaaaggagggattgacggatgcggaagctggcgtggtggttctgtatgtttggaatgacgctgcggcgggctctttaccgcccggtgttcctcctgtttcttctgatctttccattgggaatgggcgtgctccatcaggtggaaaaacgggattccgggcggatcgcggtggcgctctgcccgggaacggatgcgtggaatcaggcgcttgcagaaagactggaatcggaagagagccgttcatttttcttttatccgtgcgggacggaggaagaggcaaagaaggcggttatgaccggacgggcggagtgcgcctacctgtttccagagagattaaaagaacggctggacgaggggcattatacccgtgcggttcgcgtgctggtgtcgccgtccacggtggcagagaaaattatatcagaaaagatattttctgaactgttcgaggtgtacgggcgggaactgctggcggactatgggaaaaatggagcggcattccagacggtgatggcgcgctgccagacgacggaggcgcgggaaaaggcgtgcggcgtgctgatggaactctatgaaaaataccgcagcaacggaagcacctttacctttgattatcagaccttacagggaggaacggcaccgcagacaggggcgatgaaggtggtctttccggtgcgcgggctgacggcggttttcctttttatcatggggctggcggcagctgtcatggcgggcgaggatgcagagcgtgggctttatgcggcggtccggagccgggagcggtggctgctgcagacggcggagatcgcggcgtttgtctttttagcatccatttcggcctatgcggcgcttctggcgtcgggaaatggggcagagccgcttttagaggcgggaaagctgcttttttatctcttcttcgtgaccatgtatgcctttggatgcctggcagtctgccggaagccgggatttctggcggcgctgattccggtgtttatccttgcgagcctcctgctctgtccgatcttttttgacgcttcgctctttttgccgggagccgcgggtgtgcgaaagctgctgccgccgttgtggtatctgagcggcattttcggttccaaaagtgcctacccgtgaataattactttttaacaacgtttttttggataacttcgataaaaagattgctattttttcattcaattattataataaaaagagacatccggtatcgagcatcaatctgccggatgttttcatgcgagaaaatcaggagaggagtgaacacaatggaaagccggagtcataaggcggaatcagacggcagctacccagaaccgaaggcagcgtacacatgcatttgcaggaatgacagctgcaaacagcggattccttgtgtacactgccgcatctgtggataagtttccggcattctgcctgtgtgcaggagcaggaaaggagcagcctgtccgatttccaaaatgacaatattttggaaggagacgggaatgttagaagaagagaagaaagaagagctgctggctctgctgaccgggaagaagtaccgggagctgaaaagccagctggtcgagatgaatgaggtggatattgcctcatttatcgaagaattggattcagaaaagacggtcgttgtattccgtatgctgccgaaagagctggcatcggaggtatttgcctgtctggaagtcgaacagcagcagcacatcattaccagtatcacggataatgagctgcgtgccatcattgacgatttgtatgtcgatgatgcggtcgatatgctggaggagctgccggcgacgatcgtgcggcgtgtacttcagaactccagcccggatacgagaaaactgatcaaccagttcctcaattacccggaaaacagcgctggaagtgtcatgacggcggagtacgtgggactcaagaaaaatatgacggtggagcaggcatttgcttatatccggaaatatggtgtggacaaggagacgatctacacctgctacgtcatggatgaaaaacgccgcttagagggcgttgtgacggtcaaggatcttctgatgaatgattatgcggcgctcatgggcgatatcatggatccgcatgtgatcaaggcatatacgacggaagaccaggagaaggtcgtggagacgttcaatgagtacaacctcctgagtttaccggttgtggacggcgaagaccgtctggtcggcatcatcacggtcgatgatgtcatggatgtcatggagcaggaggcgacggaggacttcgagaagatggcggcgatgctgccgagtgagaagccgtacctgaagacgggcgtgttccagcttgcgagaaatcgtattccgtggctgatgatcctgatgttgagcagtatggtgaccggcggtattttgttaaaatatgagaatgccttttcggtgattccgcttttggttacgtttattccgatgttgatggatacgggcggaaactccggcagccaggcgagcacgatgatcatccgtggtatggcggtcggcgaggtagaaccggcggatattctgaaggttatgtggaaagagatccgcgtgggaatgctctgtggactttctctggcgcttgtcaatttcgtgcgtctgatgatccagtatccggggcaggtactcatctgcctgacggtagttatcagcctgttctgcacggttatcatcgcgaagacgatcggatgtgtgcttccgattgcggcgaagacgatccatctcgacccggcgatcatggcgtcgccgatgatcacgacgatcgtggatgcgtgcagcctgatgatttatttccagctggcgtgccatctgctgaatatgaaggcgtgatataaattacctgcctgctggcccatgttttcgtatggtcagcgcagtaaatgcgcagacttacggaacagttactttattttataattccaatattttaattatttctaggaaaggaaaaactgtttggaacataagcttccagacagccgtgtgaaaagtatgacaaagatcagaaccagatacgcaccgagcccgacaggcaaaatgcatgtaggaaacttaagaactgcattatacgcatacctgattgcaaaacatgagggcggcgattttatcctgcgaatcgaggataccgatcaggagcgtttcgttgaaggcgcgaccgagatcatttacaatacgatgcgcgataccggactgaagcatgacgaaggtccggacatcggaggtccggttggcccgtatgtacagagcgaccgtcagaaacagggcatctacatggaatatgcgaagaagctgatcgataaaggcgaagcttattactgtttctgcgatcaggaacgcttaaacagcttaaagagagaagtaaacggcgaagagatcatgacctatgataagcactgcctgcacctttccaaggaagaggtagaggcaaacttaaaggcaggaaagccgtttgtcatccgtcagaacaacccgaccgagggaaagactaccttccacgatgagatttatggggatatttccgtagataactccgagctggacgatatggttttaatcaaatcggatggattcccgacctacaacttcgcaaatgtggtggacgatcatttacagcagatcactcatgtagtccgcggtaacgagtacctgtcttcttcaccgaagtacaaccgtctgtacgacgcattcggatggaaggttccggtttatgtgcactgcccgaccatcacgaacgaggagcacaagaagctgagcaagcgaagcggtcattcttcctatcaggatctgatcgatcagggcttcgtttccgaggcagttgtcaacttcgttgccctgcttggctggtcaccggaaaataatcaggagattttctccttagacgagctggtaaaagagttcaactacaagaatatcagcaaatctccggctgttttcgatatggtaaaactgaaatggatgaacggcgagtacatcaaggcgatggattttgataagttctatgagatggcagagccgtacatcaagaaagtaatcaccaaggatctggatctgaataagatcgcggcgatggttaagacgagaatcgagattttcccggatatcgagggacacatcgatttctttgagacactgccggagtatgatccgcagatgtatgttcacaagaagatgaagaccaatctggagacatccttaaaggtattaaaagatgttctgccgattctggaagcacaggaagactactccaacgacgccctgtacgcggcgctgtccgagtatgtatccaaagagggcgttaagaccggctttgtaatgtggccgatccgtaccgctgtatccggcaagcagatgacgccggcaggcgcgaccgagatcatggaagtgcttggcaaggaagagtcgatccgccgtatcaagaaggggattgaacttctggaggcacagcagtaggctgtcgtaaccgtcgatgttcgacttgaagcaagtttggcttcgcagattaaatcagtaggtagtaaataaataactgctttttcatgtatcgtagatgcatgaaaagcagtgaaaaggtgcgctttgtgagaaatacattccaaggcgcacttttcttacatttgtacttgacagatttgcttcagatgcgcggcagaaggatgtcttgcacgtcaaaatgcgaatttcgaagcaaatatgccgagatattcttgaattgtggagtaaggaaacaggaaatggcattcagtaaagcacagacacaggcaatcatgcataaagatggtcccatgatggttctggcgggaccgggatcagggaaaacaacggtgataacccatcgggtccagtatctgacgaaggagtacggaatcgatccgggggatattcttgtgattacctttacccgggcagcagccgaggagatgcgggagcggtatgaagcattgaccggcggcggctccagagtcaccttcggtacttttcattcgatcttttttaggatcttaaagctggcataccgatataccgctgacaatattgtccgggaagagcagcagatgcagtttgtccgggagctggctcaggccggaggtctggagccggaggatgaaaatgagtttgcagcctccattttaagtgagataagctctgtcaagggagagaggattgcactggaacattactattccaaaaactgtccggatacagttttccgtcagctctatgcgggctatgaagagaaaatgcgccgggccggattcatcgatttcgatgacatgatggtgctgtgtctggaactttttacggaaagaaaagatatcctgtctgcctggcagaggaggtatcggtacatcctgattgatgagtttcaggacatcaaccgacttcaatatgagatcgtgcggatgttagccaagccggaagataatctttttatcgtgggcgatgatgatcagtcgatttaccggtttcgtggggccaaaccggagattatgctggggtttgagcgggattatccgggtgccggacggattcttctggatgtgaattaccgaagcaccgaggagatcgtggcaccggcattgcggctgatcggagaaaaccagaaacgtttttcaaaggccatccatacaacgggacggcatgggaagaacgtgatcacgaagctctggcaggatccgggggaagaaaatctggccattgccagggagatacagctgtatctgcagtcgggagtgcggccgggggatatcgcagttttataccggaccaatgctggtcctcgttttctgatggaaaagctgatggaatacaaccttcccttccggacaagggatacggtgccgaacctctatgaacactggatttcgcgaaatatcctgacctatatccggatcgccatgggaagccgggcgcgggaagatattttgcaggtcatcaaccgtccgaagcgttatatcagccgggacgcgatgccggatgagacagtttcgttcgagaggatgaaggtattctatgcggagaaagactggattgccgagcggatcgagagtctggaaggcgatctgcgggccatcgcccggatgtcacctctggcagccgtcaattatatccgccagggcatgggatacgatgaatatctgatcgagtatgcggcattccggcggatgcggccggaggaacttttagagactgccgatgagttaaaagaaagtgcggcgggtttcaagacctttgacgagtggtttgcacacatcgacgcgtacaaggaggaactgctccggcaggcggcgcagcggcggacggagacggatgcgatcacgctcgcgacgatgcacagtgccaaggggctggaatttcccattgtctatattctcgatgccaatgaaggcatcacgccgcacagccgcgcgatgctggacgaggatatggaggaagaacgacgtctgttctatgtggcaatgacgcgtgcaaagacccggctgcatgtatatgcggtgcgggagaggtaccataaaaaggcggaagtatcgcggtttgtgtgggagtatctggggcgggatggagatagcaggtaacgaaattcacaatgaaaatcgggaaatcatataaatgacggtattaaacatatattgtgtacggtttattgacatttttttgaaaattgttcaataataacagtatgagaattaaacttcatgggcgtcaaaagagatgaaaggtaaacagagaggagatgggagaatgaaaggtatacgaagggcggcagcggtgtgtctgacaatgacattggcagtatcgacattatttggaaatacagcatgggcggatatgccgcagaagacggagagaaaaaaatgtgtccatgtgcataccgaggagtgctacggcgagccggatgaggaagcaacctcgtcccagataggagaagagccgacggaatgtacccacgtctgcactgtagaaagcggatgcatacggaatacagcctcgtcttccggtacgaacgaggacgattctgaaaccgggccggatgatgaagaaaccaacgatcagaaagattctgctgacaaagcggagaatgcaccttccgtcagtacaccatcggatatggaagatacgacagttccaggcggaacagtgataccggctgtgaagtcccagatcttctcctggtcctggtatgatccggaagagaatctgctgaatggcaaattagagcttaacggagttaccgaggaagcccagccatccttcgaagaagtcacggagtacttaccagaggctattattgcccaggtcggagaagaaagcgaagctggtaaagaggaaaaactttcgatcgctggctggagctgtaacgagtatgtgcaggatgaagaaggccgctggccgctggaaggcacctatgagtttgcagcagagctgccggaggcatatgaactggcggaagatgcagaggcgctggtggtggaagtgtctgtgaggggagaccaggcggcgatgcctgtagtaaatggagaggttgtgctaaatgtaagttttgacccaggcaaagatattaaaagtctatactttgatggagaaaatttttctagtgtttacagcgatgtaatgaatttattgaaggctcgcggtataacggttactagtctaggagaaagtagctttcaattaacaatgacgaatgcttccatacagtaccttgagttaagccagggaacatgggagatagtattaaatggaagcaatgaattaaagggaaaaggaaaaggtgttggaggatgtggtcttaggattaataactgggtaagtgcgacgattgaggcaggaacagcacccgcttctttgaaagctaagaattctccaacgacaggaagaagtgatccctccagcggaatagtggtcgcaggtaacttgacgatagaaagtggaacgatagaagcaactgcctatgcgggaaacaatagcgatccattctcaggaggcattgttgtgggaagcgatggaactttaaatattaacggaggcgctgttactgctgcgggaacaggcaagaatggcgtgcttgtccgtggaaatttccagatgacgggtggatcattaacggcaactggaagtgggaaacccggaattgagaatgagggtagttttgaactttcagatggaacaatttcaacaaaatctaatagtgatggaataggatttttgcaggggcttggatctgtaacgatcaaagccaacgaactgaatactgatcgattaaacattactggaaatagttccttcactgttgcaagaggcggaaaggtaacctctggaagtacgataattaatagtggcacacttaccaatgaaggagaatttgtttcaaacggtccatttgtaaaaaatgaaaaaggaacatttatcaataaaggcacaatcagcggaagcggaagtctgcctgatgatgcaaagcagacaccggatccaattacaggttatacaaagaaaattagtatagattataacaaaaatatgtcgatcaatgttcaaaaccttgcggctattcagaaaccggttaacgccggaaacctgcaatatgaacttgctgaatatacaggaagtgataaaggagaaggaacgattgacaaggaatcgggtcagttgaaggtggacagggctggtgtatttaaaatccaggtgaatacacaggaaagtggattctataaagccggagaaaatccggtttgtataacattgactgttaataaagcaaagtttcctgattcctggaacttgagcgtaacggctgccagcggtgaatataggggagcccagggatatccagcagctgacattagcgcaagtaatattcctggtggtgcaagatatgaatatcagctgaagagaacaaatggtaccaatgatttacaagaagatcagtggaagtcggagtgtccgaagattgtgaatgtagcagagtcggagcagtttgtatttgtaagagtgacagtagataattacgagtcgaaggtattttgctctggcaacccaacgagtattatcaaacggaggtttgcagatacaaaagtaacactcgaaccagagaacgtcatttataatggtcaatcctggagcccggagatcaaagtggttgagaactggcagggagcttccgaagatgaagtggataaggcggattatataatccaagattggacatattggacaggaactgataatagtaaagttacagagcgaaaaaatgctggaacatacaccgtttctctgttgggacagggaaattatacgaatgaatcgaataaagctatacttacaatcgacaagtgtaaattaaatgcgcggataacaggaaactctttcgataaagtctatgatggaacgacagatattagggaggagcagaatttatctgttcagctttacagtgattccggtactcctgattctcaggatgttcgtgctgaccaggtgaatttggcatatcagagtgtggatgttggagagcacaatattgaggcggcaaatattacgttagcaggtgacaatgcaaagaattatgagctgacagaaaatagcacatctatcaaaggcaatatcgtagcacgtgattttgcatccatgactgtgtcggcagattcgcttacctacaatggtaccgaacagaagccgcagatccatgcatctgtggaaaccggtctttcaaatgtgagtccggatgcagtggtatttacttattctaagaatggagtggattaccagagtgagatcccaggctttacagatgcgggaacctatcaggtatatgtgaaagcttcgatggccaatttcaatgatgctgtaaaaacagtcaatgtgacggttcagcaagcgccttcaagctcaggcagtcattcaggcggcggaggaaaaggcagcagtggaaaagacagcggtggaaagggcagcagtggaacaagcagcagcggaagttccggcacagtaaccaaagatagccagaaaggctaccgcagcgaggagcagggggttatcaccggtgcatcgaatcaggcagtgaatgacggttacagccattggataaaggatgccagaggctggtggctccgctacagtgacggcacctggcctatgggcaataccggtgcatttcattgggaaaaagtcaacggcagatggtgggcatttggcgctgagggatatctgagtaccggctggatctatgacaccctgtaccagggatggttttatatggacgaaaaccagggtatgcttacaggatggcagttcatcaatggaaaatggtattatctgaattcgaatcaagacggcagtgccggcatcatgtattcaaaacgccggacaccggacggctggtacgtgaaagaagacggcagctgggatgaagaagcgggaagataataggtaaaagagttatttaaagcggttgatcgggaggtcagccgcttttctttgctcatattgaggtcttaaaaattgaaaaacatatcaatgaatggattgataaaagaacggagatacgataaactatttattatagaggaaagtatatttcagccgagaaaggaggagctatgccattacctaaatacaaaacgtatacagtacaagatatatatgatcttccggaaggaacccgtgcagaattgatagatggtaccatgtatatgatggcacctccaagccgggctcatcaggaaattgtaggtgaaatatttgcagttattcgggactatattaagcagaaaggcggagtatgcaggccttatgtcgctccatttgcagtttttttaaacgaggatgatcatacttacgtagagccggatgtaagcgtgatctgcgatccatctaaattaaatgataaaggatgtgcgggagcaccggattggattattgaagtggtatcaccgggaagccagcggattgactacatgataaagctttttaaatatcgcacggccggtgtctgtgaatattggatcgtggataaaacgaaaaacaggattattgtatataattttgaaaaaaatgatatgaacgaatatacattttccgatcttgttccggcagggatttatgatgatttgaatatcgattttgcaaaaattgacgaattgctgtgagcgttgaatggttagtatatcgggggggattataaaaagaagtattttgtgcggactataaggattagttaaagcggttgattaaggtgttgatcagccgttttttctttacggaaaatattatcattgtatggaattttaggtaggaattttagccagatggtattatttcataagttgaattattcacgttttcgtgatacactttctatatatctgttggcggacgaatggaggaatgacatggcggtcagttataaaaaattattccatttattgatagaaaaaaacatgacaaatgcacagttgcagaaggaggctggcttctccgcaaatattatcacacggctgaaacgtaatgggtatatttccctcgagagtatagagagtatatgccgtgttatgaactgtggcgttgacgatattctggaatttgtaccagagaataacggaggaaaagagaatggttgataccaaaaaggaacaggaacgtgatgaactgcaccgtgcaatatgggcgattgcagatgaactgcgtggagcagtcgatggatgggacttcaaaaattatgttcttggcacgatgttctatcgctatatttctgaaaacctgtgtaattacataaacagcggtgagattgatgcaggcaacatcgattttgactttgcaaaaatgccggatgaggatgcagaagaagcaagagaaggactggtagaggaaaagggattttttattcttccgagcgaacttttctgtaatgtccgtgctaatgctgcgaatgatgaaaacttaaatgaaacactggagcgtgtgttccgtcacatagaggaatcagcgaaaggcagtgaggcagagagtgactttgccggattgttcgatgactatgatgtaaacagcaataaactgggttctaccgttgcaaagcgtaatgagaagcttgtaaaactgctgaatggcgtaggcgaaatgaatctgggagatgtgaaggaccattccattgatgcctttggtgatgcctatgagtaccttatgaccatgtacgcatcgaatgctggaaaatctggtggagagttctttactccggcagatgtgtctgaattgctcacacgccttggaacagtagggaaaacggaaatcaataaagtatatgatccggcttgtggttcgggttcattgcttttaaaggctgagaaaattcttggcaaggatgctatccgtaacggtttctatggacaagagatcaatatcacaacttacaacctgtgccgtattaatatgtttctgcatgatgtggggtttgataaatttaacattgcatgtgaagatacattgcttagtccgcaacattgggatgatgagccgtttgagctgattgtgtctaatccgccatactctattaagtgggcgggagacgaaaatccattactcatcaatgatcctcgctttgctcctgctggagttctggcacctaagagcaaagcggatatggcgtttattatgcacagcctgtcatggcttgcgtctaacggaacggctgccattgtatgttttccgggaattatgtatcgtggtggtgcagagcagaaaatccgtaaatatctggtagacaacaactacgtggattgcgttattcagttgccaagtaatctgttctttggcacttcgattgcaacctgtatcatggtaatgaaaaagaataagacggataataaaactctgtttattgatgccacaagtgagtgtgtgaaggtgactaacaataacaagctgacaccagagaatattgaccgtatcgtggatgtgtttgctaagcgtgaagaagaggagcattttgcacatttggcaagctatgaagaagtatccggcaatgattataatttgtctgtgtccacctatgttgaagccgaagataccagagagaaaattgacatcgtgaagttgaatgcagaaattaaggaaattgttgctcgtgagcaggtgcttcgtgatgagattgataagatcatcgcagaaatcgaggtgtaaatgataattcgactggttcaagacataagaaaggcattggaaaacgaactatattttgtagcattaagttctgcactcaccttgccagacatctgtggtaaggccgcatatccaactgaacgaagcagcagaaaacgatatattttatggtatgacgaagaaataggtaaatatgaaaagaatccagaagacaaagatgatatgccgtatttgtcaggagaggtaatttatagtttgcgctgttcattgttacatgaaggaaatcccaatatgaaaaatgatagtttacgaaccaatcaaccaatagatcatttttcgttggttattgaaaaagctaaaccgtttgatatttattcagattccagttcaattactcgatttggaaatgaacagaaacgtgaatatagaatgaatattagaagaatatgcatgatcttatgtgctgtagcagaagcctattataaaaagaatggcgataaatttcatttcaattatgaaattatcgattgggacgaagttacctcacatttaccgccaatagacatggagaaagtctttgcagagttggctaaaagagataatgaattttatcaaggaaggaaaatgggcgaaaatgaatagagtaaatgaactaataaaggaatattgcccagatggtgtgccgttccaaaaggtgaaagatgtctatacgagagtaaaggggacatcaataactgctggaaaaatgaaagaaatagcgtgtgatgatggtgaaattagaatatttgcaggtggcaaaacaatcattgatgctcatgaaaaagatattccaaaagctaacattacacgagtgccagcagtcttggttcaaagccgtggagttatagatgttgtgtattatgataagccttttacatttaaaaatgaaatgtgggcatacacatcagaggatattgtcagtgttaaatttttatattatgttttaaagaatagtattcaaactttccgggatgcagcatcgggaatgggggctttaccacaaatttccttgaaagtcacagaagagtttatgctccctgtacctcctctggagatacaacgtgaaatagtccatattttggactcgttcacgttacttacagccgagcttacaaccgagcttacaaccgagcttacagctcggaaaaaacagtatgaattttacagagataaagtactttctcatgatggaatttatccaatgaagccgcttgctgagttgggaaagtggtctggtggaaaaacgccatctatgtcagaaaagagtttttgggatcaaggcacaatcccttggatttcatcaaaagacatgaaatcgtcaacattagaagatacacaggaccacattacagaaaaggcagtaaaagaagcatctatgacagtatatccggcaaatagtattgccgtggtaacaaggtctggaattttaaagcacacttttccagttgcctatgtgccttttgaaaccaccattaatcaggatataaaaatgcttgttgttaatgaagatattcttccgaggtacgcttttcatgtaatacaggggaaaaaaaatgacattctggtaaaaacaaaaaagcaaggtggaacagtggattctctggattttcagaaggtacttgcatataaagtaccagttccatctaaggatgtacaaagtaagttagtagaggtgcttgataactttgaatctatctgcactgacctaaatattggtttgccagccgaaatcgaagcacgccagaagcaatatgaatattatcgagatttgctcttgacatttgctgaaacaggcagcacgctcatgacagacagacagacagacagacagacagacagacagacagacagagctgagcgcaattaagctcatgcagtatgtgtttggatatgccatagcttcggctggaacattatttgaaataaaaaacgggcttaacaaaggaaaagaagcatttggaaaaggaaagccaattataaactttacagatgtatacaatcatcgatatttgaatcacaactctataaaaggattagttgacgtaacagatgatgaaatcaaaagatatagtgctaaaaaaggagatgtattttttacacgaacatcagaaacaaaggaagatattggaatgtctagcactttgattgaagatatccaggattgtgtttttagcggctttgtattgagagcaagaccaacaacagattatttacttccgaagttttgctcctattatttttcaacaacagctgttagaaatattattataagatatgcttcagttactacacgcgcaacaactactggaccgaaattatctaaaatcatggttccaatattaccaattgaggaacaagaaagaatcgtatccattctcgaccgctttgatagtctctgcaatgacctgtccgcaggacttccggcagaaatcgaagctcgtcagaagcagtatgaatattacagggataagctgttatcctttaaagaattaccaaagtaaggaggcgaggatgtgccgtactttaatattgtagcggagacatcggagaataccgttgtcacagaatatgagccagtcaagaagcgttctgacagttaccagagtgaagctgaactggaacaggagtttatccgtctgctctgtgaacagggctatgaatatctgccgattcacacggagaaagacctgattgctaatctccgtaagaaattagaggaattgaataactatcagttttcagacacagagtgggatgatttcttcaaaaatgtcgttgccaatcccaatgagcatatcgtagaaaagacccggaagatacaggaggataatgtccaagtcctgacgcgtgatgatggttcttccaagaatattacactcatagataagaagaacatccataataacaggctgcaggtaattaatcagtacaaggtgaatgcttccgcagagaatggtgcgaagcatgacaaccgctatgatgttacggtattggtaaacggtctgcctcttgtacatgttgagctgaaacgcagaggtgtagccatccgtgaagcattcaaccagattaaccgctaccagagggattctttctgggcgggatgcggattgtatgaatatattcagatttttgttatttccaatggtacaaacacaaagtattattccaacagcaccagaaggaatgcggaaaaggaacatgagaaacggggagcaagtaagaccaagaccagtaacagttttgagtttacctgcttctgggcagatgccaataaccgtgtgattcctgatctgattgattttacaaagacctttttcgcaaagcatacgattctgaatatccttacgaagtattgtatttttacatctgaggatatgctgatggtcatgcgtccgtaccagattacggctacggagaggattctcaatcgtatcgaaattgccaataattataagaagtacggtagtgtccagggtggtggttacatctggcataccacaggttccggcaagacgctgacttcgttcaagacggcaaggctggcatcgaagttgccttatattgacaaagtgctgtttgtggttgaccgtaaggatctggactaccagaccatgaaagaatatgaccgttttgaaaaaggggcagccaacagcaatacctcaactgctatattaaaacggcagttggaagacccggatgcacacatcattattactacaatccagaaactggctacctttataaaaaagaatccggggcatgaagtttacacgaaacatatcgttgttatttttgatgagtgccaccgcagccagttcggagatatgcacactgcgattgtgaagaattttaagaaatatcatctgtttggatttacaggaacaccgattttctctgtcaattccggcagagccaagaatccagaattctttactaccggtcagacctttggagatcagctacacagttatacgattgtggatgccattaacgataaaaatgttcttccattccgggtggattatattaaaacgatggatgtagaagaagaaatcacagacgaaatggtctgggatatcaaccgtgaaaaggttatgatggctcctgagcgtatccgtattgtaacacagtacatactggaacattttgaccaaaaaacttatcgtggggataaaacatatatatataatacactgaccaatattgcggaggtggcttctgccaaacgggatgaggtagaggaaatcaaacagaaacagcgtatcagtgggtttaattccatttttgcagtatcaagcgttccgatggcaaaactgtattatcaggaattcaaaaagcagatggcagcagacccgaccaagaaattgcgtgttgcaactattttcagttacggtgcaaatgaggaagaatcggatggtattctggatgaggaaaattcagaggatacatctgccctcgatcagccgtccagagaatttctggaagaagccatcaaggattataatgaactgttccatacgaattatgatacctcaagtgataaattccagaattactataaagatgtgtcgcttcgcatgaagaacaaggagctggatattctgatcgtagtaaatatgttcctgacaggttttgatgccacaactatgaatacgttgtgggtagacaagaatctgaaaatgcacggattgatacaggcattttcacgtaccaaccgtattctgaattctatcaagacttttggaaatattatatgtttccgaaatcttcagaaacgtgtggatagtgccatttccctgttcggagataagaatgccggaggcattgttcttcttcagagttttagggattattattacggctacgaatcagtagatggtaagcaggtgccgggatatgtggatatgatggaagacttggaaaataagtttccgttatcagaaccacagattatcggagagcagaaccagaaggattttattgctttgtttggcgcaattctccgtatgagaaaccttctgctttcatttgatgagttcaaggggaacgagctgatttctgaacgtgatttacaggattaccttggacgttatcaggacttgcgtgatgagtggaagcgcaagcgtcaggaaagcacggatattacagatgatgtagtatttgagattgaactgattcggcagatagaaattaacattgattatattctcatgctcgtaaagaagtatcatgatacccattgtgaagataaggaagtgctgattaccatcaataaggcaatcgatgccagtccggagcttcgcagcaagaaacagctcatcgaaacctttattgcaggaatcaatgatgtggatgatgttatgaacgaatggcatgaatatgtggtagaacagcgagatcaggatctgaataggattattgcggaagaaaaactgaagccggaagatacgcggaaattcatggagaatgcattccgtgatggagagatcaaaacagctggaacggatatagataaacttatgccgccaatttcacgatttggcggtggaggaagagccaagaaaaagcagggtgtcattgacaaaatgaagggcttttttgagaagtattttggcatcggcggttcgtccacctttgttgaatcaaatcataaggttgtgacatatgacatgagtgagcaggaaaatctgccaatggtagcagagccgaaaatgccatatggggaatagccgtgcgaatatataaacgcgaaaatggtagttagtgcagtcgcttttgaaaaaactgttatcacatattccccgcacaagtgggggggcctaaaatctaaagtttgggaagataagaacaaccttatgagttcaacatatgaagccataaggttgtttttttcgtatagaaaacttcactgccgcatcttgaaggtcaccagaatttgtgggaaatgataggtggttgtttgctcagttttttggaatatagatgattttgtcacaggcgtaaagttcttctcccctgctgtttcgcatttcatatccgatatatttacaattcccatccaactgactataataaagaatgcccgtttgcctgcaacggcgcggaaccatatccatctgcatcagggcgatatgacagaaaaatgaacttaaaagaatggaagaaagaacaatggatgtaattgaaaaatttggaaatagggtgagcagccaggcgcttaaggatccggaaaaagcgcgtcggctgcttcttgcgggataccgcctgcaggaaaagaagcttcagtttttgccggatcgggggctgccgtcgtcgggacagtatgtggcgcgggtggttatgaaaaatatcattcagtcgctgtcggaaccggagaatgcggcgatggtcagcatatttgtgccgggagagctggtgatggcggcagggctgacgccgtactcagtggaggcgatgtcctgttttatggcgggaacgaagtgtgagcagacgtttcttcggaaaacggaggaggaaggatttccggagacgatgtgttcgtaccacagggtgtttctgggggcagcgctgacggggattctgccaaaaccgaactgcatgatttatacgaaccttgcgtgtgatggaaatatgatgacgtttccttatttaaaggataaatttgaatgtccaggcttttatattgatgttccgtatgagaaaaaccgggaatcggttctgtatgtggcggatcagctgcggaaattgaaacggtttctggaggagacgacggacagacggatttcggaggaaacagtgcggagtgcggtagataacagccggaaagcggcagcgaattataaaaaacagcttgccctgcggtgtgcgcatgacccggtgacctctctgacgaatgaattgtatgcgctttttatgtgccatctgatggctggctcagagacggcggttacctatacggaaaaacttctgcgcgatgtgcggatgtcaccgaggggagatggtctttcggtaatctggatgcacatcatgccatttttacaggagccggttaaggatatttttaattatagtaagaaaatgcacatccgcgcctgtgattttatcgcagatggttttcaggagatgcatgcggaagacccgtatgaggcgatggcagagaaaatggtctactgcatttacaacggcagtgtgaaacagagaattgaggaagcggaacggcttgccagaatcacggaagcggatggtgctgttttatttgcccactggggctgtaagggaacgatcggtgcatccagcctgattaagcagtccttagaaaagacaggacttccgacgatgattctcgacggtgacggctgcaaccctgctaataccagcgacggtcaggtatcgacgcggcttcaggcgtttgtggaaatgctggaaaagggcaaggaggagaaacacgcatgatttattacgtctgtaagtacaccccgatcgagctgttccgggggtttggagaagaatgttctgttttggaggaaatgccggaaaatttcgaacagtcggatcagattgcacatgcaaatctgtgcggctttggaaaatcggtcattcaggcagtgctggaaggaaaggttgaacagctggtgctggtaaactgctgcgattcgatgcggcgcgtttacgatatcgtggagagcacgggaaaatgtaagtttttatatatgctggatctgccgcatgatgataatgaatgtgaaaaagtgaaatttgcgggcacgatccggaagcttaaaaaggcatatgaggcatattccgggaaagtgtttgataaacgcgcttttatcaagtcctttattacgccggaaatgaacacggagccgtacattggtgtgctgggcgtgcgggtcagcggcattctggaggatatgatccggaacaacatccagatggatgtggaaaatctgacctgtacgggtggtcggaaactgtcggtcgtacaggatgaaatgtggaatatggaggaagaggagctgtttctttcttatgcggacgtcctgctgggacagatgccgtgtttccgcatgaaccgttcgatccgcagaaaccgtctgtatctggatccgaatttaaagggaattatttatcacacgatcaagttctgtgattattatggatttgagtatgcgagtatcaagcgggatatcaaggttccgctccttaagattgagactgattttacgagccagagcgcggggcagcttttgacgcgcattcaggcatttgaggagacgatcgagggatcagaggatatggatccgggaaaaggtatcagtgaggaggcaagaaagaagatggagtcgggcattttttatgtagcgggaatcgacagcggttcgacaagtacggatgtggtcatactggatcaggatggaaaaattaaatcgacgatgattattccgaccggcggcggtgcgatgatgagcgccgagaagagtctggatctggcgattgagaaagcgggaattaagaaagaggagatcgtgcggatcgatacgaccggatatggacgatcctacattgacagcggggatgacagcatcacggagattacctgccatgccaagggcgcaaattatctgaatccgaatgtccgcactatcatcgacattggcgggcaggatatcaaggcgatcagcatcgacgggcagggagccgtgaaaaatttcctgatgaatgacaaatgtgccgccggaacgggacgttttctggaaatgatggcgaaaacgctgggactttccctggaggaaatgagtgtgaaagggctggaatggaagcataatatcgtgatttccagcatgtgtacggtgtttgcagagtcggaggtcgtgtcgctggtggcacagaataaggatgtggcagatattatccacggtttaaatgtgtcagttgcctcaaaagtcggcgcgttggcagcccgccttggaaaggatcatccaggcgaatatatgatgaccggcggtgtggcgaagaaccagggtatcatccaggcattggaagagaagcttggtgctaaactttatatctgtgatgaggcgcagctctgcggtgcgctgggagcggcgctatttgcttatgagaaatgtaaaggcagtgcggaggaaacgcgatgaaacggcagggttaaaacacttgtatcgatattttcgtcagatattcactgggagaggctgtggccaattcgtcgatcacagcctctttataagagtatttgccggttttaaacttgtgttcatcgatccaatcaaagagtttttcgtaggtgtctttcgagtcatagtaatttcccattaagtaagcaactgcataggttccggctggttttaagtgataggggtgatttttcggttttgttataacttttgtgaaaaaataagcataggtatccagatgattttttcgtaaatctgccacatcaagcatggcaccataaggatgaccggcatttagagcgtgggcattgcagtaaccgatgtggcggcaaagagcctggatgattttctgatggtcatctgtatgaatcggatcgctgagaatcagatattcttccggtgtcgtctcgagaaaaatacgaccatttttattttctgtatggaagaataattcatcttctgtgtattctgcctgtttctgattcagtgattcctggagtgataccagggataattttatatgattggactgtaaagtgaataaaaatccaagaatgcatctacattctgaaatcagaaatcaaattaaaacattataatcttcgatgcctcgttgggaagccaacggggtatttttttatccaatcaggctgtataggacacctcatttttgatgtctttggacggtgcgggaagcatactgattggaatccttatatttatgatatagctttttgcaatacaaaaagactttacatatggatataaaaatcaactgtattccaagcggaaccttcccccattttctggaacacgaaaaagaagaaacgatttcggtctatctggaggtcgtcaaatgggcgcttctggaagaatgaatatgtccgaaaaaatgttggaattataataatattaatcgaaaaaatgtgatttataataaaataatgtccgcaaaaatgctgtttagcaatggaaatatgccctgaaaagtgttaagatagaatacagatgcttttggatgtatatgttgcgcaggaggtttcttaatggaaagagagctgtttacgaaactggaacgatggatgaataaaaagaacagaaagccgctgatcatacaaggagcgcgccaggtcggaaaaacctggattatgaaggaatttggagccaggttctatgaaaatacagtctatatcaattttgataataataaagcaatgaaggatgtatttgacctagactttgacttaaagcggatcctttctgcaatcaaaattgagtacggaaagagttttcaggctgaaaatacattgattatttttgatgagatccaggaagcaccaaaggcgctggcatctttaaaatatttctatgagaatgcaccgcagtattctatcattgcagctggttccctgctcggtgttgcattacatcagggaacatcttttcctgttgggaaagttgattttttaaaattatgccctatgagcttcaatgaattcattttggcagttggtgaaaaggggttgcatgaagcgttgaggtcccaagattatgaactgatcaatgcatatgccgggaaatatacggatttgttaaaaaagtattattatgtgggcggaatgccagaagtagtccagacatatattgattccgatgatctatttgaggtacgtgagatccaaaacaatcttctgcagtactatgaagaggattttagcaaacatgcgccaaaggaagttgttccgcgcatcatgatggtctggaattcgattccttcccaattggctaaggaaaatcgtaagtttatgtatggagcactacgagagggtgcacgggcaaaagattttgaacttgcaattcagtggttggaagatgcagggttaatcctgaaaagctatagagtatcaaagccagatattccactgattgcgtacatggaaatgaacagttttaaaatgttcatgttcgatgtgggattgttaacagcaaaggccggactatcagcaagacttctattggagggaagccggatctttgaagaattcaagggggcacttacggaacagtatgttgcacaggagttacacgctgcaggatatccgctttattattttgcaacagcacgatcaactggagagatagattttatgttgcagggagatttagactgcgttccgattgaggtgaaggcagaacagaatctccgtgccaggagtttgagggcattttgcgataaatataagccgggcatggcgattcgtagcagtatgtcaaattataagcaggaagactggctgacaaatgttccgttatatatgcttgcggaatatttgaaaagaacaatatatgtggtaagctgataacaatttacctcaaaaccaacgggggattttttgttctgaatcagacaatacagaagttcgcgctaagcgaactaatgaaatggaggttctggagtcccttcacggcaatgtagtatgtgcattagctgccggaatcggtgactatgtgcgatgtactctcttggaatatagctatcatgatggccagttttggatttttacagaaggcggcgagaagttcataggacttgagaggaataaaaatgtcagtcttgctgtctttgaaaagcccccggactttggtgcgctgaaaagcgtactggtcatgggaacggcaaagctcatcaagccgatgttatttgaggttcctggatttgatgaatattcggaaaacttgataaaaagttcgatgataggagttcgaaaaatttctttcgggaaagaatctgttgcggaaacgcgggaaataccgtataataatgcggtctgatctgcacatatgcaacagatttgtccgtaaaagaatgaaaaatcagaattgtgcgtatttcagaaacaatttttgctgtaagagtgaaaaaaagttatgtaaactgtctgcaaaaaaatacttgacaagaatttgtatttttacgcttacggagaaaaacaaaaaaagaactaaaaaacagcgatgaacacatcgcaaaaaatgagaaatgtaggtaaaaataattttatgagaaaattagcattaagtgatgaaatccttctcaagatctcccagccggcgcgttatattggcggcgaggtgaatatggtgaagaaggatccgtcgaaggtagcagtccggtttgccatgtgcttcccggacgtgtacgagatcggtatgtcccatctgggcatccagattctttatgatatgttcaaccgccgggatgacgtttactgtgagcgtgtttattccccgtggatggacttagatccgatcatgcgggagcagaagattccgctgtttgctgttgaaagccaggatccgatcaaaaaatttgacttccttggaattacaatccagtacgaaatgtgctacaccaatattttgcaggtgctggaattatcacagattccgctccatgcagaagatcgtaccgaggaggatccgatcgtcatcggcggcggtccgtgtacctacaatccggagccgatcgcaccatttttcgatctcttctatatgggcgagggcgaggtggtttattttgacttgatcgaccgctacaaggagatcaaggcgcgcggcggcagccggaaggaatttctggagcaggcggcgcagattccgggtatctatgtgccgggattttatgatgtgacatacaaagaggacggcacgatcgaggcgatgacgccgaacaacccgcacgcgccgcagaccgtttccaagcagcttgtcatggatatgagcgatacctggtatccggagaagccggtggttccgtatctgcgcgcgacgcaggatcgtgtggttctcgagatcatgcgtggttgtatccgcggatgccgtttctgccaggcgggcatggtataccgtccggtgcgcgagcgcagcctggaggaactgaaacgtctggcgcggacgatgctaaagagcaccggacatgaggaaatttcgctgagttcgttgagctccagtgattacacgaagctggagggaatcgtcaatttcctgatcgacgagtttgacggaaagggcgtcaatgtgtccctgccgtccctgcgtattgacgcattttccctcgatgtcatgagcaaggtgcaggacgtgaagaagagcagcctgacctttgcgccggaggcgggctcccagcgtctgcgtaacgttatcaacaagggtctgaccgaggaaaatattttaaatggttctgccgaggcgttcaagggcggctggaaccgcgtaaagctctacttcatgctgggacttccgactgagaccgtggaagatatgcagggcattgccgagctttcggagaaggtggcggaagtgtactatgacacggttccgaaggagcagcgccacggcaaggtgcaggtaaccgccagcacctcgttctttgtgccgaagccgtttaccccgttccagtgggcgccgatgtgcacgaaagagcagttcttagagcgtgcaagcatcgtcaaccaccgcatgaaggagatgttaaataagaagagtctccgctataactggcatgaggcggatgtgaccgtgctggaaggtgttctggcgcgcggcgaccgcaaggtggcagctgtgatcgaggaggcgtaccgcaaaggtgcaatctacgattcctggtccgagtatttcaacaatgatatctggatgaaggcctttgagacttgcggcgtggacattgatttctatacgacgcgtgagcgaagccttgatgaagtgttcccgtgggatttcatcgacgcgggtgtgacgaaggatttcttaaaacgtgagtgggcgaacgcacaggcggaaacggtaacgccgaactgccggatgcgctgttcgggatgtggtgtccgtaagtacggcggcggagtctgtttcgaagaacgggcatgaggaaagagcggtcatgaagatacgaattaaatttcaaaaacagggaacggtgcgttttatcggtcatctggacgtgatgcgttacttccagaaggtgatgcgccgggcggaagtggatatccgttatagcgaaggattcagcccgcaccagatcatgtcgtttgcgtctccgctcagcgtggggcttatcagccatgcggagtatgtggatattgatgtcaattccagcggaaattcgaccgggatggtgcgccgcttaaatgaggtcagcgccgaggggctggaggtgctcagctaccgcgagcttccggagacggcaaagaatgcgatgtcgctggtggcagctgctgattacacattctggtttaaagagggatttgcaccggaggacggcagcagtgtagaagaatttttcgggaaattcctgacattctgcaaaaacgagacaattccgtttgtgaagcagacgaaaaagggcgagagaaccgtggatctgcgtccgctgatctgtgaggcgcgaatcgcggagcggaaagagtatgttccggcgatggtcgcagactggtatccggatctggaaaatgagacggttgaggaggaaaaacaggcagaaggaatctgtgtcttcctgcgcctcttatcgggcagtgcggcaaacggaaagccggagcaggtattgcaggcattctatgagagcctggggctgacctatcgcccgtttgccattcaggtcgagcgcgaggagctgtatgcggacgagggcgccgagggcacaccggagtatgtgccgcttgaggcgtatggaagcgagattgtgtaaatgcttcaatgttcattaagagatgaaatgcgaagcgccagcaaaatccggctgcaggtagcgcaaagtgtgaacggcagtaaaaaagagaggagacgaagagtttggatcagttaatagtgacaaaatggaaggatcgaagcctgacggcgctcctctcggacgggcactgccggtcgctgacgctggaatctggcgatgaaagcctgctggggaatatttacatcggcaaggtaaaaaatgtggtaaaaaacatcaacgccgcgtttattgacctcggcggtggaaaaaccggatatttcagcctggcggaaaacctggttccgctttatacagacgagctgaaccagctatgttcattcggatattctggaaattctgagaagaaagtaagtccacggaaactaaaagctggagacgagcttctcgtccaggtgtcccgcgacgccctgaaaaccaaggatccgtccgtgacctgctgtctgaattttccgggtacctatatggttctgacggttggaaaaccgcagatcggattttcggcaaaaatcaaggataatgcctggaaagagaaggtgcgggaggaacttctgacacataaggatgagcggtttggactgattgtccggacgaacggggcgtcggcttccatcgaaacactctgtgccgagacggagaagctgaaacagcagatggaagaactttttgcccgggcagcctgccgcacctgttacagccttttagagcagggtacgccgccctatatccagagtcttagggatgcgaagaaaggaaccctttcggagatcatcacagatgtgccggagtatgcgaagaagattgaggcatggctggaggaagagaaggaagaggacaaggaacaaaaagaaaatcagacccaggcagataaaaatgaaagcataaaacaggcggttccgaaattgtccctatatacagatgagaaccttccattaatgaagctgtaccgcctggaatcggtgcttaaaagtgcatcggatcgccgtgtctggatgaaatccggtggatatcttgtgattgaacctacggaagcgttgacagttatcgatgtcaatacggggaaatacaccggcaagaagacaccggcggagaccattcttaagattaatctggaggcggcgcatgaggtggcgcgccagctttctctgcggaatctttccggtattattattgtggattttatcgatatggaatcgaaagaagatcaggagacgctgatgcggacgctcggggaagagctttcccgtgacccggtcaaaacgatcctggtggatatgacgcggcttgggctggtggagatcacccgcaaaaaggtgcgccgtccgcttcatgagattttgtagcggttgagtcatagaatgaaaaacacaaggagaagaaaagatgtttgaaaaagtatttaagctatccgagcatcagacgaccgtaaagacggaagtcatggctggaattacgacctttatgacgatggcgtacattctggcagttaatccgagcatcctcggatcgaccggcatggacccgactgcggtgcttctggctacggctctggcatcattcatcggtactgcctgcatggcatttatggcgaacctgccgttcgttctgtccgcaggcatggggctcaacgcgtatatggcgtatacggtgtgcgcgggctatggctatagctggcatgttgcactgctggctgtatttgcagaaggtctgatcttcatcgtgctgtctctgacaaacgtgcgcgaggcgatcttcaatgcgattccgttgactttaaagcgcggtgtgtccgtcggtatcggtctgttcatcgcatttatcggtcttcagaatgcgggactttcagtagactcttccacactggtaacgatcatcagcttcccggaaaatttccataccgcaggtatctgcgcgctgctggcgctgatcggtctgtttatcatggcggttttatacacctaccgtgtgaagggcgcgattctgtacggcattctgggaacctggattctcggtatgctgtgccaggtaaccggcatttacacaccggacgtagagaatggtttctacaccctgttcccgaccctgggaatcaccgatttctccaaactgggagagacatttggtaaatgctttaccgttgacttcgatgcagttggaattatcaattttatcgtagttattttctcattcctgtttgtagatatttttgatacacttggtacattaattggtgtagcaaccaaggcagacatgctggatgaggaaggacgtcttccgggtatccgtccggcgctgatggcagatgcgatcgcaacttcctttggtgcggtattaggtacttccacaacgactaccttcgttgagtctgcatcgggtgttgcagtcggaggacgtaccggtctgactgccctggtatcggcactcctgttcctgctttccaccctgtttgcaccgatttttacggcgatcccgtcctttgcgacggctccggcattaatcatggttggcttcctgatggtgggaactgtaaccgaaattcgtttcgatgaggacaatatcaccgaggcaatcccggcatatctggcaatcatcgccatgccgttgttctacagcatttccgagggtatttccatgggaattatctcttatgtgcttttgaatgtggcagcaggaaaagcaaagaagatcactccgcttatgtatgtgctggcggtactcttcgttctcaaatacattttcctgtaacaacttgtaataatttaacccctgaaaacttgacgaaaacaggttttcataataaaatagtctatatcaaaaaaagtttttaaaatttttttgattaacgtgcaataaaatgcgtatgcagcgcattaacttattgaacggatgaaaatcattcccgcgcggaagaacgcggacagagacgaacaaaaacaaatcaagttactcgaaattccttgatgcattacactccgttacgaactgtccaagattttctgctgggatcttttcggtatcggttgacaaccagcaaccgatattgggtaaaaagcgccggacctgcttgcagtgccggcgctttttactgtacaaaaaaggggtaatttttatcaggaatatctcattgacattttggcgggcagacggtataaaggacagaggaggtggggtacatatgaagatagaaaatgatttggggagggacgatatctgtcagctggtgctccgcctggcgattccttcgatgctggcgcagtttatcaatgtgctctacagcgtggtcgatcgaatctatattggaaatatcccggtgatcggggagacggcgcttgcgggcgtcggcgtcagcggaccgattgtgacgctgatctccgcgtttgcctatctggtcggtctgggcggctcgccgctcatgagcatccgtatgggcgaggggcaggatgagaaagcgaaaaagattctggcaaacagcttctggatgattgtcgggctgtcgtcggttctgacgttggttctgtttgtatttaaacgagaaattttgacgcggtttggtgcgagtgaggcgattctgccgtatgcggaatcgtactttacgatctatctgctgggaacggtctttgcgctgctttcgatcggaatgaaccagtttattatctgccagggatttgcgcggatcggaatgatttcggtggcgctcggtgcggtaacgaatattgtgctggatccagtgtttatttttgtgtttgacatgggcgtggcgggggcggcgtttgccacggttctgtcacagtttgcgtcggcggtctttgtccttcgtttcctgcgaggaaatcgcgtgcttctgcggcttgaatttgaatgtccgcaggtgaagacagtctgtaagattgcgctgatgggactgtcgccatttttaattattgcatttgacaatgtgctgatcatttcgctcaatacggtaattcagatgcatggcggcgcggaggcggacatgcttttgacctgtacgacaatcgtgcagagctttatgctgatcgtgacgatgccgctcggaggcattacatcgggaacgggggcgatcctgggcttcaatttcggcgcgggacgcccggatcggatccggagcgcacagaagtatatcacattgctggcggtggtgcagtgcagcatcatgttcctgttttcacggacgctggcgcagtattttgtgtatctctttacgcgcaatgagtcctatgtggaactgaccgtttgggcgatccgggtctacacgatggggattattccactggcagtccagtatgaggtcgtagatggatttaccggaatgggcgtgccgtcggtggcgatctcgctgtcaatgttccggaagctgctgtacctggtcagcgtgttcctgattccggtgtttgcgggagttgaaaatgttttctacgcagaagtggtatcggatttcggcggaacgacggtgtcggtgatcgtgtatcttcttttgattgggcgcattatggggcgctgtgtagagcgcgctaaattgaacggtaactcagataacgctgtcatcaatcaataaatgataaaaatagtagattgacaaacggatcctctggatctataatgcaatacagataatgaatgacaacaaaataacgatatcttcagggcagggtgtaattcccgaccggcggtaaagtccgcgagcgcatggcgcatgatttggtgcaattccaaaaccgactgtatagtctggatgaaagaagagaaaacgtaaataaaaacggcggtgccgggaagcttccagatacactcccccggatgatggatatggcggatatatatcgctatggcaaaagagagagaaaagtcatcgagaatggatgtaaaaaaaatatttacgataattaatatcatgaaagatattataaaatagaaattataagccctgagatgtgaaaataaaagtatttcacatttcagggcttttttgtttcaatagaaaattgtatcatatgaaacaaaaaacgctccgtgaggatgcacacttgcgcgaagcagaaatatgtcgcaggcgaccgcgttcggtgcgagaatgtgccttggcacattcttttgatagaaaggtggggaaaaagatggaacgaatccatgtaaaggttcccggtgagcagctacaggatcgggaatatatgaagcaggcgttagcactggcagaaaaagggcacggatgggtcaatccgaatccgatggtcggcgcggtgctggtaaaggatggacgcatcatcggcgagggatatcatacacgatatggacagcttcatgcagaacgggaggcatttaagaatgcggcagagcgaggcgaagagacggcgggagcagatttgtatgtgacgctggaaccctgctgtcacaccggaaaacagccgccgtgtacggaagcggtgctggcatccggggtgaagcgcgtgattgtcggctgcacggatccgaatccggtggtggcagggcgcggcatccggcttctgagggaaaaagggctggaagtggtggccggagttttacgcggagagtgtgaacggcagaatgaggtgttcttccatttcatgcggacgaaacttccgtttacggtgctgaaatacgcgatgacactcgacggaaagacagcgacggtgttgggtaaatcccagtggatcacgggcgaggcggcgcggaagcgggtgcatgaggaccgcgggcgttatatggcgattctgactggcgtttcgacggtgctggcggacaatccgcagctgacctgccggattccgggagggaaaaatccgatccgggtgattgcagatacgaagcttcggacgccgctttcatcgaccgtggtacagaccgcgcgggagacaccgacctggattgtgacggcggtatcggatgccggaagaaagaaagcatatgaggacgccggctgtcgtgttttaagtgtcccggcaaaagagggagaactggatttgcaggcgatgatgcagcggctgggcgaggaaaaagtggacagcgtgatggtcgagagcggcgggacgctggcatggtcgtttttaaaggcagggcttgtgaaccgggtgcaggcctacattgcaccgaagattttcggaggggcaggcgccccgaccccggtgaggggaaccggtgtggatgcgccgccggaggcatttcttcttaaaaagccggaggcagtgtggctgggagaggatctgctgctggaatatgaggtgtccggtcaagatgcatgaggcggtgttagaacgggaaaaaatcgctgatttgaaaaggagaaaagatgttcacaggaatcatagaggaagtgggaaggatccgtgcgattgagcgccaggcagtctcggcacggctgacggttgctgcgtccaaggtgctctcggatgttcatctgggcgacagcattgcggtcaacggtgtgtgtctgacggtcacgtcatttgggagagattatttctgtgcggatgtaatgcatgagacgctgaaccgttcgtccctgggggcgctgggtgtcaaaagcccggtcaatctggagcgggcgatgctggcgggcggacggtttggcggacatatcgtctccggtcacatcgatggaactggaaccatccgggatgtgcgccgggacggaaatgccgtctggtatacgattcaggccccagaaccgattctgcggctgattgtggaaaaaggatcgatcgcgatcgacggaatcagcctgacggtcgcacgggtggatcacgtatcattttccgtttccatcatcccgcatacactgcaggagacagcgcttgcgtttaagagggcaggcgatatcgtcaatctggaaaatgactgcattggaaagtatgtggcgaagctgatgggagtagaagaagaggataaggcaggaaagggcatgacaagagaatttctgcagcgatatggattttaatagaggaggagaacaatgaagcagtttgatacagttgaaaaggctctggacgagctgaaacagggacatttaatcctggttacggatgacgaggatcgcgaaaacgaaggcgatcttatctgcgcggcaagttttgccacgacagaaaatgtcaatttcatggcgacgcatgcgaagggcttaatctgtatgccgatgagcgcagaaatctgccggaagctgcaattcccacagatggtgatggataacacggataaccatgagacggcgtttactgtatcgatcgaccataaaacgacgaccaccggtatttctgccgaggagcgcggtattacggcgcgcgcgtgcgtggatccggacacaaagccggaggatttccgccgtccgggacatatgtttccgctgatggcgaagaaaaacggcattctggagcgcaacggtcacacagaggcgacggtagacctgatgcggcttgcagggctgccggaatgcggtctgtgctgcgagatcatgcgcgaggatggaacgatgatgcggtcggaagaattatttgcgatggcagaacaatggggtctggcgatgatttccattaaacagctgcaggagtaccgcaagagacatgaaaagctggtcgagtgtgtggcagagacgcggatgccgacgaaatacggcgaattccgcgcgtatggctacctgaatctcttaaatggagaacaccatgtggcactcgtcaagggcgatatcggagatgggaaagatgtactctgccgcgtgcattcggagtgcctgaccggcgatgcatttggttccctgcggtgtgactgcggacagcagcttgcgtcggcgatgacccagattgagaaagagggacgaggcgttctcctttatatgcggcaggagggacgcggcatcgggcttttaaataagctgcgcgcctacaagctgcaggatggcggcatggatacgctggatgcgaacctggcgctgggatttaagggcgatctgcgggaatactacattggggcgcagattttaaaggatctgggaatcaagacgctgcgtcttctgaccaataacccggataaggtatatcagctttcggattttggcatggaaatcaaggagcgcgtgccgattcagatggaggcaacgccgtatgatggattttacctgaaaacgaagcaggcgcggatgggacatattttgaattttaaatagaaaaagtgacaggcgaaaatagatcgtcggaaaggatggtacttatgcgtacatttgaaggaaacgtagtagcggaaaataatatgaggatcggaattgtggcggcacgattcaatgagtttatcacctcgaaactggttgcaggcgcgcaggatgcgctgcgtcgtcacaatgtctcggaggaggatgtagatgttgcgtgggttccaggtgcttttgagattccgctgattgcgtcggagatggcgaagtgcggaaagtatgatgcggtgatctgcgtgggtgcagttatccgtggaagcacaagccattatgattatgtgtgcagcgaggtttcgaaaggaatcgcacaggtttctctggcaagcagcgtgccggttatgttcggtgtgctgacgacggatacgatcgagcaggcgatcgagagagcgggaacaaagagcggaaataagggatttgactgcgcgatgggagcaatcgagatggtgaatttgctgcgggagatccggaagtaaaaataatcaggtaatcgggcatcgaaaaagccaggactgcggaatgctgcagccctggttttttgtcttaggaaaattcgtccatgcgccaggttttggtgttacctgtttttgtttgctatcatgttactctgttttcaacagcccctgttccgtataatatttctcagctcccggatgcagcggaataggaagctggctgcatatatattccggatcagataagttacttaaggaggggtgggcgctgatcagttcttcacgggattcgtcgagaatcttggtgatggtgtagaccagctgttcgtccatggatgcgtccacgcagagaaggcatttgattccgaaggttttcagtgtctcggtttgtcccggataggtaccggctgggacggtggcgcggacgtagaaggggctggctgcaagaattttttgcagttcttcgtcagtgtactccagcaggcggcagggcgtctggctggccaggtcggtcaggctgtggaccgggattccggcgaagctgtggacggcgtcgagtttaccgtttaagacagagtccacgctggcggagaagctgtagttttcaagggcagtgttggcaatattgagcccggctgccttgagagcggtgcgggcggaaagctccgtggtggatccttctggtccgacggcaatgtggtgtccggcgagttcatgaacgtaggagatatgctcggattccggcgccatccaggtggacaggcttgaatagacggccccgatcgcccgcagggattcgaccggatgaccggaaaattcgtccgttccctgataggcggaaaatgccacatcgccgctgaccagtcccatatcaaattgtccgtttttgatattttccacgtttgtgtaggaaccgttggaggcgcttaaattgaccttgagctgttcatcatgtccgcttaaaacagaggcgatggcactgccaaccgggtacatggttccgccgctgtcggcagttccgatggtcagaacgtgcagctcttcgtctgcttcgctgggatggtcgttgacccgcgcatctgcggaggtgctgccggaacagccggaaagtccgagcaggaaggtaagaagcatcattggtgccaattttactagtttttttattttcatagatctcaccttttcgtagtttatcagtatataaaaaaacgcagcggttctgtcgaatgctgccttagcgattaaaagaatattaaaactctataaaagtataacataaaaaacagtgataagacaagaccaagatagaagataggtaaatagaaaatttctatgaaaaaaagagcgtccggtttatgtgggggaaccggacgctcttctttcaggttacattttcaattgagctttaggtatgttgttatataaaagatgtcttatatgaagtgttcctatctcgtctcagtgattattttgtaatcaggctggagaagatggaaaggaagatcgggttgtaaatatcgtcgatgataactgcgaaggacggatacagaacccaagcaacggtgtgccatccatactgatccataacggctttctcgtttgctactgcgttcggacctgaaccacagccccatccacagttaccagctgccataacagctgcaccgtaatcgcggccaaatacgttgaaggatacgaagattgcaaagagtgccatcaggatagcctgtgcaaggaggatgatacccatctgaccagctaccggagccagctttgtgatatcgatggtcatcagaaccagtgccaggtagagttccaggaacatatgctcgatagcgtcgatctccggaaccgggaattcgataccagctgcatccatgatgtttcttgcgatagcacctgcgaacagacagccgatgaatttcggcatctcgatcatcgggatgttgtctaacaggcagtagatcggcataccaagtgctgctacaagcagagacagggcaaatgctttgatcatacgggtgttgttaagaacagctgctgaacctgcttttgcggattccggtctgtcgttcgggtcagatttcagaccgtgacgggaaatcaggaaagctgcaaccggaccaccgattaaggaacccatgatgttgcccatagtaccggctgctacaccgactgtggttgcatccggagcacccatgttctcgaagataggaccaaatgcagaagcagtaccaacaccgccggacatagctgaggaagaacactgcagagccagaagcggatgaagaccgatggcgctgcctaccaggtaaccaacgacatcctgtaaggtaatcaggacacaggctgcaactgcgattgcgatacaaagctttccgcctgcgtgctttaacatcttgtagctgaagccgaaacctacgcacaggaagaataagttctggcataagtcttttacgatttttgcatcaaaggaaaaaccgatgattccggaacccttgatgatagatacaacaacagaaaagatgataccggagataaccggagccggtatagcatattttctgagcagggcgctgtgagcgacaatcgcgcgtcctaagaagataacgatggctgcgaaaccaagtgtggtcagatactcgaactggaatgttgcgatggcaccgtccgctgccggtgtgtaagttccaaagtatcccataatgtgttctaacatagaacttccctccattctttttttaagaatttgtttatttcttttataaacagtttataagattgaaaaagggaagtcaatttatgtaattttaaatacagttttgtaagtattgtaaataaaaatgactataaaaaagcgactgcagtatagattcgactctatggtgaatctgtacagctgcagccgcgaaaagacaggaaaaacctgaatattgctggaaaacgaagtggttcttattttccggaatatctatatttaatagaagggcgtccaccggtctggtaatcgatcatgctgaccagttcgttggtttcgactaagtaatttaagtaccgccggactgtaatacgggacaaatgaacctgttccgaaatctgttcgctggaccagacctcctccggatgttcggagaggaagaggcggatcagtccaagggtgcgttcatttaggccctttgtcagcggagcgctctgggaggagacatccgggacggagaagaggcggtcgatctccgcctgtcccagatcagaagcggacgccgatgttttcaattcctcctgacgtttcgcaaatcgttccagggcagctttgaaacggtcatattcaaatggtttgacgagataatcggtgacgccgcgggaaataagccggcggacggtctctgcgtcgttggcagaggttaccatgatgatcgcaggggtcatgccagccgcgtggagctggtcgataaattcgtcgccgttcatctgaggcgtgtagtagtcgagaataatcaggtcaaccgtgcagttctgcagatactgcagggcaaggatgccgtttttgaaagttgcctccacgtgaaaagaggaggtcagctcgacgtactgtttattgatggatgcaaccatcggatcatcttctataataatgactttatacattagattctgtctcctttcgggtaaatgtcagggtgaagcaggtgccctcgccaggctctgtgtcgatatcgatggttccaccgtactcctccatcagctcatgaaccaggaaaagcccggttccgcggttctcgcccttggaggaaacacctttttcgaaaatatgatcgagcagctgtggttgtatgccgcgcccggtgtcctcgcaggtgatgatgttgacgtctgggcggcagtagatgccgatgtggatctcgcgcggactttcagatgcgtgaatgacatccggactggcggtgtgatcgtggcttagctcttcaatggcattttccatcagattgccgagaatggtgacaaatccttccaccgggatcagcagatcatggtcgcggcaggtgctgtcggcgctgacctgcaggcggatgccaagctcggcggcgtgcatcattttcccgatcacaagcgcacagattttcggaacgcggatgcagttggctgtctcacggacggactggctggagacaaggctgctgttggtgataaaattcatcgcctgctgaatctccccggtctgtaggtagccgagaatgatgtgcagcttatttaaaaattcatggttgaacgcgcgcagcgtgtccaacatattgtgggcgccggaaagctcgtcggagagacgcaggaggtcggtgcggtcaaataaaacgatcaggacacctcggcgcgcctgtttaccgcgtccatggatcggcacctccttgacgatgagctggcgtccggcgaagctgatgctctcgtgcgttacactttcgccggtttttatgacctgatcgaaagcggtctgtggaaacaattcctgaatcgttaagtgggtgagcggagggtcgtttgcaggacgaccgagtattgtggaaactttctggttggcaaagagaattctgccgtccagatcggttgcggcaagtccctcgtcgatcatattcatgacctcatcctggcgggtataaatattgacgagttcttccgggtcatatcccaacagggagtcgcgcagcagggagaacattgtgtgcgtcagggaaatgctgacgatcatcatgatcaggaatataattatataaaagaacagcagactgcggtgctgggcggacagggtagcggtgaacagggaaaccatcacaaaaccgacgatctctccgccgctgttttttactgcgtgaaaggcgcgccgctgcattccgtgcgtgccgtagccggttgtgatatatggatcgcttcctgccagaatagcgtcctcgtcacctgccacgtaggaatcgccggttttcagacggttcgtgtggtaaaagcgcagtccgtttttatcactgatgacgatgacattgatatctggtatattcgaagaaagagaatccaggtcgcgggtcacggtggaatcaggatagccgttttccagcatggcggcgacatccggaattgcagcaatataagaagcagtaccgctgatcagcttgtccatatcctttcgctgcctggaaatatcaaaaaacagagtaaaaccgagtgagatgagcaccagggtagcggaaaggagcagaaaggatcggtacagattctgttccagcgctgattttccttcctttatcttcatatataaaacctccggaatttatttgatgtaggaaatgagttgatccggtctgcaaaatgtgtaaaccaaaacgatgattaaagttattatagtaaaaaaagaaacgatctgcaagaaagtgtggaggtttacaaggcgctggatggcgaattgcaaagtggccgggttattgttcacgggtaggcacttttggaaccgaaagtgccgtaagaaaacgtggtggcagcaggaatttgccgtattcaaatgcgaagccacggcaaattccgttactggacacgtatgcgtgtacaataacgaaagtgtaacggtttacgagacgctggatggaaaaaggttgaaaaacggcacaccgcattctcgttactttagcctgcaaataaaaagtcaagacttaatgggtaaaaaaatataaaattttacatggttaaaattaggcactaaaataagaccaccacaagcagtgctggtttgcaaataaaagttttgaattagcttgactcagaaagaatacagagatattccttcactcgtccataataaattct

SEQ ID NO: 11030 - DNA, 10594 bp, Unknown
  gut microbiota DNA sequence
atagtgtcaatcgcaatcatactgccgtcgctgaatttcacttccacacagcaattatccatattgtaggcacaagatattaaggttttcatggtatgtcctccataattcgtaatataaagcgaaaatcccgtctgacttcctgttagaaatcagacgggatttgtccgtatgcaccccggaaaccgtcagctaacagttgataagtaaattagttccttatcactgttaagccaacctctgccagctttttaaatttcatattttccgttcaaactgaaaggtacagtccttatttgattacgtggatccagccctccggagctttgatgtgacccatctggatgccggtcagtgtctcatagagtttctgggtaaccggacccatcttctccatacctgccgggaagcagatttccttgccgtggtcaacgatcttgccaaccggggagataacagctgcggtaccgcacagaccgcactctgcgaaatcctttacctcgtctaagtatacttcacgctcttcggtctccatgccgaggtaatctcttgcaacctgcaggatagaacggcgtgtgatagacggaaggatgctgttggacttcggagttaccaacttgccgtctttggtgataaagataacgtttgcgccgccggtctcctcgatcttggtacgtgtctgcggatccaggtagatgttctcatcgaaaccgttcttatgagcatcgacgatcgcatgcaggctcatcgcgtagtttaatccggctttgatgtgaccggttccgtgaggtgctgcacggtcgaaatcgctgacgcggatggtgatcggtttagcgccgcccttgaagtacgggccaaccggtgtacagaatacacggaactgatagatgtttgccggtttaacgccgatgatggaatcataaccgaacatatacgggcggatgtacagggttgcaccggaaccatacggcggtacgaatgctgcgttggcttctactacttttgtgatggcgtctacgaagcgctccttcgggaatggcggcatttcaagaccttttgcggaattctccatacgctcgccgtttaagtcaggacggaacgtaacgatatggccgtcctcggtcgtatacgctttcagaccctcgaagcaagtctgtgcatactgcagaacacaggcacattcattcaaggtaatattcgggtcggaggtaaggacgccttcgtcccaggaaccattctggtacatggaaacatagcggtaatccgttggcatatagccgaaaccgatgttgctccagtcgatatttttcttctccataatcgttgctccaatcttacagaattttatgatttagtaactgtttgactttttgcagtcgctagatttatacctattataatgatttctttcttctgttgcaagattctgggataaaaaatgataaaaaaacaataaaatgtattcttgtgtatttttatacaatgcttgttagtcaagctccggcttgacaaaacggcggctgccatgtatactaaacaggctgacggtctgcaggtcattccgtcatataagatcaagtcataaagtttccgcacagccggggagttagcggtgccctgtacctgcaatccgctatagcaggggtgttgtccgaccgagggcgtttttactgtggggctgcccctgaaaagtggcgttgaagtctgggtcttgcgcaacagaaatctgtgaaccgtgtcagggcaggaatgcagcagcactaagcagaagcttctgtgtgccgcaaggcagcctggaccgagttaactgtcagggtaacgtccatggcatacgttcgaagccgggcgtgcggatttttttatttcataggaaattgcttcctatgaaataaaaaatagaaaataatagatacagaaacaagcatttttgcaggtgtgtgaatatagccgggatatgtggaatttgatttgccaaggggtaggaataccgtgccggagcagattaaaagcgcgtatcccggtatttttatgtctatgatatttgtaaggaattttttcttgcccgcgggatatgattgtattataattacaaaatgggtgtagtttatcctgatatgggggttgttggaaacttagaataagggtaactgtgaaggtactggacggttatgaagaaagggaaagcgctcatgagaagaatcggtatgttaaccagcggtggcgactgccagagcttaaatgcgacgatgcgaggcgtggcaaaatcgctgtacaagatgttcgatgacatagagatagttggatttgaagacggctataaaggtcttatgtatgcagactaccggattatgaaacagtcggatttttccgggattctgacacgtggaggtacgattctgggaacttccagacagcctttcaagctgatgcggacgccggacgagaacggtctggataaagtggaagcgatgaaacacacctattacaagctgaaactggaatgcctcgtcattttaggcggcaacggcagccagaagacggcaaatctgctgcgggaggaaggactcaatatcgtttctcttccgaagaccatagacaacgatctctggggcagcgatcttacgtttggattccatagtgcggttgatgtggcgaccaatgccatcgactgtattcatacgacggcggcgtctcatggcagagtcttcatcgtggagatcatgggccacaaagtgggatggctggcgctctatgcaggcatcgcgggcggagctgacatcattctcctgccggagatcccgtatgatattgatgtggtggtaaatgcgatccgcagccgtactaaaaatggcaagaatttcacgattctggcggtcgcagagggcgcgatttccaaggaaaatgcagccctgaccaagaaagaattaaaagaaaagaagaaaaatggaccggtttatccgtcggtcgcttacgagctgggcgcccagatttccgagcggacggggcaggagatccgtgtgacggttccggggcatatgcagcgcggaggcgagccatgtccgtatgaccgcgtgattgcgacgcgcctcggtgcggaggcggcagagatgatccgccgcaaagaatacggctatatggtcgctttaaacaacaataagattgaaaaaattccgctcgcggacattgccggtaaattaaagatggtcgatccgaagagcgatattatccgggaagctaaggatgtaggcatcagcttcggcgacgaatagtaaggaagtagtagtttatgtcatatacagcactgtacagaaaatggcgtccgacgtcctttgaagaggtccggggtcaggaccatatcgtaaagaccctgaaaaatcagatcaactccgggcggatcgggcacgcgtacctcttctgcgggacgcgcggaaccggtaagacgagtattgccaagatctttgcacgggcagtcaactgtgaacatccggtggacggcagcccctgcggcgagtgcagtatgtgccgccagattgcggaaggagcttccctcaatgtggtggagatcgatgcggcatccaacaatggtgtggaaaatatccgcgatatccgggagcaggtgcagtacccgccgacggacgggcgctaccgcgtctacatcattgacgaggttcatatgctttcgattggcgcgttcaatgcgctcttaaagacgctggaagaaccgccgtcctacgttatatttatcttggcgacgacggaggtccacaagatcccgatcacgatcctgtcccggtgccagagatatgatttcaagcggatctcgatcgataccatcgcgggacggctggcggagctgacgcaggcggagcagatcgatgtagacgatcgggcacttaggtatgtggcacgtgcggcggatggctcgatgcgagatgcgttaagtcttctcgatcagtgcgtggcattccatttcggggaaaagctgacgtatgacaatgtgctcgaggtgttgggcgcggtcgataaccgcgtgttcagcaagctgtttcaggcggtgcttgcaagtgatacgaaggcgtgcatccgtgagattgaggaaatgatcatccaggggcgcgatctttcgcagcttgtcaacgatttcgtctggtatatgcgaaatctcctgattgccaagacgaccgacgaaccgggcgatatgctcgatatgtcggaggaaaatctggcagttttaaaggaagaggcggcaggcgttgatacggaaacgctgatgcgttacatccgtattttctcggaactttccgggcagctgcgctacgcgtcacagaagcggattctggtggagattgcctttatcaagctgacgacgccgtcgatggaacagaatcttgattccattttacagcggattacgctattagagcagaaaatgcaggaaatgccggacaatttacagaaactggcgtcccttgcaccggcagcggggcaggcggcatcctccaaaacggctgtggtggaaacgccgcctgagccgaagaaggtatcccttccaccggcacagtacgaagatctgatgctgatgcggaaagaatggggacggattgcgtccctgagccagcttgtgggttcgattagactcagtcttcccaagacaagtgtagaaccggcgggcgaaggctgcctttgcattgtgtgtacagatgaaaatacgtttggaattatcaatcgggagcctgagcttaagaatttgcaggaagtagtgcaagaaaaatacaaaaagactctgcaatttaaagtccgtttagaatcatctgctgtgccgcaaagaacggtttatgtcagtgatgaggatttaaagaacgcaatccataccgatgtgattgtcgaagaggatgattccgtgtagtggagcttgccaaagatgagccttgttttgtaatgcaagaagctgtgattaaatgcagataaatgatattagtgggtttatatgatatatagaaccggctgcaatcggcagccagtctgaatataaataaaaagaagtgaaagagaggaatgacaccatggcaaaacgtggcggtttcccaggcggtatgccgggcaatatgaacaatttaatgaagcaggcgcagagaatgcagcgccagatggaagagaagcagaaagagctggaggagaagcagtacagcgcatccgcaggcggcggcgctgtaaccgtgaccgtatctggtaaaaaagaggttctttccgtgaaactgtctgaggaagtagtggatccggatgatatcgagatgttagaggatctgatcgtggcggcgaccaacgaggcattccgtcaggcggaagaggacagcagccagatgatgtcccagttgaccggtggccttggcggtctgggaggcggattcccgttttaagcgatggattattacagtagccagattagcaagctaatcgaagaattgtcaaaacttcccggaatcggaagtaaatcggcgcagcgtcttgcatttcatatcatcaatatgccggaagaacaggtcaggcacttgtccggcgcgattctggaagccaagcagaatgtgcgttactgcaaggagtgctgcacattgactgataaggaactgtgcccgatctgcagcagcgaccggcgagatcatgagacgatcatggtggtggaaaatacgcgcgatctggcggcatatgaaaagacaggaaaatacaacggggtctatcatgtgctgcatggggcgatctccccgatgctggggatcgggccgggcgacatccggctcaaggagctgatgactcgcctgcagaaagaggaggttcgtgaggtcattatcgcaaccaactcaagcctggagggcgagacgaccgcgatgtatttgagcaagctgattaagccgacagggatccgggtgacgcgaatcgccagcggcgttccggtcgggggcgacttggaatatattgatgaggtaacgcttctgcgcgcgctggacgggcgtacagagctgtagccggtgagcaaataaaacgttactgggcacgtatgcgtgaacagtaacaataaaacttctgccgtggcaggaagttaggagatgcataagatggataaatacgagtttaacatcaaggtagagcagattaagaaactggttaacaagggagatttcgagacggcgatgaagatcgccgataccatcgactggcgtcgtgtacgcagcaccagcctgcttacgatgatttcccagatttatgagaaaaatgcagagtatcaggatgccaaggatattttattgctggcatatgagagagcgccgcttggaaaggggcttttatataagctgaccgaccttgcactgcgtgaaaataatattcaggaggcagaggcatattaccgggagttctgtgagctgtccggcgatgacccgcgccagtacctgcttcgtttcctgattctggaggcgaaggatgcgccgttagagcagcagatcaattctctggagagatattgtcaggaagagctggatgagaaatggctgtaccacctggcagagctttatcatcaggcgaaccaggcggacgactgtgtgcggatctgcgacaagatcatgctgatgttcggtcttggcaaatatgtggacaaggcaatggaactgaaacttcagtatgcgccgctgacgaaatatcagatggatctggtggaaaaccgcgagaagtacgaagagaagctgcgtgcggtggaagaagagtacaagaacggtacataccgcaagccagagccggaaggagagtatctggatacggatgagccggaggcagagctggacgacgaaccggagaacgagccggagggacagccggagcaggcagagccagaagagaaggctggaaaaccgaaagctgagacaaaaccggcggacgagaaagtagaaaaggctgcgctggacgaggatgtagtagcaagccttcatgaagcacaggcggaagaagcgctggcaaaagaagtgtccaagatcaagccttacgatgaggaagagggcgcatccgaaggggagacacgtgttttcaggaatctccgcgacctagagccggcagaggcagaggaaaagagcgaggaagctccgattcatgaatttgaagaggaagaggaaaccatagtggaagactgggatttcgaaccggaagaggaagaagaggagatcaaggaatcaaatcatctgatgatcgaggcggaagatccggcagccggtcttgcgatggcacttgattctctgaaaaagattcaccgcgagctgggaaccaagcatccggttgccaagatcagcggtgcaaacctttcccatcgcggcatcgcatcggtggcggagcgcctggcaggcaaggatctggtggtcgagcatgcagctgatctggacgatttgacggtggaagagctggaagaactgatgacacaggatgaaaccggcatggtcgttgttctgattgatacgcaggcacgtttagagcagatgcaccgcgcatatccggcattagcagagcgtttccagtatatcggctgtgaaaaccagaaagacgatgcagcgaagctggcacaggcgcgcgaggaagagctgaaacgccagcaggcgcagcaggaagcagaagcagccagaaaacgccaggcagagcgtgaagcggagatccgccgtcaggcagaaaaagaggcagaggaaaaacgcagacagcaggaagcagcagcccgccgtgaggaagaagagcgcgccaaggcagaagcacaggcactggcagccaaagaggcagaagaagcgcgtaaagcggaggaagatcgccgtctggcagagcagcagagagaagaactgcgccgtcaggaagaggcaagacgcgatggcgagccagagtatgaagacgaagaagatcactacgagaaggacgagtatgagccggaggatgattatgcgcgtggcggctatcgtgatgattataaggacgattacaaagacagctataaagacgaacgcgaggacgacgagtattccaattatccagaggatgagccggaagagaaaccgtccaaaaagtccggcgatatggatgttgaggagtttgttcagtatgcctgcaaatatgcatcggagatcgactgcagtatttcaggaaagagcatgctggctctgtacgagcgcgctgagatgatggaggaggacggagaaccgcttaccaagacaagtgccgaagatttgatcgaggaagctgcagataaggcggagaagaaatccttcagcggactgttctcatcgaaatatgataaggatggacttctgattctgaaagagaaacatttctttgattaattaaaacaattcgagaaattttaaaattaaaactaattagtaaaagagagcgctgcgggggaatgcttcccggcagcgttttctggtagtggacagtaaaaagagatacgggagagaaagatgggaacacggttaatagccctcgatttagatgggacactgttaaatgaaaaaatgcacgtgtcggaaaaaacaagacaggtgatggaactgtgcgcgcagcgggggattgagattgtcccggcgaccgggcgcgcgctcccggcagtgccagaggaggttttgagcctgccgggcgtccactatggcatatttacaaatggggcggtcgtccgggatttcgggaaaaatacctgggtgtcggaaagctgcctgagctgggaagagacgatccgggtgattgaggtgctgcgccggcatccggttatttacgatatgtatgtatcggagggcggcatcagcgagacgcgattgctggcacagctggaagaatacgggataccggaacgtgaatgcgcctatatccgggcgacgcgccgggcagttactgacatggtggagtatctgcgggagaaaaaatgcccggtgcagaagatgaatttaaattttaaggaccgggagagcaagcaggcagtccgggcaaagctggaagcgatgccggaggttctggtgacctcctcgcttccgtggaatctggaactcaacgcggcgggcatcacaaaggggagcgggttgcggaatctctgtcagtatctgggaattgaagcggaggagacgatggcatttggagacggcgaaaacgactggcccatgctggaggcagcaggaatcggcgtagcgatggaaaatggagccccatttttaaaggaacgcgcagaccggattgctgcttcgaaccgggaagagggcgtagcggaggcgatcagacaatgggtgcttatataaaagaaaactggctgttcgtggtggtggcagtctatctggtttccatggtactgtacgggcattaccgcggatttgtccgcctggcagtctcggccgtttccctggtgctgtcgctgggggtggttcattttggtgcgccgtctgtcgcgaatctgcttcgcagcaatgaggtggtctatcaggcggtggaggacagcgtgacgaaatttatccaaaaggacgatgaggcggaaaatgaggcagctgacgcggcgccgccatccgtacagcgcagtattattgaagaaatggagcttccggaacagttaaaggatgcgcttctggagaataataacagcgaagtttacgaggcgctgggtgtaagcagctttacccactacgtcagccgttatctggcaaacagcctgatcaatattataagtttttttctgttgtttgcagccgtgttcggcggactgcgtgttctgtccgtatcgctcaatgtggtctcccggctgccgatcatatcgggactgaaccgtctggcaggtgccgtgctggggggtgcggaagggatctttttcgtctggattgcagcactgcttattacactgttctcggcaacggcgattggtgaacttttcctgaaccagatagaaagcaatatctggctgacctggctgtatgaccacaatatgcttggaagcatcctgatgggtgttgtgaaacggattatttaaaagcgtatagagaaaaactgtgatattgaaaaacggcacaccgcattctcgctacttagtgatgagttaggtgtgccaaattttttatttcagtcgagaagacacccacctctttaggtggcgagtaatagcaaatttgtctcagtgggagttgggtcttcggctgagataaacgctccgcgaggatgcgcaatgattctgtatggaatatgtcagcgaaaaaacaagtgaaaatcccttgacaagttaatgctgaaatggtaaactttaactctaacgtgttttgacgttggtctgcatatgcagggaaaatcgaatatcacaggttttcttgtttgcgaaaatgttttgaaaattaagaaaaaatagttgacaacgacaactgcctatgatatgatattcaagctgttgagcgaaagctcagttgcgaaaaataaaataaaaaagttgttgacaaagataactgcttgtggtaatataaatgagctgtcaatgagacaacaacaaagaactttgaaaactgaacagtatgtaaaaccctgaaaattctaagaacaaaggcttttggttaag

SEQ ID NO: 11031 - DNA, 4216 bp, Unknown
  gut microbiota DNA sequence
accctgtccggcggctcctttgacagcatccaaatcgggaatggcgcaaagtatcaatccctgctggaaaagggatatgcctatcagaagcaaggcggcgcattggtcaggctgtcggagatgaatgagaatactgccgtaactgttgtgaagtgcagccacccggatgaccattccggcgggaaggtttgcccctactgcggctatgccgctgaggtaacaaagacggacggcagcatttcctaccatcggacgacagacgaggccatcgccgcagctggcggcggtacggtgaagctgctggcaaatgcagacgagattaccatcaacagcccgctcaagctgaatctgaacggtaagacggcggcaaagctgaccgtcaccggagatgtcacgctggcatccctgctgccggagggttacgtgtttaagagcggcagtacctggatcagcgaccctagcggtacggagctgaccaacgtttctatggccaagatccccatcaagagcatgaactatcccaccgagatgagcatgacttatggcggtgcggggacacttcttgtcaatgtaaagaaggaaaccggcacaggcgctgtaagcttccagtggtacaaggtggaggacggcaaggccacagcggtcggcagtgcgacaacaaagaatcaatttgatctttctgcgctaaagctgtccgcaggcaatcataccttccgctttttggccacctgcgacggctacgagaagatgagcgaggatattgctgtgacggtacaaaaggccgacatcaggtcagacctcatcacgcctcccacagcgctggaaaacctgacctataccggccaggagcaggcgctcattaccgcgggcagcgtgaccagcggtggcaccatgcagtacagcctgaccgagaacggtacatacagccaggacatccctgccggcaccgatgccggaacgtataccgtgtggtatcgggtgattggcgatgcaaaccacaatgataccgcacccgccagcgtggaggtcagcattggaaagaaaccgctgacgatcagcggggtaacggctgtgtccaagccctatgatggcacgacagacgcaggcattaccagcgtaaccttcgacaacgtgaccttgacccgaggcacagactacaccgtgaccgccagctttgacgatgccagtgtgggcaacggcaagaacatcactgccacagtgaccctaatggggcaggccgcgaagaattacgccctggagcagagcagctccgctactactggcagcatcaccaaggctgctgcgcctgacttcgccaaggaaaccgcacttaccattgtaaatgactgcgaaaagacctacactgtgacgctccccgccctgcccacgctggaaactcccaaagagtacggtacgctcacctatgagaacggcggaatcacactggatggcagctactacaccgacggtgcgaaggtggaaaacggcaagctgaccctgccgattcagaaaaatgacgtggaaaccaccggctctgtgggcacagtgaccgtggtaatcaagagcacaaactatgaggacatcacgctgaccgtcaatgtcaatgcgaccaacaagcttgtccccactgttacggcacctacggtcaatacactggcctacaatggtgcagaacaggctctggttacagcaggcaagaccactggcggcacgatgctctaccggcttgacgattctgagtggagtgagcagatccccacagcgaaaaatgccggggaatacaccgtttggtacaaggttcagggaaatgcagagtacgcagatgtggcagaacagaacgtgaccgtgaccgtagcgaagaaagcggtcaccgttacggcgcttgatcagagcgcctacaccggcagcaccgcgcccgatctgagcagcccggaagcagataaggattacaaggtggaaggtctggttggtgcagataccctgagcggcacggtaacactggactacgcacagacaccggatatgagcaaaaccggaaaaaccgcaatcaacatcactggtacgctgtcaaatgacaactatgagatcacctatgtttctggaacgttgactgtttccaagcaatcttccagcgacggcggttcctcctctggtggttcgggcagcggtggaggctcatcctccggcggttctaacggttccggaagcaatgataacaccaaccagccggaagcccctgtcaccggtgaaaccaaacccatacagccggataaaaacggcaatgcggcagtggacaacagctctgtccagtccgccatcgacaaggccaaacaggatgcgaaaaagaatggtacagccgaaaacaggattgccgttaccgttcccatcacctcggcggcacgccagacctcttttaacgtgaccatcaaggcgcagacactggatctgctggttaaagaaaacgtccggcagtttaccgtagcaacagaccatctggtttcggttactatcggcctggatactctgaagcagttggataccgcctccgctggcggagacatcattctccgggcagataaggtggatgcactgcgttccaccgaggccaaagccactatcggcacaagaccggcctatgacctgtcactggtctacctctccggcggcaaagaaacaccgattgccaacttaaatggtcacactatatcggtgcgtttgccctacacaccggcaaaaagtgagcagacaggtaatctctatgcagtctatgtagatgacgctggcaaggtggaatggatcaccaaatccagctacaatgccagcctgaaagcggtggtttttgaaaccggtcatttcagcgtttacggcgtgggctacaaaacttttgtcccggcctttaccgacattactggccactgggcagcagataacatcctctttgcagccagccggggactgctctccggcaccagcgacaccacctttagcccggacaccggcatgaccagaggaatgtttgtgacagctctggggcggttggcgggcatcaacccggacagttaccagaccgggaaattcaccgatgtgaaagccgacgcttactatgccccctatgtgaactgggcggcgcagaccggtattgtggaaggcgttaccgccaccacctttgcaccggacaccaacatcaaccgggaacagatggcggtgattatgaaaaattatgctgcaaagctgggctatgacctgccccagaccttgaaggctgtgacctttgcggacaacacacagatcagcagctgggcgaaggatgcggtcaagtccatgcagcaggcgggcatcctggccgggaagaatgaaaataagtttgaccccaagggaaccgccacccgcgccgaggtcgccacggttttgcggcggtttgtggagatcgtcattgacccgcaggccgcaaacggctggcagcagaatgacagcggccagtggaactattacagaaacggggagtcagtgaagggctggctctccgaggatcagaagtggtactggctggacaaggtcaccggaatgatgtttgccggaggctggaagcagatcgatggtaagtggtactacttctatgcagatgggacgatggcggtgaataccgcatccgacagatgaaaaatgaacccgtaatgtaatgcaaaaataatatcaataaagagggatgtgaacaatatgggcaagtttctggtaatgtcgcttaccgaccatgaagaatatatactcagtagaattatggagattattgcggtcgagccaggatttgaccatattgtgacatcccacccttgtaacactcttgtttttccgggcttggagcttcggctgaaggagagaacagtataccgaaacggtgagttgatttctatgactcgtcgggaatttgcaacattggtatacttggcaaaacatccattctgggtattttctgccggacagatctatgaagaagtatggggaggatggtgaaaattgcggaacggctgttgccttcgtaccgaaaatcaatgcgaatccggtgtataacggagggtgaagcctgctatatgtaggtagcaatcattatgataacataaaaggcacggcataaagcaatctgatgtaaaatctatcagaataatttatgccgtgtctctttttaatttgattgaaaaacggcacaccgcattctcat

SEQ ID NO: 11032 - DNA, 183 bp, Unknown
  gut microbiota DNA sequence
ttttatctcagtcgagaagactcccacctcttcaggtggtgagtaatagcaaatttgtctcagtgggagtccattctccgactgagataaacgctccgcgaggatgcgcagtgattctgtaaagaatatgtcagcttcgctgaccagaatcacgcgccaagtctcacggacgttcgacttgaa

SEQ ID NO: 11033 - DNA, 25669 bp, Unknown
  gut microbiota DNA sequence
tgtatttgcccttatcagagtgcataaacactgatgggacgatataacacaagggaaataataagggaaagctcacctgcgacaaatccagtgttttcaaggggttgcgaagaatttaataataaaatataacagttattaaatttcttaaaacaggtgaaatctcaatcggaatttggaggtgatttaaatggaaaacaaaattgtaggtgctattttctgtttcatgtcagcagttttaatttctgcacgatatatttctgctgcgatatttatgagtggagtagcttcgtggaatgccactttatttgcagcaggtcttgaatatgtaggtccttttttagcaatagcggctggtattgcgtttattattggaatcctgtttctgggatatgggctgtatcaggatattaaaaagataaagaagtagaacaattccagtttgtcaattacaggtgacattgaaagagtcagcccattcaaggtgctggctctttcaaaaattccattctaaataaattgcatgataaattagagtaaaaatgaatacccattagccggaaatgaatagaaaacgaataaaagtgtggtgtttcgtataattatgagttagtatgcatcagacacacttttgtaaaaagggagtttcaaaaaaacattctatcatttttgatctatgatataatgtgaacacttgacgaggtattttcgagtctagtgagaacatatgcctgaccacttaatgaggtgtttcacgaatttagtggtcatggtataatgagcccagaagaaaagaatgcggctgcgaagcagacatattcttttcttgcgccattaccgaacaaacagccatgcgaagcagggcggtagcgcgcgatagcgcgggttcgtgagtatcatgtccatgcaccaaatgaagccagatcaaagtcgaaaattgatttcgtatttattataattgacaacaataatccgcaaaaaggaggttccaccatgccatcccacatcatccacccaatcccgcctgtttttgacgccgactcccgcatcctgatcctcggttcctttccgtcggtcaaatcccgagaaagctgttttttctacgggcacccacagaatcgtttctggaagctcttagcacgcctgcgaaaggaagacgttccatcctccatcgaggaaaagaaggaatttctgctgcggaaccacatcgccgtctgggacaccatccatagctgttccatcgaaggatccagcgacagttccatccgcgatgttgttccaaacgacctcgcctctatcctggatcacgcttccatccaggcgatttacacaaacggcgggctgtccggaaaaatgtacgaccgcttctgccgtaaacagactggcattgaggcaatcaaactgccatccaccagccctgccaatgccgcctggaacctcgaccggctgacagatgcctggaaatgtatcaaccagatcctgggggaacccggatctgaaacaaaaaacactgtttccgatggcaacgcacgcgaagcaaaaacacgcatcatctaaacaaacaccatctgcaccagaatcatataaaatacagttcctgccggccaatgacgcttctgtccgatccactgttccgtaaaaatcattacaaacagtgccgtcagtgcaaagtccagccctttcgtattaaatgtaatcacatttgacactgctcatctttcttagtagaataaatacattataacgatcgatttttcggattcaacacagatttgaactatgtaaaaagctttgaaggaattacctttacaaaaaatcttataaaaaaaggaagcaaaacctatgaacacatatattcccctccccaattcaagtgccggctcgcctgtccagttctctgaaccagccgcctattcctacgaaagctgccattgctgtccgcgaaattgtcagatcaaccgcaccaaaaaacagggctggtgtcacagccctgccggtatccgggcggcacgcgcggcgcttcatccgtgggaggaaccgtgtatcagcggtctgcacggaagcggtaccatctttttttccggctgcacgctgcgctgctgtttctgccagaactaccagatcagcagcgaaggctttggaaaagatatttccggaacgcgcctggaggaaatttttctggaactgcaggcacagggcgcgcacaatatcaatctggtgacgccgacgcagtaccttccgtcgctactgcccgtcttaaaacgggtcaaaccgcagcttttcatcccgatcgtctacaactgcggcggttatgagacgctggaggcggttgatgcgctggctccctatatcgatatctggctgccggatttaaaatattactcttccgaactgtccgcccgctattccgccgccccggactattttccggtcgcctccgcagcagtcaaacggatgatcaagcacaccggtccgctggtattggaagatttctccgaaaatggccaggcctgccagctcatgaagcgcggcgtgatcctgcggcatatggttcttccaaaacacaaagacgattccatccgcctgctccactggattcacgacaacctcccggaggggcattttctggtaagccttatgagccagtacacccccttctaccagagcaacaaatatccggaaatcaaccgtcgcatcacaagctacgaataccagaaagtcgtcgatgccgcgattgagctgggactcacacagggctttatgcaggaaaaaagcagcgcgaaagaagaatacacgccgccgtttgagttgcaggggatttgatatttatataagaaaaaatccttcttgatacttttccatgaaccagaaaaaagggtatcgataaattgacattttatcgataccctttaaactatctcgtccattggatgatacctctttctttgaacttttcctttattcaattttgattcctttttcaacaatttctgaatcgttcaatcttattttttctttttccacttatctatctctcttttaaaaaacgcttctttttaatgatactttctcgtcatatcactaaaccgaatcctgtttctaaatatgtatgatagatgattgactgatttttacttgttgattttggttttcctttgttcaatttttttattaaaaaattgaaccagttttatgttttcggtggaatcagctcccttctttttttgttttatttcttgtttcttttgatggttttattctaatacatatgtcgcattttgtcaatactaattttgtattttcttgttatttttcagttttatcttcatcacgaatgccagctattagttttcgtctcgcagtcgcgccatcttatctctttatttaccatcgttcacacattatgagcatcatgcaaactgttactgggaacgtatgcgtgaacagcaacaaatccgcagttactgtacacgcatacgtgtccagtaacgaaatttgccgtggcttcgcatttaaatacggcaaattcctgctgccaccacgttttcttacggcactttcggttccaaaagtgcctacccgtgtacagtaacaatccgcaaccagaacttcacttttttccctgttatttttcttgccaatcttcccattttccagtataatcatgatatcggtgcatttggcacctgcttctttatatgcaggcaattttttcacatcttactggttcctgcgattctcatgttcagttttttcgatgatttccatgactattttcatacttacgcactcaaaaggtaaacgctaaatctctgaactttttatttattttttaatcactaagcaatctttcttcacatctcaaacttcatgactgcttcttgatttgattccttaaaacttattcacacggggaaactgtttctcatcttgctgaaattcataacctacatgagcaagcggacatcccctatctgcaattttatttcaggaggtactttatggtctatgaaacttttttgaaaacaatccagtcgatggtgcagacgcgcctcaataaaaaagccaacgtctccctgcggcgggttctgaaaaataatggactgatgctcgacgggctgagctttacgaaacccggctcacggttatcaccgactgtctatctgaacgcctactataatgaagcggaggaagggatgccgctctccattattactgatcagatcctgatggtgtatgagacaaatccaggattttcggaggatatctgcgaggaactgcgcgattttgatgccgtacgcggccggattgcctacaaattgatccacgccgctaaaaataaggtgcttctctcccacgtcccacatattccgtatctcgatctggcgatcgttttctatctgatcctcactgacaatgatgaggggcagatgacgaccctggtacacagcgaccatcttgccctgtgggatatttctctggaagagctcggcatactggcggaagaaaatacacctcgcatactgccgtaccacatcagctccatcgaatccaccctcaatcagctcgaaatggaggacatcgttgaaacggaagctcttccatcggtcgctctctacgttctgacaaattcgcgcggcatcaacggcgctgcctgcatgctctatccccgcgtcttaaaagagtttgccgaaagcctgggcgaagatctgattatccttccatccagcatccatgaagtgcttctcactcccagcagcgtctcccttccgccggaagaactcaatgaaatggttcaggcgatcaatcagtcggatgtgcccgctgaagaccgcctgtcagatcatatttattattttagcaggattcagggctgtctctacctgccgcccagttccactacgacgctttattccggagcagacggaacagtgaatccacaataaagatggcaaccgccatcgcccccgctatctggatcgtctggatcagataaaaattgtaccattttgtctgtccctgtatcagaaaatagacgctccggtagatcgatgcgcccggcaccgtcggcaggattcctgccaccagaaagatcgtgacgggcgcttttaacacgcgtgcaaatacctggctcagcagagccgctgccagactggaaaaaaatgccgccgccacctgcgaggttcccacctgcattgataccaggtacgccagccatccggcacctccggtaatgcccgcataaaccagatatttccgcggcatatcgaccagcagggaaaaaccaaaaaccgccagaaatgcccccacgctctggatcatcaattctcttatcatctctgtcataccgatcctcccgccagccggactgccacgatcgccaaaccgacgcccgacgcaaccgccagcgccaccacgactgcctccgccatccgcgcgactcccgaactgtaatctccattcagcgtatcgcggattgctgccgtaaatgtgaccccaggcaccagcggcatgattgcgctgataatcactacatccaggctcattcccagaaatgccccacggcgcagcagatacgccgcaaccgccagtgcaaacgagccaagtgaattttgacagaaatcattcaacataagtttggacgccgcccgcaggacaaacgcaagaacgactcccacgacagccgccaccaggcattcgcccggaccgcctccaaacatcaccgcaaaaaatcccgtcgttgccgcatagccaatgcatttcttccagaatccgtataatgtcgtattagcaatccgatccagtcgttcctgcgcctccccgacagacaattttccgctgcaaaattcccttgaaacattgtttacctgatagatgcggttcaaattcgttgcccggttttccacccgttttaccaaggtaagcggcggaagcgatgcatccgcaatcgtcgccacgatccccgtcgtcacgacaaacacatctgcccgtgcaatccctgaatgctttaaaatacggtgaatcgtgtcctccacacggtagacctccgctccgctcgccagcatgatctcccccgcccggaccgccatctccatcagcgcgccatattccataccaaccaccctctgatttacgaattttccaaatccagcaacattttcttgacctctaccatacggtcacgcaacacgaccgcttcctcgaaattcagctcggctgccgcctgattcatcttcttcgtcagttcctttacaagtttttctaattcctggcgatccatcgattccagatccttcgttaccttattcgtaaccggttcggctgcctgcgagatcgtgatcagatcccggacagctttcttgatcgtcgtcggcgtaatgtgatgttcctcattgtacgcctgctgaatcgcgcgtcttcgctccgtctcctcgatcgccgcccgcatcgaatccgtgatcgaatctgcatacatgataacatgcccctcagaatttcgcgctgctcggccgatcgtctgaatcagggacgtttccgaacgcaggaatccctctttatccgcatccagaatcgccaccagcgcaatctccgggatatccagaccctcacgaagcaggttgatgccgaccagcacatcgaagacattcagacgcatatcccggataatctgggcgcgttccaacgtgtcaatatccgaatgcagatatttgacgcggattcccgcatcgcgcatatagtcggtcaggtcttctgccatccgctttgtcagcgtcgtaacaagcaccttaaaccctcgatccacctcccggttgacctccgaaatcagatcgtcgatctgtccctcgaccggtctcacctcaatcggcggatcaagaagtcccgttggacggatcacctgctctgcccgcagaagctcatgatctgcctcatactcgcccggtgttgctgaaacgcagagaatctgatccagtttgctctcaaattcttcaaaatttaacggtcggttatccagcgccgatggcaggcggaagccatattccaccagcgttttcttgcgcgactggtcgcccgcgtacataccgcgcacctgcggcagcgtgatgtgcgactcgtccacaatcaccagaaattcatccgggaaataatccatcagcgtacacggcggttctcccggtttcgaaccaatcagatggcgcgaataattctcgataccggaacagaagcctgtttcccgcatcatttccacatcaaaattcgtccgctccgcgattctctgtgcctccagaagcttatcctcactcttaaagtaagcgacctgctccttcatttcctctaaaatattgtttgccgcaatctccatccgctctttcgggatgacataatgcgatgccgggaaaatcgcgatatgtcccagctgcgccttgatctcgcccgtcagcgtgtcaatctctgtgatccggtctacctcatccccgaaaaactcaatccggtacgcatcgccgcccgaatacgccgggtatacctccagcacatcgccgcgcacccggaacgaacctcgcttgaaatccatgtcattccggctgtactgaatgtcgatcagcttgtgaatgacctcgtcgcggtctttctccatgcccgggcgcagggaaataaccatgtttttgtaatcgatcgggcttcccagaccatagatacaggaaaccgatgccacaataatcacatcctgccgctccgacagcgccgccgtcgctgaatgccgcagcttatcgatctcgtcgttgatagaggaatccttctcgatgtatgtgtccgtggacgggacgtaagcctccggctggtagtagtcatagtagctgacaaagtattccaccgcattattgggaaaaaattccttcatttccgaataaagctgggctgccagcgtcttattatgtgcaataattaacgtcggcttattcagcttctgaatcacatttgccatcgtaaacgtcttgccagagcccgttacccccagtaatgtctggaactgatttccttccttgaagccctccaccagcttttcaatcgcctgcggctggtcgccggtcgggctgtattctgataccaactcaaaatgatccattgctttctcctgatttgatataattcacaaataaagaatgtgcctttttgtgtaataggggattccaaggaatttcctagtacacaaaaaatcccattaagtatttctattataccaaatccacccatgaatgtatacataaaagcaaaacaaatcagtacaaacgttcgatttcagataactgttcacaggtaggaattttctgaattttctaaactgaagattccgtacgatacagttctggttgcagattttgccgttattcctattattggtttactgtattatttctttcttcccgtgactactatcagaacgattcctaatacccccatcatccccgcataccccacaaacggcacgctcacgccctcgctgaatcttcccatccatttcagcacaaacggcgaacacgccgctcccagattgcagccgaccagcacaattgatgtggctgtattgatagaagactgcggaatccgctcggaaatctggtggaaggaataggtaaccagaacggtatagaaaaatccgacgatactgatgccaactccaatcagcggcagattgcccgcatatgcggtcagaagcatccccgctccaagcatcaagcatccaacccccggtaatttttccttccaccacatcgtcagttttccaaaataaacaccggcagctattcccatcagcatcatgagcgtgagaatgatgctggcttccgactccgttccaagtttcttctctaaaatcaacatcgggacacgcagggaattggaacagtagatgcagatgacaaaccccgcaaacactgcataagcaatggtcaggacttcttttttccagcattctctttttccatctgcctccgcttccagactttctttctctgcccctgcactctgtgagcccgcactctgtcccggctccatacttcccggaacccatacaagatacagaagtacaatcacaaatccgagcgcgtacacccaaaatgccagattccaccggatcaacaccaattttccagcaaccagcgtcataaccgcgcttcccagcacctccgccgatccgcggtatccgagcagcgccgctttttccctgccttcataatattcactgaaaatgctgattgctttcgcattaatgagcccaatcccgatccccaggaaaatcctggacgcgaacatcaccggatattcctgtacaaacaccggtaccatgccgctgaccgataaaagaagcagaccgcccacaatcattggacggtctttcatataacgcgacagccatgcattcagcacgatcatgacagtgatcgcaaacgacggtgctgagatcaacatctccacctgtgcggttgtatattcactgaaatgctgcagcagcgatggcagcacgatcgaaacagaatacgccgatgtcagtatcaatgacagcgatagcagcgctattttcttcatttgttctttcatattaatttctccccgaatgtaagttttatactagaattttgattgcttctgtcctatccattcacaatcgcagacagcacaatccatgtatcgtttcttaaaacaatactccattccttttatcataaatgaaattcattcagaaagaaatacttaaattttttttattctaagatttttattctaaggtagatgtttcactgttcacacatgtgttcccagtaacgggattttcagttcagaaaattcccacctgtgagcagttacgtttcttcgttacctatccccgcgcaaaccagtctttcatgcactgaagcacctgcaccagctcttcttccttgataatatacggaaccatcgcgtacagataatttaagaacggacggctgaacacgccgcgtttgtacgcatattcctgataccctttcaggactgccggatcatatacctcgacacagacacatccgcccatcatgcggacctccctgattctcggatcggtaaattcttccatctcccggcgggtgatagcttcgatcttctgaatcttttccatatagttctgcgtctcaaacagctcgatcgaggcaagcgccgcgctgcacgcgagggcatttcccataaaggtcggtccgtgcatcagcgcatgttccgggttatcatcgaaaaatccatcaaatacctttttatttgccacagtcgccgcatgaccaatgtaaccgccggtcaatgcctttccgaggaccagaatatccggaagcacccgatctgccacaaagcggtttccggttctgccaaatccggttgccacctcatcaaaaaccagcagcacgccgtacttatcacagagttcccttgccttctccaaaaatgaaatgtcgtacatccgcattccgccagcgccctgtaaaagcggttccaccagcacgcagttcaacttgtcatgatactgttcaaatgctttctccagcgccgggatctcagtcggaatgtgaaccacatacgggcttgcaccataggcttttagcacaaaatggtagtcctcatcatcgcctacctccatcgtcttaaaggtatcgccgtggtacgcgtgttccaacgccagaatcatcgtccgcttctcatcgccgcggttcatataatactgcagcgccattttcagcgctacctcaaccgccacgctgccggaatctgaaaaaaagcagtagtccagatcgcccggcagccaggatgccaatttttctgaaagcctgcgcgccggctcatgcgtcagcccgcccagcatcacatgagaaaatttttctacctgtgaaataattgcctgattgatcaccggatgtttatatccatgaatcacactccaccaagatgaaaccgaatcaatcagcttctgatccttcgtgtaaagatataccccgttcgcatccacgatctcataaggtgctttcattgtttttaactgttcatatggataccagatcatttttcttctcctttatcttctgtcttacgcatacagccctttcagcgtctccgcatccatggaaagctccgtatccccatccgccacacaggcaacaaccggaatgcccgtgtaatattcacacattttccggttatcctcatgaagcagattccccgtctcataatggttgaaaataattcctttcagggcaattccctgttgtttcagataataggcagtaagccccacgccattgatcgtcccaagccccgcatctgcaatcagcaggcagccaagcccgcacgcttttactacttctggaagacggatatccgcttcgtctatgcagagtggacagagaattccgccgcttccttccatcgtcacatactcatatttttcacagactttgtgaaaatcttccagcacccgatccatctggaccgggttgccctccagacgggatgccagatgcggcgataccgccgtctcgtacacatacggacacatttcctcaagcggctgcccgattcccgacattgtttttacctgcagggcatctcctggaatcaggcttccatccgcacgccgctcattgccgctcattgccgctttataatacgccgcatccgcgccgctctcccgcagttttttcacaatcaagcctgtcacatacgtttttccaatatccgttcccgtacctgttataaaaatccccttgctcatcttttatccaagtctccctcccttaatcagcggaatcatccgttttcctatgatggcagccacaatacagagcacgatatcgcccggaactgccagaacaaagcaatataaaaacagcgctcctacgccgatcggcgaattcagatagaaattgctgatcacgtagtaataaatcattccaaatgcatagacaataaaaagtcccagaaaattagctcccagcaggcgccggtaactcggatgcgtcttggcattggcaatcttaccattcacatacgccgcaaccgcaaatccgatgatatatccaaaactcggctggaaaatatatcccggtccgccgccctgagtgaaaatcggaagtccaattaaacctaatacgatataaaccacaaccgccagcgccccgttgaccggacctaaaagcagacccgccagcatcgtaaataaaaactgcaatgtaaatggaaccaccggaaccggtatcttgataaatgctcccactgcaatcagtgcgacaaacatcgcgcacaaaactaaatcctttgtcttcatgtgtttcaaacctttttcctccttggttatctgaatgatttcaggcatccgaagccattctattctcgcacatgtacataaatttctctccgcaacccctgttccaaccatctaaaacagcagcggccgttccagatcccgggtagtcgaaacagatgcagaactgattgcaagcataacatagcctttttctattgtcaacctattatttttatatagttaacaattagttttttatctgtttttatctctttccttcccataatcttgtttcttatatcccttgatatacatacgtttcccgtccgtccacacattcactgcccctgaatccgccgttctccagatctccgttcccgtctgttccagacgttccaccgcctccggtgccggatgcccgtaagtatttccctctccataagagagcaccgtgaaagctggggaaaagcactccaaaaactcctctgaggaggaaccgttcgaaccatggtgtgcagcttttaacagtgtcactttttccccctttttgtcctcttccattcccagaatttctctttcttcctccactccaatatctccagtcagaagcatacgaaactttccatacgtgacatcaaacaccagtgaatgactatttcgctcctcgactggcttttcccccgcctccgggtacaggcaccgaagcgccaggcttttcgcccgcaccgtttctccccgatacagataatagacttccgcaccccgttttctggcaagagtttccagttttttatatgcctcctgcccttttcccgccgccggaagtgccagattccgcacccggatatctgcctcctccttcaaaagccactcgatcccgttcgtgtgatccgcatccgcatggctgaccagaatccagtccagcgtgcggattccctgacttttcaaaaatggtcccagcacatttttcccgatttttttatcctggctgctgccacagtccgaaagaattgcctcatcccgcgtccgcagaaagacgccgtcgccctgtcctacatcgaggaaccagctctgaaagccatgaacaggcttaaccactaaaaagactaccgccacagcaataaatacactattttttccctgtgcattccagtcttttggaaaccgaaaaatcccttttctccctaaattctctcttgcttctcccacactccacacatatcgaatccccagcgccacataaaacacccctattttccacatttccgggcgtcctgccacgatggaatgaaacggcacgcgttccacctggatgcaaagccattcatacaactgaaaaatataatgccccggacccgtacatgcacttgccgctattctgaatatttctggtatttctgatattcccgatgccgcacctccaaaatccgaaagtactcccgcaatgctgctgcctccgcccattccccccatttttcctcccacaaacgctatactgtaaattccaagcgccagcagaccgcttccggctgcatacgtgagaagcggaatcacgatcaggttcagaaaaattcccaacatcggaaatgtaaaatagtgatacagctgaatcggcattgtataaagctgtattgccgagctgagcatgagtgtttcatatcctttctttttttctttctcttgttcctcctcttcccgctcttttctcttttttcccactttccgcagctcctccgtctccagcccaatcgcggcaaccgcgccataggaaagctgcaatcccgccgaaaagagcagatacggcgactgccacgcctgtaaaatcaaagatagcgacagcgcactcagcagatcgtaactccgccccagatatgccgccagacaggacacctctaccataaataccgcccggaataccgatgctccaaatccggttactaaaccataaaaggtaagaagcgctgaagcacccagtcccgcccatccatacgatatgccccaaaaacgcagtgcactgtaaacgctcatgccaatcaaagagacatgaagcccgctgactgccagaatatgtgcaatcccattatcctgaaaccgttcgcgcagctcttccgataacccggatttatcccccagcaaaattgcctggaaaatccctgcctcttctggaacacagatttcctgaaaaacagccgtcgcgtacgcccgaaagcattctgcctgacttcggagaggggaactttttccttctgaaataaaaatccgatccgccgtcacccggtttctgattcctagtccccgataatacatccgatacgaaaactgccccggattgcgcgcttcttccagaaactcagcgtttcccgtcagatgaatctgacttccgcagggtggcagaattttctcttcacacttctccagtaaatcgcttttacacgatatcagtacctttcttacactttcatcctctacctccacccccgtcaaaatcatcgtacaccacccatttttttccgaaatagaatccagtgttcccgataccgccacctctgccgaaccgcccttctgcgttaccatccgttccagcgcatccgggcgcatttccaccatcatccgtccccatcctgccaggaaacagaaaaacagcagaaagacacggcacatcatcggatctttccaattccagacgcgttctgcgtctgtctgaaagtccgaatctacccgtccttctgctgtttttatgactgcaagcaaaaaaaacgctgctgcaattataaaccacaccgtcatgcccatctggtacgctgcgacctctccaagtacgaaagccaccatcatccacattaccggtcgtttgatattcaattcctcttttcctgtattctacaaaacatcaacaaaatcccattgctgctctcttccaaatatggcatatacattctgtctgacagttacttcacaatatacttctcctctctctccagaggctgcaccagcgaaatcacattccggtacgtcacatctgccgagccattgaccgtgatctgtactttatttaccgtctgaagctctgtcagcgaatcgacgatcgcgtaaatcggaatatactccgccacatcgatatccccggaaataaaactgctatccaggttgacatagcaggtattatctgtcagtgatacgtttaatacctttgtatttttcggcatcactgaaagcccgccattctgggaacctgccagcagctgttccactaccaggcgttccagcgacgtgttcatactgtgaaatacttcccgtttttctgccaccagaccatctttttcttcattggcaaaatacagggtcagctctactttttcatacgaattgacatccgaaatactgtctacaaaatcacttcctgcgatcgcgcccaccgggttcccatgtgtgtccaggagcggctgtccctcgcaattaatgctgatataatcgactcccttaacctgtgtaaaggtctttgccagcgccgcccggcacagaatctcccgcgacgctttcgtattcatatattcctgattaaaattcaacgtcagcacgttattgtcccggttaatatccaggaattcaaccttatcgcttaaaactgcctgatactccgggttttccggcgccgcaaggatctgccccgccagctccccgatcaggatctcagcgtccgccgtctccgtctgataggaaacactcgccagccccgtgcgcgtcgaattgagataataaatctgatagacgccgtcctcacccgccgtcggatgcacctcttctttttttcggcatccgctcagaagaagcagacatgccaggcaaaggatcagccacgaacttacgcttcctgcccgttttccagagcttttttttcttattttctccatttattatttcctgttgttattttgcaatctatctcacaatagacatttccctgacctcacattcgaacactgcaacactcaaataccgcaacattcaaacactgaaacattcgaacacgacagcattcaaacaccgaaatattcgaacacgacagcattcaaacaccgaaatattcgaacaccgcagcaccagcaaccatctcgaacctctaaaccgcccagaaccacgctgtctacggaatataattcaacggaatccgcaccgtaaaggttgctcccttgccttcttcactcttcaggcggatcgcgccctgatgaagaagaataatattcttcgtgatcgcaagccccagcccggtaccgcctgtctcgcgtgagcgcgccttatctacacggtaaaaacgctcaaatacgcgctcctggaattctttcgggattcccacgccattatcctctaccttcacataaaagaacttgtggtcagcatccagcgtcacccagacttttccctcttcgcggttatacttgatcgcattttccaccaggttcgaaagtgccaggctcaattttacctcgtccacatccgccgatacttcccgcttgctctcatacgtgatctcaatgttccgccgcttcgcgatcggggtcagacgttttaaaatctgttccagaagaccattgatcgaagtctgggcaatattcagatccggcgatgatttatccattttgactaacgtcagcagatcatcgataatcttgccctcgcggtcaatctccgccgaaatatcctgcataaactcctgatataactccgccggggcgttctccatccccatcagagaatccgccagcacccttatcgaagtcagcggtgttttcagctcatgcgacacgttggaaacaaactcctgacgcgactgatccaggtttttcagcttccggatggtctgcatgactgcctccgaaatgtcccgcgtctcccgatatgtttttacatcaatatcctgatccagatttccctctgccaccatatcgagctgctgctgcaggcggcggaatggtttcagcaggcaagccgccgccaataaatctgcgatcagaataaaacagaacataacgagctgcaaaaatcccgtcttctgcacaattttctcctgcaaaagcgccgaattttccgtggacgccatcagaagaaggactccctgcacgcctgccgtatttttcccatttccggctgccacatccgaatcgatcggcgctgcatccgtgctttttgcctgaatcggctgcgctacatagaaatactttttcttctggttcagatagctggaagtttccccgtcaaatgcctttaacacatccgatacaaccagcgttttccctctggaaagaccaaatgtgtctttcaaaaccttaaagctgtcgtccaccagcacgattcttccgttcatcagatccgccgttgtactaagttccgcatccagcgccggatttggatttcccgacagcagtacattgatataatcactgctgcgtatcttgtttgctaaaatcagacaccggttctgcgcttccgccatccgttcttccacatggctctggtaaaaataccccgatgtaaaacgaacctgtaccagaagcggaaccagcgtcagaatcagaaaggcgaggaacagagggattctcatcccgatcgtgtgctccatcgctttccatatctttcttttatgttctgctattcttctcatgttcctgtcctgaacgattacaattcacacgctctttgcgttgcttaacttactgacattggctgtgaactgtaaccccgaaatgctgctctgtaactgcgtttttcacaacaacgatccgatttcaagcttcttcgttgccgcaatcgccagcgctcccggtccgatatggcaggctacacttaaggacagcggctctacacggacttccgtctccgggaaaagttcccgaagctcggctgccagctcctgcgccatctcatcatcgtcggtatgcgctacatcaatatacgttttttctcccgtcatatcatcaaaccgattttccagatcgcgggtgatcgccgtgatcatcatggaacgcgcctgtttcatcgtccgcgccttcgcaaatgcgtccagcttctcgccctgtatcgtcagaaccggttttaaacggagaagtgttccgagcgctgctgccgctggtgtgattctaccgccctttttcagatattttaatgtgtcaaccgtgatataaatagttgaatccaaacctgtctcttccagctttttgcagatcgcctccgcgtccatgccggctgccgccatgtcaagcgcatcctgcaccgaacggcgctgggtcacggaaatcctgtgattatccgccacctgcacttttccgtcgaaatcatctgccagcatctttgccgtctggcaggagctcgaaagcccactggacatcggaatgtgcacaactgcatcgtattcctccaaaagtttttcccagagatttaagatcgtctccggggacggctgggatgtgctcacatcgtgatccccgctcagatgctcgtaaaattccttctgtgtcaaatttatatcttccagatactcggttccatcaatcataaacggcatcggcaggacatatacgcccatctctttcgcctgtgcctgtgtaattccgctgttgctgtctgtaacaaccgctaccttcatgcttgtttcctcctgttttccctgtgaatctgctgccatcctattttcctttccgcataacactttcttttctaaaaatgtctgccctggaacagcctccgagcggttcacatagatgattttattttatcctattttcttatgaaatggaagagagaagtaacgggattttcagttcagaaaattcctacctgtgaacaaaaaactgccacaaaacaagccccgaccatttctctgtttatgatcttttcttgctttatggcagttttcccgattcttattgacggttatatttatactttcctaatatattcgaaaattctccctatttcaccaacagcgactctcccgtcatctccttcggcttctcaagtcccatcagttcaatcagcgtcggcacaatatcgcagaggcgtccgccctcgcgcagcttgtacgccgggtcagcgccgaccaggacaaacggcacctgattggtcgtatgagcggtccacggctcgccggttgcctcatcgaccatcacctctgcattaccgtgatcggcgcagataaagagaacgcctccggctgccttgatggcttcaactgcacgtcctacgcaggcatcgacggtctcaatcgccttgatcgcagccgactccacgcccgtgtgacctaccatatccgggtttgcaaaattgatgatgatgacatcatatttgccggactcaatcgcctccaccagcttatcgcacacgatcggtgcgctcatctccggtttcaggtcgtaggtcggaacctccttcggagacggaaccagaatgcggtcctcgccctcgttcggctcttccacgccgccgttgaagaaaaatgttacgtgtgcatatttctcggtctcggcgatacgtgcctgcgtcatatggtgcgccgccaggaactctccaaacgtgttcttaatctcttccttcttgaacgcaatcagcttgttcccgatcgtctcatcgtaatcggtaaagcatacaaacgtcaggtcaagcttcttctctctcgcaaatccggtaaatccctcatcgcagaatgcgcgggtgatctctcttgcacggtccggacggaagttgaagaaaatgacggaatcgccatcctgaatcgtggcaaccggctttccgtccttctctacatagaacggtacgacgaactcatcgtttacctctttatcataggatgcctgaatgcctgcacacgcgctttctgccttctcgccctctgcctttgtcagcacatcataagctttctggacacgatcccagtttttatcacggtccatcgcatagtagcgtcccatcacggaagccacctcgccgatgccaagctgctgcatcttcttctctaattctgctacgaactccttgccggaggtcggcggtgtatcacgtccgtccagaaagcagtgcacatacacttttttaagtccctgacgttttgcgaactccagaagtccgaataaatgagtcagatggctgtgaacgccgccgtctgataccagtccgaacagatgcagggcggaatcatttttcttgcaggtgtctgcggctgccagaaattccggattttcaaagaaatcgccatcctcgattgatttcgtgatacgggtcagctcctggtatacgatacgtccggcgcccatatttaaatgaccaacctccgagttacccatctgtccgtccggcagaccgaccgccagaccgctggcattgccgcgcacaaacgggcactggctcatcagctgatccatgatcggtgtctttgcctcacacacggcattgtgctcacaggtatctctcatgccgtatccatcgagaatcattaatacggttggcttttttttcatctctttcttcttcctttccttccatgaaatgaaccgtttttctgaaacaaccggatgaaccaacaattttgattgtttcaggtcaaaaccttcaccttctttttttactggcaaaaaggggactgccacgcctcacacgtgcgacagcccccttttacccatctcttatttataatttacaatctttccaaaatctgcctttaaggatgcgccgcctaccagaccgccatcgatatccggctgtgcaaacagctccggagccgatgctgcggatacggaaccgccgtactgaatgcggatcgcctctgcggtcgcctcatcgtacacttccttgatgcacgcacggatcgcgccgcacacttcctcagcctgctcggtggtcgctaccttgccggtaccgatcgcccagattggctcgtatgcgatcacagctgtctttgcctgctctgcggtcacattctggaatgcgatcttgatctgctggcggatccagtcaagcgtgatgccctgctctctctgggtcagagtctcgccgcagcaaatgatcggggtcagaccgtgctcaaatgctttcagtaccttcttattgaccgtctcatcggtctctgcaaagtattctctgcgctcggaatgtccgataatcacgtatttaacgcctgcatcggtcagcatattcggggaaatctcgccggtgtaagcacctttctcctcgaaatacatattttcagcgccgactgcgatgttggttccctcgcacgcttttacaaccgggataatatcaatcgccggtacacagaatacaacgtctacatcttccgaaacaacgagcgacttcagaagctctaccagagctactgcctccgacggcgtcatgttcattttccagttgcctgctacgatctttcttctagccatgactattctattcctcttttctgtttgtttatttgttactgttcacgcatacgtgcccagtaacggaatttgccgtggcttcgcatttaaatacggcaaattcctgctgccaccacgttttcttacggcactttcggttccaaaagtgcctacctgtaaacagtaacatttatttattattcgctgccgctacgcccggaagctcctttccctctaagaattccagggaagcgccgccgccggtagaaatatgggtcatcttgtcgccaaatccaagctggttgaccgctgctgcagaatcgccgccaccgatgatcgtggtcgcttcggtgtctgccagtgcttttgcaactgcgattgtaccctgtgcaagagtcgggttctcaaatacacccatcggtccgttccatacaactgtcttagcagattttacggtgtctgcatacagctttgcagtttccggtcctatgtcaagtcccatcgtgtcagccgggatagcgtcaaccgatacattctgtacctcgatcggtgcatcgatcggatccgggaaggatgctgctacagctgcatcaaccggaagaagcagtttcttgccaagcttcgctgccttctctaccatctcacggcaataatctaactttgtatcatcgactaaggatttaccaatctccttgccctgtgcttttaagaaggtaaatgccatgccgccgccgatgatcagcgtgtcgcacttctccagcaggttggagataacgtttaatttatcggctaccttcgcgccgcctaaaatggcaacgaacgggcggaccgggttatctactgcatttccaaggaaatcgatctctttctgcatcaggtaaccaactactgcggtgtccacatactgggtcacgcctacgtttgagcaatgtgcgcggtgtgcagtaccaaatgcatcgtccacatagacatcacacagggatgccagatccttgctgaacgcctcaccgttcttggtttcctcggcacggtaacgggtgttctcaagcagaacaacctcgccatccttcatcgcctcaacggctgcctttgcgttcggtccaaccacttccggatcggctgcaaatttcacttcctgtcccagaagttcagacagacgaacggctaccggtgccagagacagctccggcttcggctctcccttcggtttgccgaggtgagagcagagaattacctttccaccgtccgcaatcagttttttgatcgtcggaagcgctgccaccagacggttttcatcggtgatctttccttcttttaacggtacgttgaaatcacagcgtaccagaacgcgtttgccctttacattgatatcatccacggattttttattcagcatatcctgtctcctttacattataaaagaataaaaaacaggtccggtcccgaccgaggaccggacccatcttgaatccttatgattttctatcgaatcgataaaattatgccagctctgcgaagtatttgattgtacgaaccatctggcttgtgtaggagttctcgttgtcataccaggaaacaacctgtacctgatataagtcatcaccgatcggagataccatagtctgtgtagaatcaaacagggaaccatagcggatacctacgatatcggaagatacgatctcatcctcgttgtagccgaaggactcagtctgagctgccttcatagcctcgttgatagcttccttagtaacgtcagctttcttaacaacggctgtcagaatggtagtggaaccagtcggaaccggaacacgctgtgcggaaccgatgagctttccgtttaattccggaataaccagaccgatcgcttttgcagcaccagtggagttcggaacgatgttgacagcgcctgctcttgctcttcttaaatcgccttttctgtgcggtccgtccagaatcatctgatcgcctgtgtaagcgtggatggtggacatgataccggactgaatcggagcataatcgtttaatgccttagccatcggagccaggcagttagttgtacaggatgctgcggagataatcttatcttccggtttcagtgtcttgtggtttacattgtatacgatagtcggaaggtcattgcctgccggtgcggagataacgactttcttagcacctgcatcgatatgagcctgtgcttttgccttggatgtatagaatccggtacactccagaactacgtctacaccaatctcgccccacggaagttcagcagcgtttgcctttgcgtagatagtaatcttcttgccatctactacaatataatcttcgccagcttctaccgtatgtccatcgtatctgccctgagcagaatcatactttaacaggtgagctaacattttcggatttgtcagatcgttgatagctacgacttcgtaaccctcagcgccaaacatctgtctgaaagccagacgaccaatacgaccaaaaccattaattgcaacttttactgccatgatctcattcctcctagaaattcatcttcatgattgttaaatattaatcaaccctgcttgtattgtacccaacttttcctaaaatagcaagtggttttttgtaaattttacagcaaatattcagtattttctctcttgctgcgcacaacttcgacggattgtcataccttaaatggaattttgtgctgacagccttaattttgcataattttttaaccaaatgctctaattcgaactattttcattttaatcgatctcttcttgtttgtgaacctcacatggctaaagtcacgtgcttctcggccgttttaaacggcaagactaaatatcggcggatacgccagtatcttagaattcgtgcggatacgcactttttccacaccggatacggctggtttccacattacaggtagtccgctgtatatctgcctgcgtttatgctgcttttaagttgtttacttctacataaagctttcttaaatctgcataaacacaggaggttctacgcttcactacagggacttttgcctccagtgaagacctttccgtttccggcaagggttttaaaagttcccgtataaaatatctcgctccaatattataggctgctgacaggtcgcagttatactgctttcctgtctggaagatacataggctatggttctccggatttcttactaccgctccacttccgtcacaggccagcctgctggtgttccgggcactaactctggacacacgaatcctgttccgatgtgcctgatgttcacatagcttctgaatatccctctttctccataaatgaagtttttgcttcttttttccggatatttttccttgcatttccagatactcaaaaacaattacacctgcctgatattctacggcatatttcgtgatttccgcagctattttacgggacagttccatattcagcctttttgcataatcccatcggctttgaacctgtctggaggaatgttctctctgaaaacggcggattctgccaagcacatgatacaaatggtctttatcactggggaaatttataaatttacgtcccagaatagtgccatctgcacgcatgatactacaaactgcatccgtattgattcctaaatcaacgctgcatatcacctgctgttttacagctgttttcgataaggttacttcctctgtgtatgaaaatcgaaggaaatatttatgatgtttcctttccaaagttggtgcggatgcctttttcccgctccactttttccgaagatattccatatcggtatgaagtaattttacctgaaaccacttccactcacgcccatcaaatagctttaaatgtgccacatcttctcccggttctgcttctctatacatgacatcccgatagaataccggcatcgcatgattctcacagaccagcttcggtttccccctcagttctc

SEQ ID NO: 11034 - DNA, 63028 bp, Unknown
  gut microbiota DNA sequence
gaccatttctgcgactcactacctttcatgaaataacacctacctttataaatttagtccaaaagaaaccaacgatatcagccatgaaactccaaaataaaaaacaaatgacataattccagctgtattaaaaaaaactactaatctacttttttcagaaataattttttctaataatttctttttacaataatacaaatgtaaaagtatattcttcttactacagagcaatagcaggattaaaagcattaaaaagagtcctgcatttaataacatggttaaaaccatattcattgaaaaggaaaacaatttattttcccacaagaaaatccccagattatgaataacatgaaaagtaatagcataccataaatttcctgtgaggcagaccaaaacacctgaaaaaaaaccaatcaaaagaaatattaataataacccctgaccatgcattatagcaaacagtatagttgttgctaaaattgcaaatccctccccataagacttcagcttagaccatagaattccccgaaaaatccattcctctaccagaggtcccagtattacacctgtgaaaatatctaaaacactgtgtaaacttttatcattcatcattacgatgtcttgaaatacttttgcatacaaaaacaaaaagaatgcacaaaaaacatgggataaaaatattacaaatgccgttaataaacctttttccaatacggataattcatatttgtttttagaataacatgtatccagcaaagacaaccttccccattttttcattcccacccatacgataccagcccaaaatatataaaaagccatattttcagcaaaaatcggcattattcgcataagtattagcgaacccaaatacgcaatcaataagatccatcctattttgccggcaattatttttaattcacatttcctttgttcgtccatcgtgcatatattctccatataaaaatgtcccataattatcctcctggttttaatttgctccttgcaacttttaagcaaaaattatactataacttattaaaaaactcttcacgtttctttaatgttcgaatagcaatcctgattagttgcagatattttgcttctaaatttctctttccagttaagcggttacagagcatgtggcatattgaaagcaaaatgtgttgttttgtctcagttaatgtaggtgcaaaatacaatgcttttttcaggaattgtaacttttcttttctttttaaataaattgacaaactttcttttaatcgctcatcaatattttctatagctcccttatccagttggaaaagtatcattatcttttccgatgtgcaaaggaaagtcatgactttagcacttttatgaaatctatagcgtagttttgtgcaatttttcaaatttgctcatttatagtattagaaaatatctacatttttcatcgacagtcaacataccggtttttatctctggtgtcaaatctaatatggtctctttattttcattttctacaataacatggatacttccttttgagacatcgccatccaacttaaaagtatattaacgactttcgttaaattttattaccttttttacatatccgctacaagatgaaaaagaaacttcgcatttatttttccctctgagtgaaacaacaaataataaggctcgttttgcgttcaaaatcatatatccgttgacccataaaaaataaaacaaaactaacattgaaataaatacaatcgctaatttcatgaattcactcatgccaacacctcacaaaattcaatttttcgcatccaaccactgtctacctaattgcaccccagcctgagtataagtttctaatatgtcctgcttcttttcttcaatcagttccggttcagcatcaaacagcacctcatagatagccagagcgttcttaaagtgtgtggtagcttgcagcacatcgccgattgacagacagatattgcccatagcttcttgtacaacggcataatcaccggacacatcagagttagattctttgatgacacgagacagcctttgtaatgcagataacccgaggtacggctcacccatatccgtcagcagtaccgcataattggtgatttgcggaatactgtcatgataaggcgccaagccgtattgctcaagcaagtgaatacccgtttccatatgctgctttgccagttccaacttactggtctgcttatacagaccgccaaggtttgcatggagattcgctgcaagaagggcgttctctgcggtcacttcggagatcagcgtcacagcttctttttccagcttgattgccttttccggtttcttctcattagcggcacggaagtccagaagcaaagcacggtcagaaacagaaccaatggtattgtctttcagcatagaagccagttctgtcaaaatcaattccattccagattcatagccatacttctgcatatacggaaaggaatcttccaaaaaccggagataggatgcagtatcgtcattttcaatcgaagtcacgatattattgaccgtctggaacaactgtttgtaataggaaacttcttcgccatgccgtagacaaagttcctgcaagctgttgagcagggtgtggcagttccggacagaaggcttggtttctgtaattgctacttcctgaatcatcggatgcaaggcaatcgaatgacaggactttgtctgtatgaatcctttttccaccagatcgttgatggtattcatattccgaagcatcaaccagcctgcaaacacacgggaactgataccggttgtcggtacaaacgccatgctccgcataatatcctgttcatcaccggcaagctgatacaaggaaaacaatgtatggatatggtcatagtaagttgccttgcggctctgaccgtccttggtgatgccgattttatcatcagcatccaaggatgttttttcttctttcagcttttccagcaaatccatcggctccagaatacccgtttcaagcagtcgagctgccagttctaccgccaacgtgtgactgtgaaccgtatcaatgatttgttccaatacactctggtatttttctgcgtccgagaaaaagcaaccggcaatggataataacgcctgcttgcctgcaatttcggttacttccatggaatcgtagttatcaaatctgctgcgggtcgtgaacaacatacggcagcgatatttcatcacaacagaaagagtgctgtcctgagaagccgtagtattaaaattatctacaataaacagcgtatcttctttcaatgtacgcaggaagcgattgtgtttgcggaagcgttcctgctcgctgtcatccggaaggtcatcagcaaaatccatatccgctatatcctgcatcagattaccggtataggtcagatacagaacattggtgtattccttgcggtgctgctttgcataggcttttgccagttcgctcttaccgataccggcgatgccatgaagaaatacctttccatgctccaataacaattcgtgaagcatttccagttctttttcacgtccgcagaaatgtcggcaaggctttggtgctccttcatcagcaatgaaatcactgagaattggagaaagctttccgtcagcaaggagattctttacctttgggtcacgcttgataaactcacgctccatgccgaagcaaagaacatccgctataaacgatgcttcatcctctcggctatcacaaggatagtgccgggagcattctttttttactcgttccgaaatggtatcatcctgcattagcagtcggtatacttcctgtgcagccatagaactatcatacattgaaagcagtacattgttttccaaatctgctgccagtttttcacgattgccatctctggaataaaactgcgttattttcggactgatttttgcctgcccggtgaaccagcggcagaccaatgccatatcaaatgtaatcgtttcctttgtttgggtaaacaaggagctaaaaacatcttctaacaatgcagtttggtttgtatcgtaatcgtcgctgataaagcgtcgaacaatggtcatgactgaactgaaatcacatctttccataaacagccctcccttcgaaaagtagtcaatttatggtcaattggcactcaatgtgcctttgacagtttcttgatagaatgatatcacgaaagaagttccgaatatcttaccttttattatagcatcaattcctattttttgaagtagcaaagcggctgcagtaatgtggttatagcggacaacttctctctcataaactgaaataccgagggaggtgcgtggtatcgcaagaaagagtgctccaatcaatgtaattgtccattatcctaaaacagaacaggggaaacgtgaattggcagagcgagtagccggtgtccacgcagatatggtcaatcagtatatcaaaaaattaaattgtccatccgatcaaaaggcggagttgctgggtgcggttatcgcatccgcaaaaaaggaagcaggtgagcaaaccgattaaggccccctcacctgcttttcttatgcttttattttccctttgaaatacttgttccaggaattgatgttcattcgcttttgatgatcttcccatgctcgaagcagattaggtgaaattcccatcagccgagcaaacggtttcttttttagtcccaaactttcacgatattctcgtatcatctttccttgtcctttatataagaagcgattgtaatcatccagcaggtcatccaccggtactccatatagctctgccaacttgtccacaatctcctttggatagtagtcaacatatccgacttcaaaatctatgtaatgtccacggctgataccgatcagctctgcaacttccttttgcatcaggcccatgtgatgacggcaccaacggagcctgtccggtacattgggaatatcttcgtagttctgatactgctgattgaacagctgtgcttccaagatcttgcgaggggcgatcggtcggaaactatggatatacataggtgcataccttacgcagccgtccaaagcagagcaaaggatatacatattctcggatacctgtgccaaaatacgccatctcggttcttttcggctctggggatactggtttggaaccataaacgcatccgtgagaggatagcattctcgatacatttcgccgcatatgtcgccaaccgcgatccccgctccggatgaaacgtattgaccgctttaatgagcccgatggtgccgatcgacaggagatcttccatttcataatctgtaccctgatattttctggtcacatgcgccaccagccgtaaatttcgctctatcagagtattgcgtgcctcatggtctccctctttcatgcgttccagacaggaccgttcctctccaggtgtcaaaggctttggaaatgtatgcaaagaaaaagccaccctgaagcttacttactgatagtttatgcttcggtggcttttccagtgcaccacttgcttttccgattttagaaagggcgctaaaaatcatgccatccagccggttataaatccgctgcgtctaaaaatattgatacctccttctcttcgccaccaaaaagataactgacaccgtcacggacatatattccgccacgataattgcaccccagattccgttcaggcccaggagcagtggcagaatgataaccgatgcactttcaaacacaagagtacgcaaaaaagctatcagcgccgaggtcagtccatctcccagcgccgtaaaaaaggcggaactgaaaatggagaaaccgcagaataagaacgaaaccgcataaatggaatacgcatgtaccgtcatgtccagaagcccggcatcatatcctacgaaaatagctgccaacggtgccgccatcacctcggacagcagcagcatgctcagagacgctgccgcgatcagaaccacactgcgctttagcaggttatttaactcctttttatttcctgcgccgtagtgatagctgataaccggagctacgccggtcgcataaccgatgaaaatcgcaaggaaaataaagtccacatacatgatggttccgtaagctgcgactccgttttctcccgcgtagcgcatcagctgcgcgttatacagcatgccgacaatggacatggaaatactgctcatcaattccgatacaccgttggtgcaggcacgtctgagcgctcctccatcccactttggtctgcgaaggcggaggctgctgctgttcttccgcaggaaataaaccagcggtatcgttccgcctatgatctgtcccatcgcagtcgccatcgccgctccggcaattccccaatggaacacccccatgaacagaacatctcccgtcatattgagcacacccgaaatgatcgttacaatcagccccagcttcggcttctccgccgtcacggaaaggctgccaaacgcatactgcagcattaaaaacggaagcgccaccagaatgatccgtccataccggatgcagtccgccagcatccctcccttagcgccaagaaaggcagcgatctgcggtaaaaacagaatactgataaccgcaattaccagaccagaaacaacggtcgcagcgatcagaagggaaaaaatctcctgggccttctcacgcctgccctcgcccataatccgggcaatcagggcacttccacccgtgccgaacataaatcccatggcacctacgaccatcagaaacggcataatgaaattgaccgccgcaaacggcgtttttcctacaaaattcgatacaaaatatccatctaccactccgtaaatggaggtaaaaatcatcattaaaatagatggaattgtaaaccggatcaatctcccaaaaccgaaatgatccgataactgaatcctctgttccataacattctcctgtcaaatttttaagtaattctgccattatatcacgattcgcatcttcgatgcttaccgctgctgacgcagctatcgtgatcgccattcgccgttcgccataaatctgcaagcagctttctggctcacttgcgctcattatatcataattcttcacatcacggaacatcacctgcacctcttctcccttgagccaaataaatattattcctacggttgattttttcggaattattctatataatgaaaataaatttacaatttaacgcgttaaacctcaacgcattaaattcaaaaaagcacgactttcacattagggaggaactatgttatgagcgaagacaaaaaattaaacatgcctcagtcgcttctgcttctgctcctgatcatcggagcggttgcagtctgcatccggctgaaaacgggcggaccgatgattggactatttatgagctggatcatcatctatctgttttgtaaggtattacgcataaattatgagcatgttgtaaacggcgcttacgacgcgatccgggttgtcgttcctaccctgtgcctgctcatggcaatcggcgtcatgatcggtacctggctgcaaagcggcacgattgcaaccatcattgtcggcggtttaaaactgatcaacccgacctggctgctgcctctgaccctgattttctgtgccgtattaagccttgtgaccggaacctcctacggttccgtcggcagtgccggtgttgccatgatggcaatcggcaacgcgatgggcatccatcctggcatggtggcaggtgctgtcatctgcggcgcgatgttcggtgacaaattaagcccgctttccgacacaaccaacctggctccagcggttgctggctctaaattaaacgaccacgtgcgttccatgctctggaccacgcttccgacctttgtcatcagcctggttctctttgtaattcttggcatcagccagacttcagggaactatgaaactggaaatcttctgacatacatcgatgccctgcaaggtgagtttaaacttggcttcatcactctgctgccagccatcgcaatcattattctgcttttatgcaaagtaaacgcggttgtctcccttggtctttccgccatctgcgccggagctgtctctttcttctatcagggcgcaactttgcagagtatcatccgtgttgcttacaacggatacagtaccagcattgaggaaggtattttacagaccatcttaaaccgcggcggtatgagcagcatgcttcagtatgtggcaatcatctgctttgcagttggtatgggcggtatgctggatcgccttggcgttctcggcaatctcttaaacgccatcgtaaatcacatcaacagcgatggcagcctgattgcagcaagccttttagtcggctatgtaaccagcttaatcagctgttcccagccgatgtcccacgtcctgactggaaatatgatgaaaccgctgttcaaatccagaaaaatcgcaccggaaatcctttcccgtacccttgaggacgcaggtactttatccggtccgatgattccgtggcacggttactgtgtatacatgtctggaaccctcggcgttgcctggtccgtattcttcccgtacctgttcttactgtacttaactcctttgttcagtattttctatggatttacgggaatctccatccggcatacagacgacgctcaaaattaaacctttcacttgatgaaaacaaaatgatcgaaacatatatgcagcctttgacacggtgtttacctgtgcaaaggctgaacacatctaatttgcccgaactattttcatgatttcgcgcaaaatatattacatatgaatttaggagatgaatatttatgatggaaacaaagcttgtacttctcggaaccggcaccccgaatgcctgcccgaatgccagcggtccttcttccgcagttgtcgtaggcgaccgcgcttatcttgtagattttggtcctggcgttgtccgtcaggcggcgaaagcataccaacagggaattgatgccctgcgcccggaccggctgatgatcgcattctgcacacatctgcacaccgaccacacggccggctatccggatctcatttttaccccgtgggtgctggaacgcccgaagccgctgaaagtattcggtccaaaaggcatccagaacatgaccgaacatattttaaaagcatatgagacggacatcgacttccgtatccacggctttgaaaaagccaacgaaaatggctacaaagtcgaaactaccgatatccagcctagtatcatttatcaggatgaccgcgtgacggttgaggcatttccagtcagccacggtacgcttgaaagctacggatttaagtttacaacaccggataaggtgatcgtgatcagcggtgacacggctccgcttgagatcgtggcgcagaaagcggaaggctgcgatattctcctccatgaggtcgagtacaccgccggactctccgccagagagccaaaatggcagaaataccaccaggaagttcacactctcagcgttgatctggcaaagattgccgccaaagcgcacccgcggcttctggttacctaccaccgtatctatcacatggaaatccaggacaacacccgcgatgtcgaggctgagatggcgcgcagaaacaccgccattttgcaggaaatccgtgatgccggatatgaaggtgccgttgtaaatggacaggatttagatgtattctaagaaaaatttaaggggatgcgcattaagtcagtcgctgccacccctgttctcagatcttcaagccttatatataaaaagcagatattctcacacaatggagaatatctgccatccagtctgactcattctacggtacggaaaacatagatctgaagtttcaaacgtgccaatttgtgaggatatattagaacaatacttctccgataatctccaccgcatcgctgatgcagtccggacaggcacgcagcacatttcctgtttccacacccttcaaatccctacagaccacgctctggttcttctcaaggaaacgcgcgatgcactctctggcatccttataagaaaccgccttcgaattcgccagctccagatccccggtactatccttcagccccgccagcacagccgccgccgaaatggccccgcaggtaccattcatgccgcccatgccaagaccaagcccctccgtcaccttaaacagcgccaccttgtccaaatccaccttatccgcaaacgcacacgccaccgactgggcacaattataccccattgcatgaaactgagccgcctgctgctgacgcgctgaaatctcctcttttgtcatactgatacctcctgaaattttcttaatctgctaaattttttatattgtactatttatgccaattataacatacatttccactttttaaacaccccaaaaagcatacaacatacagcgccagaagccaaatgccctccgttgcatttgcaggagtcttggtaactcttggctcgcagagatttgtgttagagttcaaaatacacctgtctgagcgaagcgagtttgtattttggactctgcttttaacaaatctatgcaagcctagtgttaccggctccgaaaccgcaacggagggcatttggcttctggcgcgtcaccttgccatttttatgcatttctatatatttctatttcatcagcgtaaccataaccgccttctgggcatgcaaccggttttccgcctcttcaaagatctctgacgcatgttcttcaaagatcttctcggtaatctcctgtccacggtaagccggcagacagtgcattaccatcgcccccggttttgccgcagccatcagttcatcattgatctgatatccctggaatgcctgctggcggatcttcttctcttcttcctgacccatggaagtccatgtatctgtgatgacaacgtctgcattttccactgccttgatcggatcatttaccagtgtaaatgcgtcattgccagctgcgaaatccagcacttccttcgccggacggtaattatccggagttgcgatagatacctgcatatccgatttcagaccgcctacgatcagggagttcgccatgttgttgccgtcgccgatgtaacacatcttgagccctttcagtacgccgtatttctcacggatcgtcatcaggtcagccagtacctggcacggatggcagaaatcagtcagaccgttgatgatcgggatagaaccgtattttgccagatcctccacttctttctgctcataggtacggatcatgatgccgtccagataacgggacagtacgcgtgcggtatcctgtaccggctcaccgcgtccgatctgtaagtcgcgggaggaaaggaacagtgcctgtccgccgagctggaacatacctgtctcaaaggaaactctggtacgggtggatgacttctggaaaatcaggccgatagatttgccctccagaagacgatgtgaaatgtgatgttttcgttcatattttaactgatctgccagatccaggatcgaggtaatctcctccggtgtgcagtctaacagctttaataaatgcttcatgtctaaaatacctccctcatagcagcgattgcctcgtccatctcctctttcgtgatgacaagtggcggaagcagacggatcgcctctgtaccggctgtcaggaccaggacgcctttttccatcaactgactgaccatcgcagctctctcatctttgtccactacgatgcctaacatcaatcccatgccgcgaacagtctttacctttggagaaccgatcgctaaaatctcctttttcaggtactcgcccttttcctgaaccgatttcaggaattccggcttatttacgatatctaatacggtattggcagccgcacagcagagcggattgccgccgaaggttgtaccgtgcgtaccggcgcccagtacatcctggcatttcttatccgccatgacagcaccgatcggaacaccgccgccgagtcccttggccatactgatgatgttcggctgaacgccgtactgctcatagcagaacaggcttccggtacgtccgatgcccgtctgaacctcgtcaatcagaagcaggatgtccttctccttgcagaactcggcagttgcctgtacaaattccttatcaagcggaaggacgccgccctcgccctgaatcatctccatcatgacagcgcaggtcgtaccatcgatcttgcgcttcatgtcttcgatatcattggctgctgcataatcaaatccttccgtaaatgggaagaaatactgatgaaacttgtcctgtccggttgcctttaatgtcgtcacggtacgtccgtggaaggactgtttcagcgtgataatcttatttcttccctcgccgtatttgtcaaaggaatactttcttgccagcttgatcatgccctcgttggcttccgcaccggagtttgcaaaaaagatttttcccattccggctgcatcgaccaatttctttgctgcctgcaccataggctcggtgtaatacaggttgcaggcgtgcatcagcttatgtgcctgctccgatatcgcagtcgtcagcgcatcgttgtcatggccaagactgttgacaccgatgccggaggtcagatcaatgtatttctttccctccgtatcccacagcgtcgcgccttttccgtgatccagcgcaatcggaaagcggccgtatgtatgcatgatatatgtttcttcgccctgcttgatttcttcaaatgtcataaaaaacctcctaacgcccacatctgcccgcaaagcttccagcatccgtcctgcatttcagctaaaacagcccggattcgtgcagaatctagttcatctgctgtttacgagaacatggttcctacaccgtcatcgctcaaaagctcgaccagaatcgagtgcggcacacgaccatcctggatattggcacgttctacgccctggcgcactgcctcaacgcagcaatctaccttcggaatcatgccgccggagatcacgccctctttgatgagtgccggaacctcggaaactttcagtctcggaatcaatgtcgaatcgtctttcggatcgcgcatcagaccgcatacatccgtcagaagaatcagttttttcgctttcagtgccaccgccagcttctccgctgccgtatctgcattgatgttatagtttgtctcctcgtccatgcctgctgccacggaggaaacaaccgggataaagccctcatttaaaacatcgagaacgactttctcattgacttctttaatatctcccacatagccgtattccgttccatccggatcgactaactggatcgccttgaagagtccgccgtccatgccgcccagaccaacggcatgtccgcctgctttctcaaacagggaaacaaggtttttgttaaccttgccgcagagaatcatctggacaatatccatcgtctcgcggtctgtgtagcgcagacctttgacaaatttagactcttttccggtttttttgagcatctccgaaatctccggaccgcctccgtgtaccagcacgaccttgatgcctaccagatttaaaaggacgatatcctcaatcaccgcctgctttaaatcttcattaatcatggcgtttccgccgtattttacaacgataattttacctgcatattcctgaatataaggcagtgcctctaccaggacttctgcgctcatttttgatcctgttttcatcacgtccgataatctccattaatcttcacataatcataggtcaaatcgcatccccagcaggtagcgcttccgctgccttcctgaagcgttacattgatctccacttcatcctggcttaagattttctttgccagatcttcatcaaaatcaagtcctctgccgtcctcacagaccgcaatgctgccctctttggaagcaaactcgactaacactttctccgtgttaaactcagctccggaatagcccatcgcgcagagaacgcgtccccagttcgcatcggaaccgaacattgctgctttggtcagggaagaaccggcgatggattttgccagtacctcggctgtctcctcgtccttcgctcccttcacggtacaggtcatcagcttgcttgcgccctcgccgtctgccgcaatcttacgagccagatcctgcataaccgtctgcaatgcctcgcggaatgcctcgtatgccggatcttctgcagtaatctccgcattgccagccataccatttgccagaacggtacacatatcgttggtggaagtatcgccgtcaacagtcacacggttgaaggtacgttttacattgaataacagcgccttgcggatcatctcgctgctgactgcacaatcggttgtgatgaagcacagcatcgttcccatattcgggtgaatcatgccggaacccttacagataccgccgatgtggcaggttgttccatctacatcaaattcaacagcgatcgtcttcacttttgtatcggtcgtcatgatcgcttctgcagctaccagggagttgtcatatttcatctccatctcgcctgcatgagcctcgatcgcctcaaccggaagcgtctgaccgatgacgccggtcgatgctacgattacattttcctccgaaacgcccagcgctcgcgcgcctgcctttgcctgtcttcttgcattctccatgccaaacggagcgcacgcgttcgcatttccggaattgacaataaccgcctgtgcctttccgtcggccagatgttcctttgtcagtaaaatcggtgatgccttgacgcggttggtcgtataaaccgccgatgcgttgcagacacagtccgaaaggatcatcgccagatccttttttgtatgagatttacggattccacagcgcatcgcgcccgctttaaatccttttgcagcacaaacaccgccttcgattatcttcatatgacattcctcctgtcatttttaatgtactctcggaatctttctgtgcttgattttgtgagatgtttttttgtcagttgtgcccaaatttctgaggcgtacgcggcgcgtacgttgatgaaattcgggtgcggctggcggaaaatcagccacaaaagcaagtgcagaaagactccgagagtacatttttatataacttcgtgtctatagtcccccgcagctaatttatggttttatctctcaacccctctatagtgccagtccagctgtctcctcaaatccaagcatcaggttcatgttctgaacggctgcgcctgaagcaccctttccaagattatcaaagagcgccgtcaccatggtctgttccccgtgaccattgacaatcagctccagactgtctcggcctgccatatctgccgccgcgatcataccgtcatatccaaacggatgtaccttaatgagcttctgtccgtcataccagccagccagcttctcgtagatatcttccgcggtcggcttccccggaagcaggcggttctgaagctgaatcgtgactgccattcctttatagtagtcatccacgatcggactgaataccggcgggaagtccagtccgcagattttctgcatttccggcagatgtttatgtttcagagtcaggccatagatacggggtgcaaaataactctgcggcttctctggggattcatactcggcaatcatctttttgccgccgcccgaatagccagtcagcgaaaataccgtcatcggataatccttcggaatcacgccctgtgcaaccagcggatacgttgaagtgataaatccggtcgcatgacagcctggattcgctacgcggttcgatttctgaattgcctcgcgatgtgcattcgaaagctctgccataccatacgtccatccggctgccgtccggtgtgcggtagaggcatcgatgatacgtgccttggaaccttctgccagcgcaaccgcatcgatcgccgccatatccggcagacacaagaatacaatatctgctgcgtgaatcagtttccgccgttcttcactgtctttccgcttttcttcatcaatcagaagcagttcgatatcctctctcccggccagacgatcataaatctgcagtccggttgttccttcttttccgtctatataaatcttcggtttcgccattgttcgtcccccgtttcctatccgtctttcttatgtcacatttccaacgcccgtcattgcttacgcagccatcaccatccgcatccggcgctgaccagaatgcactaaaccgtttcgtgctcgctcacaaacttctcaatcaccaaaatctgacgggttacttcctccggagccggtccaccaatcaccttacgtccacgtacacaggtctttaagtctatcgcttcatatacgtcattctcaaaggcatccgaatgcgtcttgtattcttccagagtcagatcggctaaagacttgtcctcacgtacacactgtgcaaccagctgtccgactgtcttgtatgcatcacggaacggcattcccttcttggtcaggtaatctgcacagtccgttgcattgataaagcccttcagagcggctttcttcatattgtctttcagaatctgcatcgtagagaacatcggtgtcagcacacgcaggcactgttttacggtgtcaatcgcatcaaagacagcctctttgtcttcctgcatatctttgttgtatgccagcggaatgccctttaacattgtaagaagagtaaataaatcgccgtagacacgtcctgtcttgccgcggaccagctcgcatacatccggatttttcttctggggcataatggaagaaccggtggagaatgcatcatccagctctacaaacttgaactcccaggagcaccaggaaataatttcctcagagaaacgggacagatgcatcatcaggatggataaagcggctgtcagctccacgcagtaatcgcggtcagaaacaccatccagggagttgttggtcactctggcaaaaccaagctgctggcgtacaaaatcacggtcaatcggatatgtggtggaagccagtgcgcctgagccgagcggcatatcatccatgccctctaagcagttttccagacggatcacatcgcggcgcatcatattggcgtatgccatcatataatgtccaaatgtaaccggctgtgcccgctgcaggtgcgtataccccggcataacagtctccagattatttttcgcgctctcacagagtgcttccatgaaatcgatgatttctttcttgattgccacgatctctttcttcacgtaaagacgcatatccagtgcaacctgatcatttctggatctcgccgtatgaagacgttttccggcatcgccgatgcgctcggtcagaatctgctctacattcatatgaatatcctcataatcctgtgagaaatgaatcttgcccgcctcgatatccgctaagatacctttcagtccttcgataatcttgtctgattcttccttcgcaatgatgccctgcttgcccagcatagccgcatgggccatggagcctgtgatatcttccttataaagacgacagtcaaaggaaatcgatgagttaaaatcattcacctccagatccgtctcttttccgaatcgtcctgcccataactttgccataagtgtaaactcctttttattctctgatttagaaccaatgcgaccattggaaccggcagataccggaaaaccaatggtcaccatcggctgcgggcttgtcgcctgcagattatttattattttcctaaattactctacgtctggaaaatgctcgccggtctttgctgccagaacttcgtcgttcagggcgcgaaccttgatcggaagtccaaacaggttgatgaatccagcggaatctgcctgatcgtagcagtcatcctcatcgaaggtagccatacctgcggaatacaggctgtacggggatgtaacagatgccggaataatgttgcccttgtagagtttcagttttacatcaccggttacggtctcctgtgtggaatcaacaaatgcgctcatcgccttgcgaagcggtgtgtaccactgaccgttgtatactaactcagcgaacttgagagccagctgctgtttgtagtgctgtgtctctttgtccagagtgatttcttccagtttctcatgtgccttgtaaagaatagctccgccaggagtctcataaacaccgcggctcttcatgccaaccagacggttctctacgatatccagcagaccacagccattctcaccgcctaatttgttcagagtctcgattaccttctctgcatccatctcctcgccatttacactggtcggaacacccttctcgaagtggatggttacataagcagctttatccggtgcattctccggagatacgcccaactcaaggaatccaggtttgttgatcggagcctcgtttgccggatcctccagatccagaccctcatgggacagatgccacaggttcttatccttggagtagttggtctctttcgtaatctttaacggaatgttgtgagcctctgcgtactcgatctctttttcacgggaattcagttcccagaaacgccacggagcgataacatccatctgcggagcaaatgccttgatagccagttcgaaacgaacctgatcgtttcctttaccggtacagccgtggcagatagcgtctgcgccctctttcttcgcaatttcaacgattctcttagcgataatcggacgagcgaaggaagtacctaacaggtaatgctcataagtagcgccagccttcatggtcgggatgatgtactcatctacgaactctttcttcagatcctcgatgtacagcttggaagcacctgtctttaatgccttctcttccagaccatccagctccgcaccctgacctacgtcagcggaaactgcgataacctcacagccatagttttctttcagccacgggattaaaaccgatgtgtccagaccgcctgaatatgcaagaacaattttattatatttcttagccatttttcatttcctccaatcatttgcctgcgtgatgcttttttctttgtccatccagtcaactaagaccggcagatttatatgcctcacgtgaaattacccagattatacctccttgatcctaattatgcaatactttttttgcatttttatgaataatttttgtataaaaacgtgttttatgcatttttcatgtgttttatgcataaaaataacatttacggacttcatttatatgctatgctacatgataggtataagtattataaataagtggtactgtgtgtgtacagtaacatggtactgcccttcctgcattctaaaatatgcatcttgatttaaaatgtcaaaattgctattataatgtaagaataaaatgaaagcattcgaaaggataaaaaccatgacgatcaatgaaaaagcactcgaacttcatgaaaaatggaacggcaagctcgataccgtctccaaagtacaggtaaaaaccagagaggatctggctctggcatacacaccgggcgttgcagaaccatgtaaggtaattgcaaaagatccggaagctgcataccgctacaccatcaagtccaacactgtagccgttgtctccgacggaagcgccgttctgggacttggcaatatcggaccgttagcagctatgccggttatggaaggaaaagccgttctgtttaaagagttcggcggcatcaatgcattcccgatctgcctcgacacacaggacaccgaggagatcatcgagacagttgtccgcattgccccggcattcggcggtatcaacctggaggacatctccgcaccgcgctgctttgagatcgaggaacgtttaaagaaactgttaaacattccggttttccacgatgatcagcacggaaccgccatcgtcgtactggcaggtatcatcaacgccctgaaagtaaccggcaagaagaaggaagactgccgagttgttgtcaacggcgccggaagcgcaggcgttgccatcaccaaactgctcttaaactacggattcccgcatatcaccatgtgtgataagaccggtatgctctgcaagggcatggaagggcttaactggatgcaggaaaagatggtcgaagttaccaacttagagcacaagacgggcacacttgccgatgcattaaaaggcgctgacatcttcgtaggcgtgtctgctccgggcatcgtttcccaggagatggttgcttccatgaataaggattccattctcttcgcaatggcaaacccggttccggagatcatgccggatctggcaaaagctgctggtgcaagagtcgtaggaaccggacgttccgatttcccgaaccaggtcaacaatgttctcatcttcccaggcatcttccgcggcgctctggaaggacgtgcaaccgctatcaccgaagaaatgaaactggctgctgccaacgcaattgctgctctggttgatgacaacgaattgagcgacgagaacattcttccggcagcatttgatccgcgtgtagctgacgctgtttccaaggctgtgaaggaacacattaagaaataaacgtaacaattcaagcgattctcgcatttaccgtaagaaccgcacaaaatttacacagttacgaaataataataaaggagtttttccatgctggctgaaccgatgacactttacaaactgatgaatctctatatgctgcaccaggtcaattttccgctgaccaacgcgcagctctccaattttttcctggatcgtgagtacaccacgtatttcacactccagcaggctttgaacgagcttctggatgcaggtctggtaaaaaaggagacgatgcggaacagctcccgctatgagatcactaaggagggcgaggaaacgctggaatttttcggcaaaaacatctctcctgccatcgtcagcgacatggatgaatacctgaaacagaaccgcttccgcatgcgaaacgaggtaggactgatctccgatttctataaatcgaccaatcaggactacatcgttcactgcgaggtgcgggaaggaaaagccgttcttgtcaatctcgatatctccgttccggataaggagcaggcggaaatcatgtgcaatcactggaaggatcgaagccaagagatttatgcttatgtgatgaaatctttgatgagtgagcatggggtggagaaaaaataaagacgataaaaaatcgcatacgagacgaaaaagagagtcctccgcgtgattgcaaaatcacacggagaactctctttttctgtttagtttcaagcaaaaaacaaggtctgcgtctgacattttatgcctttttgcaaaccttgtcttttctttccatttatattactttttctagatctataacaacaccataaaaagctctattactctaccgtaacactcttcgccaggtttctaggcttatctacatccagtcccttcgatacacttacataatatcccagcagctgcagcggcacaaccgctaagctcggtgtgaagtgctcgtcagtcttcggtatatagactgcgaaatcgacggtgtcttcaatattgtagttgcctgcagttgtgagtcccatgaggtaggcgccgcggcattttacttctaccatgttgctgatcatcttctcatacagggcttcctgggtcaggatgctgactacgaggataccatcctcaatcaggctgatggttccgtgttttaattctccggctgcatacgcttcggaatggatgtagctgatctcttttaatttcaggctgccttccatgctgactgcgtagtcgatgccgcggccgatgaagaacacgtcttttgcattggcatatttcgctgcgaaccactggatgcgttctttgtcatcttcgagcagcttcgcgatctgatccggcagttcctgcagggctgcaaggagttcttcatatttttcttctgtgatcgtaccgcgcacatgggcaaactgcacgcccagaagatatccggcaaccagctgtgtgctatatgccttggtggtcgccaccgcaatctccggacctgccaatgtgtagaaaatatgatctgcctcacgcgcaatcgtggaacctactacattgacaatcgccatcgtaggaacgccctggctctttgccagacgcagggctgccaggctgtcggctgtctcgcccgactggctgatgatgataaccagactgttctcttccagaatcgggttccggtaacggaactcggaagccagctcgacgcggaccggaatacgcgccagatcttcgatcacatactgagctgccacgcctgcatggtaagcagaaccacacgctacgatataaatacgctttaacgaacgaatgacatcatcggaaagtcccgcctcggtcaggtcaatatgaccatcgcgaatgactgaatttaatgtatcccgaaccgcacgcggctgttcatggatctccttaatcatgaaatgctcataacctcccttttcagcagcttctgcatcccactcaatcgtcacaagttctttctgaatctcttcctgatcaatattatagaaagtaacctctcccttatgtaagcgtcccaattcctgattgccgatatagtataccttgcgggtatatggaagcaggggcggaacatccgacgcgataaaggattcaccctcgcctactccgatgatcatcgggttatcctgacgggctacaaagatctcctccggataatccttaaacataaccgccagtgcatacgtgccacggatacgcatcatcgcacgcgccatcgcatcgagcggtccctcgttgtatttcttataataatgatcgatcagctttacagccacctctgtatcagtatctgaataaaacgtatatccatttttaatcagtttttcgcgaatttcctgatagttttcgataataccattgtgaaccgctaccacgctgcggtcatccgtgcagtgcggatgtgcattgttctcagacggctccccgtgtgtcgcccagcgggtatgaccgataccgcagttgccccgcattgcgcgtccattgtctgttttctctgccagcgcgcgcagacgtcccttcgcctttacaacctccggtacacgttctccgtctctgactgccagacctgctgaatcgtatccacgatattcaagcttctccagacccgctaataagatcggagccgcctgctggtctcctgtatatcctacgataccacacatacaattattcctcctttttccaaccaggcgagccgctgccatcataccgcctcagacactcccgccttcgtatctctatctcaagaatatgataaatctattgattcttcaaaatagaatcttctataaaatatgtcgtttatccctaaatagcgcctgaccggcaccttcgatatagactttcttctcagtcatgtacatattctgtctcattataccaaaaaagaatcttcttgtcagcatttgctgtaatattttcgtcagtcatcatatagacacatctcattttaaaaccatccgctataagcagtcacatatttcttctgcatatctacctgtaaaataacgattgtccacgacaactattttttatacaggagatttcatcatgaaaaacgaaacaatgtactttaacgatcttctttccatctggctggaaaagcagaaacaggcgcgagccctgtctacctatgtgaaataccggcatctggcagaccgttatatctccccttattttagatccatccagctttcaaaggtcgatctgcctatgcttcagacattccgcaattcccttttatccccggattccctgcatccgcttgggaacggaactatccgctgtattcttctgctcgtcaactccattctgcgtctttcctatgaaaccgggcagacaaacggcattctctatctcccgccccgtcttccaaaaaagcgccctgaagtacctgtttttacccttcaggaacagaaacagctcgaacactatctaactgcccatacaggaatctccgaagccgtcatctatctgggactctatacagggctgcgggttggagaactctgcgccctgcgttgggaaaatattcatttttccgatcgctatctccatgtccgacacacggtgcagcgcctgacgcgccttgacacaactcataaatcagaactcattttatccggtcccaaaagcatctcctccaaccgtttggttcccctgcccgctttccttctgccgatcctacagccatattctcatccggaacacccggattattttctgctgtcacaatctgccagctccccgatggatccgcgaaccttccagaatcactaccagcgcattctatcacaagccggactgcgctatctgaattttcatgcaatccgacacacgtttgccacccgctgtatcacaaatggcatggatcccaaaacgctcagcgaaattctgggacactccgatttgaaagtcacgcttgaatactattttcattcctctctggaattcaagaaagaacagatcgaccgccttactgcactttctccggccgtccatacttctcttccagatatgccacataatatgacggattaaaatcttcccccgtcatatcgcgcaggatctgacggctgtccttcaatttgccatactggtgaatatttttccgcagatattcacggatttctcccaggtttcctgcctccagtagtttttctaccggcaattccttcttcatctggtgataaatctgcgcgccaaaggcatttcctaatgcataggacggaaaatagccgatcgatccctgtgaccagtgaatatcctgcagtacgccctcccgatccgtggacgggcgtactcccaggtattcttcatacttatcattccagatctgcggcagcttctccacctccagatcctcctcaatcagcattttctcaatttcatagcgcaccagcacatgcagcggataagaaagctcatccgcttccgtccggatcagccccggaacggttctattaaccgccgccagaaaatcctccagactcgtctccgtcagcgggcttccaaacatctgcgccacttttccataaatcggtttccagaatgcatggctgcgccccacgatattttcaaagaaacgggactggcattcatgcattcccatcgaagttccctgccccaccagcgtctgtgtcaggtcatcccggatgccaaattcatagatagcatgtcccgtctcatgcagcacggaaaaaatcgaagaatcaatccgtttctgataatgcgtcgtgatccgtacatcatgattgtgcagattcgtcgtaaacggatgggcgctgagtgccagtactccccggtcaaaatcaaagccctcatactctgctaggaaacgcgccgcctctgcctgcgccgcctccggataatctgcggataaaaaggcgtccggaaccgtcttcgagcgctctgccgattctttcaaaagcggcacgattttccctttcatcagctcaaaaaatggatctaacatctccatattaaaacctttttcgtaggtatccagcatcacatcgtaaagcttctgtcccggctttgcccggtacgccgcaaatttcttctgataggaaataatctccttcaaaacaggggcaaatgaagcaaaatcatttttctctcgcgcacgcgtccagattcccgtcgcacgcgccgtaagttctgcatacgcacggtattcctccggcggaatgcaggaaagccgctcctgctcctcggctgcttcccggagaattgccgactgcacctcatcaaatacgcccgcattctctttttctgccttctggcaggcatccagcagctccttaaaacgcattgacgccagaatctcctgatactgctccgaaagtgaacctatcacccgcgcggtatgctctgctgcacccttcggcgccagcgtctcatcatcccactcaaacaaaaccatcgacgtctgaagcgccatcgcccgctccaaaagagactgcagctcctcaaactgtttttttacattctgattcttttgttctgtctgtgccattttcctgcctcctgtctttttttcgtaattctatcatccaaattctgtgtattttttaggtttcgctgcacatatgcctgcattcttttgtaatatgagccatttccatcttcatcataccagattttctttcttctgtttcttatatctttcttatgattttttacagttcacacattgtgcaaactgtaacaggattttctcatgatgccttatgtgactttccaatcttgcataatcatgcaaaacgcggtatactaaaaccagtttaaatcatatgcataaagctggttcccggctcacggatatacgccacgaatcaacttccatgcacacaccaggacaggagggattgcagatgatcgaagcaacgagctgcggcggtgtggttatatttcggggaaaattactcgttctttacaaaaactaccggaacaaatacgaaggctgggttcttcccaaaggaaccgtagaaccgggcgaagacttcaagcagaccgccctccgggaggttcatgaggagactggcgtcgccgcctccatcatcaagtacattggtaaaagccagtacaccttcaacacccctcaggataccatcgaaaagaccgtgcactggtatctgatgatggcggacagctactacagtaagccgcagcgcgaagaatacttcgtcgattccggctactacaaattttacgaagcctaccaccttctgaaattttccaacgaaaaacagatcctggaaaaagcctacaatgagtatctggatctgaaaaaggcaaatttgtgggggaatcggaaatacttttaatcacaagaacaaagaggctgttgcaaaatcattatcaaaaatagatgattgagcggcagcttccatttctctgcaagctaatctgggttaaaattcgcggttttcctgttaaaaaaggcttttcggtaatttcctatgaaacaaaaaaacaccccgtccgctgcacaaagccaacgaacagggtattaaaaaggggaggataagtattcaaaaatttctcttttgtgatactaacagtatgacccgtttctgttattctatacatcaatctccaaatttttatacgccttttatctgcttccgagtatccggttttcatattatttatcatacatacctttttcccttgctttcttcctctctttccgttacaatagatacgttttgagttgtactttttaatttatttttacctctatgaaaaatacaactccagcaaatcattttatgtacatttttatattgatttgaaactttttatatcataaaccttgtacttacctcacaaaaaggagatttaccttatgaacaagaaaaacatcttagtcggacagtccggcggaccgaccgcagttatcaacgggagcctttacggcgttatctgcgaaggtgcgcgccacagcgatgcggttggctgcgtctacggtatgatcaatggaatcgagggctttctcgcggattcttatatgaacctttcagaaacactctccgatgacgatctggaacttcttcgcctgactccggcggcgtatctgggttcctgccgttttaaactccctgagaacctctccgacagcttctaccgcgtcctctttgaaaaactggagcggctggacatcggctatttcttttacatcggcggcaacgactcgatggacaccgtcagcaagctttcccgctatgcggcgcagatcaaaagcccgatccgctttatcggcattcccaagacgatcgacaacgatctcgtcctgaccgatcacacgccgggatacggcagcgctgcccgctatgtcgctgcatccatccgtgaaattgcgctggacgcctctgtctatcagcagaaatcggtcaccatcgttgagatcatgggacgccatgccggatggctgacggctgcctctgccttagcacgcaaggaagccggtgacaatccgctcttaatctatctgccggaagctccatttgagctggcacaatttaatgacgacttaaagaaagcgtttgaaaagacagcgaatgtcatcgtctgcgtctccgagggcatccgcgaccacggcggtcgttttatctgcgaatattcaaccgaagcccaggtcgacaccttcggtcacaaaatgttagccggatgcggaaaaattctggaaaattatgtccgcaaccagttcggcgtcaaggtgcgctcggtcgagctcaacgtcaaccagcgctgctccggtctcaccgtttccgctactgatctgaatgaggccgagatggcaggccgtttcggtgtccaggcagctctggacggccatactgggcagatggtggcatttgagcgtgagactgatacagctgcttctgaacctgttcatgcagctgctgccgtttcaaacgctgcagacttaggcgcagcatccgcttcatgcgtaaaacatcgtaacactgtatataaaattcatccagttctcaaggatgtcaatctgatctgcaatcaggaaaagaaagtacctgccgagtggatcacgaaaaacggtaccgatgtcagcgatgatttcctggcttactcgcagccgctgatccaaggggacgtttcccatattatggaaaacggacttccaaaatatttgtaccgcaaatagtccgtcacacagtataactgcttcatccttgaaatccatacaagcaacagaaaaagagacgcttctttcattttacggatgcgtctcttttctacttaataatacataatacctgaattttttctaatttaccccaatcacacactcttatcatttggggaggaatcctgaccgtgccctttcagcgcagccatcttctaaatctaatcttcctcacaatcccgaatttcaaccccatcataaaagaacatcagaatctcttcataattcttgccttcgcgcgccatctcctgtgcgccgttctggctcatgccgactccgtgaccgtagccgccgccccagatggtaaatgtgcggatgtctttttcctcatccctggcagtttcatccaccgagaaaaaggcactcggaagcgtactccatcctgtcagttcggttccgtcatttttcttataaacgagtgattccgagccgaggacactccgaatctgactctgacctttcagtgtcttggttccctcgcttccgacgatctgcaccgtctgggcgataccacccttaccgcgggaagtcacaaaaataccctgaatctcgccgacggtatctaccttctgctgcagcttcttattcgtgatcgttgttttccagcggtacatcgggaacgaggaatcataattctgctcaccctgtccctggataaacttgagaaatgtgtcgttgtccgtcaaatccggaatcttcttcttttccgtcaaaccgatccctttcagatacggaacctcgtctttgctggcgccccagatcgttccatcggtagaatatccgcaggaagttgaaaaataatacgtttccgccggggtatcgttgtaatatacaatcttcccgtccgtctccttgactgccagattcgtccgctcactgctctctgtattattgtacacctgatagttcgtgctgtcatcaacgtgtgcgccgtaacggctgtatgcattcgccttgatctgccggtaggcatacgtccgtgcgcaaactgcctgcgccttgagcgcctccagctcataattagatggcatctcgctcggcactacgcgtgtcaggtaatcttcgacgtccagctcattgatcagaagcagcccatccgactcctcgctcaactcgaagctgccgaaatacgacggcgttccctgcgcccgcttggtactcaggatgcggatctccttctgcgggtcttccagcgtgatcgtcatgcgcccttctttcagacggtcatcgccaggactcacggacaatttcgttcccgggctcaaagtctcctctgattcgccccaggtcacatgcatcgtgctgtccgactggagtaccaccttcgtgtgaaacaaggaggaataatcatcattcatgatcagcacgcggatgttcgtcgctgaaaaatcatgatttaagagtgctgcgcaaacctttttgccagccacgacaaattttcccagatcatagccgaccagcacatcccgctttttctgctccttgacgactccatatgttttatatactttaaaatcatcgtccagtttcagcgttccgtacccgtcaatctcgatcgtatcatccttgaccgaaagtacctttccttcgatcatatcttccttgagcgacagcttgcggatcttgcccttatccagctcgacatccgccagcacgccatcggtacgatccttgagcttttcttcctctggaaatgtccggacgatcgtgccaatatacacatccatcccacccgattctcccggaacgatccagacattcttatatgtaactttttcagactgtacgccgcacagcgtgatgatcgaaccatcacgctcatagacctcgatcttccgatcgatgcaggcatccagcgacacgccctcaaaattcatcgttccctgatccgtatatgccgtccatgccgctgcttccttcacatttttcggtgttccataaagcaccagcttctgttttttgaccgcgttttccgaatctgccttttttaagaatgactcataaaacagccaccattcttccttcggcattgcctttttatatttatttttagatacattcagggcgctcgaaagcccttttgaaacgcgatctgccgcatatgccgcttcgccataggtcagtgcgcccatcgcgtagcttttacttatcttctcgtctcccggctccagatagccttcctcaatcatatagtcaatatatttggcataccattcatcctgatccggcgttccaaaatggcttccgtgttctccctgcgacgcaacgatgtcgtcccggtctgcaaatgataacgccatagctttcgatgccatggcgcgtgaaatatcattatccgagtgatccaaaaatacaattgcaaagagcaggagtgccagaaaagccggaatcgccactgcccagtaaaccagctttttaggtttcagagactgtactgcctttcgcgatctgcctgttttcttttccatatttctccagccgcctttattttttaactgtcctttctcattcacagtcactttttatttaactccataaacgttcctgttttctcatcaatgtggtctaacttccggtattcgtctgtctccatcggcaatttccgaagccgcagcgaccggtgcaccgcgcgggagatcaagtcatagataaccgcaaatgccggtactgcgataatcatgccgacgaaaccaaagagtccgccaaagaagagaatcgaaaacagtacccagaaactcgaaagtcctgtcgaattgcccaggatcttcggtcccagaatattgccgtcaaactgctgcagaagcagaatccagatgaggaaatacacacactggagcggactgactaagaataccaggaacgctgcaggtatcgcaccgatgaacggtccaaaaaaaggtatcacattcgtcacaccgataatgacgctcaaaagcatcgggaacggcatatttaagatcgtcacaccgatgaaacagataataccgataatgagggaatccaccagcttgccgatgatgaagccgccgaacatctgattgataaaccggagctcctcgattaccagattcgcctgtcttagattcaggcagccatagacaatcttctttccctgtgctgccagtgtatctttgatatttagcagatacaccatgacgatcagaccgatcagccagtttttgataaattccaggacacccagcacgctgctggaaaggcctgtcacgatctgtccaatccggtgcatatcaatgttggtaaacgatttctccgcccagttctgaaaaactgccagattattttcaaaactgctcagaaccatattttcgatctccggattatttttcaaaatacgctgaatccattcatacacattctgcacatacagcggaaatgaatcctgaatgccgatcaaactctcgatcagctgcgggatcataagctggaacatccctaccacaagcacaataaccagccccagacaggctgccgtcgcaagcatccgggctgcaccacgaacgtatttggaattcttagtgacagagccaagggtcttttccacgatccctgctacccagttatatgccggggcggtcagatacgtcagcaccgcaccgcagagaatcggcgcgaggattttcacaaccttgcgggtgcccgccgacaccacatcccagtgttggatgctgaaccagagcagtatgcagaccgcaatcaccgaaactgccgtcatccccatataaatgtattctttgaaatctcttttttccatacttatgttcttatccgttcctcttttctgattttacaatgtgcttctggaaaatgttacattttctttacacactttcttttacagagaaagcagcgattgctcgctgcttttatcctttgtaaccccaaaatgccggctcttaccatattgacgcctagcgctgctaggtgggcaacctcacttagatttctgtcttccactcgagaggaggcctgacatccatctaaaaatatcggaatcccgttagtcaaaatgtaggttcaaaaaaagcaagagttgtcgagcatcccaggaattacaaatattctcttttgatacggctattataccgcaagtcggatgttttttcaagttccattttctgataatgcggtcaggttgttactgttcaggttatccatctctctatctcttttaagaagctcttttttgtcttttatacttctccccacttcatcaggaaatctcccagctcttccaccgtctcaatctggtagtctgccccattttccgtaaactcttcccgggaaccatatccatacagcactgccgcacatgggagctgattttcatgcgccccgataatatcgtgtttccggtcgcccaccatgataaccttcgatttctccggtgttgttcccagacggtccagcgtgtaggcaatcacatcgcctttgcggacccggatctcctccatatccgccccgccaaccagggtaaagtaggaaagcagatcaaaatgctccagaatctgaatagcaaacggttccggcttcgaggttgccaccgccagcgtaagaccggcatcctttaaacgtgccagcatctcccggattcccggatagactttgttttcaaacattccctgtttcgtaaaatattcgtggaaatggtcaatcgcttcgcgcgcctgcgcttcgctgaatccgtaatattctttaaaactgtccgacagcggcggtccgatgaacggacacagtttatccagatccggctcatcgatcccgtatgcctgcagcgcatgctggacagactttgtgatgccttccttcggatctgtaagggttccgtcgaggtcaaatagtatgatatggttcatatggttcgttctccttattgtagtccgcggtgcattactccgcagcacaccagcttgaaaaaactacgttttcattgcttacgaccattctaatacattttacgcaaaaaagaaagacaacttttctccagccatctttcttttctgcgtttcagttactgttcacgcatacgtgcccagcaacggaatttgccgtggcttcgcatttaaatacggcaaatttctgctgccaccacgttttcttacggcactttcggttccaaaagtgcctacccgtgaacagtaacgtgtttcactctttatttgtaaaattcatgtccaccatgctgcatgacataggtcagcttgccatcgaaccagcgtacattggaggaagcagagattccgcggttcatgaagtacagggcgccgcccgagtaatcctcgccttccagtgcacggttgacgcagtcaattgtctgctgcgttaccttacagctgttgatcgttccatccagtaccggtgagaactgggatggttcgtacacaacggctttaacgctgttcgggaatttcttgtttttcacccggttgatgattacatttgcaaccagtatctttcccctgtcgtcacacacacccgcctccgcctgcacaattttctgcagaacactgtaatcttcatcgctgtaagagatgactgcgcgttcccggcgctcccgttcttctgcttcctgcgccgcctgctgggtctgcattcgtacttctcgttcgattacctctacttccagagcttccttcgcaagttcatcctgaatcccctgctccatcctctgtccgagtagatgctgactttcctcgttggaggcgagaatcgtaaattctgataagctctctgtctctgtcgtttcttctgactgcagcatttctgtcagttccacatcatccggatattcccggtgtgccgaggctgcatttttgccaacgccgccaaaactgaccgaattaaatgctatcaccgtcacaaccgctgcccccgtcatcaatacggctgcggtccggtacatcctttttgtcacacggacaaataatgcctttataaactgataagcagtctgaagaaatgtgtcaatgcttggcatacactctcctctttctatcagtgcagtcctcccaaaaccggtctgactgccatttaacatctgcggcatcttctttggctgtctgattttttctgacagctaaggacagatcctctctgcctgtgccgcttccttcaagtgacgggagacattatatgtggtttccggcttcaaagtcaacgtcttttttacatttttgtgacaaatcacattctcatttaacttttccttaatatttatgtgagcattttataaacttttttgctttttcttcccaatttttataaactttggctggtataaaattttcaattttttacaattctgttaaattctgcccgtcaaaaaaacaggcgaatcaagtcgcctgttttttatgtcaactgtaatagaacaattatggtatctgtaaaggtgtcagacagactccgattatgtgaaaccaacacatacaatccactgtccggtgtccgatcactgccactcaaactccttaccactctagatcagcgctacaaactgtgcatccacatattttgcaagttcctccggattcagaatgacctgaacacctctctgacccgcgctgatgctgattttgtcgaaaatctgcgctgtttcttctatataagtagggaacttctttttcatgccgatcggggaacaaccacctcgcatatagccagtcagcggaagaagttccttcatatggatcatctccactttcttgtccttggaagcctttgccacctttttcaggtccagctcctcatcgaccgggatacagcagaccagatagccgttcttatcgccctttaaaacgagcgttttgaacatcgtgtcatggtccatccccatcatatccgccgcatggctgccggataagtcgtcctcatctacttcatactcgcctgcttcataatcgattccagccgcgtctaaaagacgcattacgtttgtttttgtcataagctaaaccctttctggagacagatttagtgcactcctcttatttctggttgatatagtttaccagtccaccggctgtgatgatcttctgcatgaactccgggaacgcctgcccctggaagctctggccggtggttttatcggtaatcacaccgctgtcaaaatcaacctctacctcatcaccagccgcgattgcttttgcagcctccgggcactcgatgatcggcagaccgatattaatagagttgcggtagaaaatacgtgcaaacgtctcagcaataacacagcttactcctgcacatttgattgccagcggcgcatgctcgcgggaagaaccgcagccaaagttcttatttgctacgatgatatcacccttctgtactttatttacaaactctttatcaatatcttccatacaatgttttgccagctcgttgccatccggagagtttaagtatcttgccgggatgataacgtctgtatctacattgtctccatatttaaatacatgtccatttgctttcatttctatatcctcctgcgatttatcctgttattttattccaattcacgagacggcacctgcgattgcaggaaccccttccccaaaccgtaatatccgtttgtaactgttcagtaccttcacagtcacccgcagatctactgaacagttacatccgttttacttattcctaaacttttatgcctattacagtcccagttccgccggtccgctcacttttccggtaatggcgctggctgctgccactgccgggcttgccagataaatctcagaatccacgtgtcccatacgtccaacgaagttacggttggtcgtggatacacatctctcgccttctgccaggatgcccatataaccgcccaggcacggaccgcaggtcggagtgctgacaacggcaccagcctcgatgaaggtctctaaaagtccctctttcatggactgtaaatagatcgactgtgtcgccggaatcacgatgcagcgcagaccttttttcacttttctgccctttaagatctcagctgcgatacgcatatcctcgatacgtccgttcgtacaggagccaatgacaacctgatcgatcgcaatgtcacccacctcatcgatcgttctcgtattctccggaaggtgcgggaaggatacggtcggctttaactcggataagtctatggtgtactcttcgtcatactctgcatccggatctgcctcatataccttgaaatcacgtttagaatgctcttttaagtactcgatggtcttctcatcaaccggaaagataccgttcttgccgcctgcctcgatcgccatgttgcagatcgtgaaacggtcatccatggaaaggttcttgatgccctcgccgacaaactccatggaacggtacagcgcgccatctacaccgatcataccgataatgtgaagaatgacatctttaccactgacccattttgccggtttgccgatcaggttgaacttgatcgcggacggtaccttgaaccaagccttaccggttaccatgccagctgccatatcggtactgccgacacctgtagagaatgcgccaagtgcgccgtatgtacaggtatgggaatccgcaccgatgactgcgtcacctgctacaaccagacctttttccggaaggagtgcatgctcgattcccatctctcctacgtcaaaatagttggtgatatcatgacgacaggcaaattcacgacagcatttgcagttttccgccgacttgatatccttattcgggataaaatgatccataaccagcgcaattttgtcatgattgaataccgtctggttgtccatcttcttcatctcattgaccgctaccggcgttgtgatatcatttccaagaaccagatccagatctgcttcgatcaactgtcctgcttttacctctgcaagacccgcgtgcgctgccaggatcttctgtgtcattgtcattcccatgatttatttcctcctgcatatacatacttggtaacggctccgatgcccttactgttgtaggaaaaaactctgttccaacggtgccgctgccatcttttgcttttttatgtttgtattatagcaccggttctgttataatacaaatatatattattaatagatactatgagtcgaagttatagtgttactgttcacgagtaggcacttttggaaccgaaagtgccataaaaaaacgtggtggcagcaggaatttgccgtatttaaatgcgaagccgcggcaaattccgttactgggcacgtatgcgtgaacagtaactttatagatataaaggagtattatggaacagcatttaacccagtaccgtattttctacgccgttgcacgcgccggtaatatttcccgcgccgccaaggaactttttatcagtcagcccgcgatcagcaaatcaatcagcaagctggaagaaagcctcggcatggcactttttatccgcaattcccgcggtgtctccctgaccgcagagggacaggtcttatttcagcatgtggaagccgcctttgaagctctggagcgcggtgaaaatgagctaaaacagatccagaacctccacatcggacagctcaagatcggcgttagcaacactctgtgcaaatatattcttcttccttatttaaaaggatttattgcacagtacccgcacgtccgcattttgattgaaagtcaggacactgcacgcacaatctcgatgctggaacagcagaagctcgacatcggtctgatcgccgagccgaaaaaccgccgcagcctttcgtttcttcccgtcatgcgaatcgaggacaccttcgtctgcacccggtcttatctggaaaatctgcggatccgcgaaggtgccgacgtcgatccgttcgaatccgggacaatcctgttgctcgaccgcagcaatatgacgcgcacccacattgatgcgtactttgcagagcacggaattgaaccaaagcagattttagaggcgacgacgatggatcttctgattgaatttgccaaaacggggctcggaatcggatgtgtgatccgcgagtttgtgcaggaagaattaaaggatggttcgctgatcgaactcccgctggaagcgccaatccgaaaccggacgattggatttgcttatcatccgtcggcgatgacgcggacgatgaatgattttgtgcaattttgttcggaatgatgaaataattggcaacacggacgccatttcctatgaaacgaaaaagtccggcgcatggcggtcaagctgccatatgccggactttttctgtttagttcctatttttatcaattttcgtaactgttcagtaccttcacagtcacgcgcaaaaattcattaaaaattgcctgcggcaatggaatttttgcctgctagcccatgttttcgtacggtcagcgcagtaaatgcgcagacctactgagcagttaccgattttcttttaaaatattcttcacacatttccacacacatggaaatattttcccatctaccagccagacatacactttcgaacaaattcctattaaaatacagctcagaaccagattcaccccgatcgccaacttctctcccgcctcagaataaatgctgtaaaaccaacaggaaaagctggcaatcacaagccagtgtgtcaggaagattcccatgctatactcgccgatccacagaataatttttttgaggttctccgggagccaggtttccagaccgccgagccagaagagacggaagcctaaaatcatcaggaatgcagcaacatgaccatagaattccatggttccgagtccgcctggaaatccatgtgctcccaatgtggttccgatccagaaagattttcgaacgaaccagatgctgaaaatccagagggcagcaccaaagatgccatattttccttctccatctttaagcagattctcttttcgctctctttctttcatggacttctcaactgcccgcatcagcagacagatcccatttcccagaagcaggcagatataaaagctgttcattccgatcagcactgccgcgacgcctgccagaatcagaattttctggcgggttcctacttcccggagggcggatgaaagtacaagagtcagaatacttcccatgaaagtgtaggtcagcatccaggacggaccatagtacgttgaatcagccttgaagattgtatcaaaccaggcatagcggagcgccttcagaccgcctggcagatagctgtaaaagttgctcagccactcattttccagacgcggcgcaacccgcactgtgtagaagagaccgctccggtaaaatagatatgccagcagaaatgtgaccgtcaacgggcaggtcagtttcagatagcggcgcaggatctctaagctccacgaagtaaatcgcccggaatataccttatcagctatcagcattccgctgatcatcaaaaaaagactaaccccgaaggttccatagcggagcaggggaagcggtcctatttccatcagcgcatttaccttattgctgccccaactcccgaatgtaccgaaccagtgacttccaaagaccgccagacaggcgtatgccttgattatatttacgtcatcatagcgtttcatccgcgtttcctttcccattcatataaaaagaatgtgcctttttgtgtaatagaacattccaaagaatttcctatgaaacaaaaaaacaggaccgctgcaaacctgcagcagccctgtataagatttcctatattcgaaaaacgattagttgttgatcagcttatcgttctcgttgttccagctgtaaagcttacggatctctgcgccaactttctcagacggatgctcggaagcaagctttctcatagcctggaagtgtacctgacgacctgccggggacatatccagtaagaactcttttgcaaaggtaccgtcctggatatcggacagaattttcttcatagctttctttgtctcagcggtaacgatcttcggtccggttacataatcgccgtactcagctgtgttggagatggagtatctcataccagcgaaaccggactgataaatcaggtctacgatcagcttcatctcgtggatacactcgaagtaagcatttctcgggtcataaccagcctcacacagagtctcgaaaccagcctgcatcagagcacaaacaccgccgcaaagaactgcctgctcaccgaagaggtctgtctcagtctcggtacggaatgtagtctccagaaggcctgctctagcgccgccgatgccaagaccataagccagtgcgcggtcaagtgccttgcctgtgtaatcctgctctactgctaccaggcacggtgtacctttaccagcctgatactcacttcttacagtgtgacccggtgccttcggagcgatcatggttacatcgacattcttcggcggtttgatgcatccgaagtggatgttaaagccatgagcgaacataagcatgttgccctcttccagatttggctcgatgtctttcttgtacatatctgcctgaagctcatcgttgatcaggatcatgatgatatcagcctgttttgcagcctctgctgcggtgtatactttaaatccctgtgcctctgcttttgcccaagacttgctgccctcgtaaagaccaatgataacatcacatccggactcttttaagttcaaggcatgtgcatgaccctggctgccgtaaccgataatagcaatcttctgtccttctaataaggataaattacaatcttcctgatagtaaatctttgctgccatttttcatttcctccttggatctaacaaaaataaaataaatttattataaagcatagaccggcgcctctctgtgcgtctttggaccaaactttgtaaacctcttgaatgccttgtatccagtctatcgactgatgtactacggcagatagcggatatcatccgcgcctctggaaagacctgtaagacctgttctggctaattccagaatctcataatcttccagaagattaatcagcgcgtcctgtttggactggtcgcctgtcagcataacagtgacagaatcttttcccacatcgacaatcgacgcacggaaaatctcggaaattgcattgatcgccatccgctggtttgcatttgccctcaccttgacgagcatcagctcacggtatacggaatgaccttcccgcagttcctttatgtcgtgtacatcttccagttttccaagctgcttctgaatctgctccagaacctgatgatcgcccagcgatacaaccgtcatacgggagtatctcggatccgcggtcacgccaactgtaagactttcgatattatatccgcggcggctgaaaagtccagccacacggcttaaaacgccggcagtattatctaccagcagtgataacacaattctgctcatgcaatcttcccaccttgatcttctgtcttgttcgtattgccttaatgatagcaaccaattctcagtttgtcaactaattaaaaggaatgcctagtattccccagagctatatcattactgttcacgcatacgtgtccagtaacggaatttgccgtggctccgcatttaaatacggcaaattcctgctgccaccacgttttcttacggcactttcggttccaaaagtgcctacctgtgtacattaacgatatatcaacacatcatttctggtgttcctgccactttttctcccagtccggaccgtatttaaaatacatcttcatctcggttccgacactgatgaggcgtgcatcgtccgggatctcctcacgcgtataccagcctgcctcagaaagctcgtcctcctgcagccggatcttatcgtccccatccagttctgcaaaaaatccgatcatctccgtatcagtaaatgcccacggctgactcttgaaatagcggatatttttaactttcagcccgacttcctccatcacttcgcggcggacggtctcttcaaatgtctctccgatctcgacaaatccagcgatcagcgcatacccacggtaggtactgtggttgacgcggtagcgcgacataagaagtttgttcccgttcgtgatcgccacgatgactgccggggagatctttggatattccgtctgaccgcagaccgggcagacgagtgcccgctcggtccggctgtcctgcgtctttgccccacagcgtccgcaaaactgacggctctgtctccagcgccacagctgcaccgccgtgatcgctgcaaatgcctggtgcatcggctccatcgcacggatgtcggttgacgttttccatgcatagcaaagctgctccggctctttttctgccccttccagtgcaccagaagccatcttcccagcttccatatgatttttgtctgaaacaggcatctgaccagcaccttcttttagctttgccagaatctcttccgcttctttctccggcacactgaccagaaaatacggcttctcatcaaccgaaaagagataaaccgcccgatccatcagttccggaactgcctcctcaatctcctcccggcgcgggatagtaagcacatgttcctccacggtctcacgcagaagaatccggcttttctggatgcagaagacatagtcctgtgctccaggtttctgaatgtggtatgtattgtcatagcgatgtggtgcgatatcctgtatcataactttatctctctatccttttattctctaaaacttgtgtaaccgttattcccatactgtgtaacaatgtataacggctgtcctcgcagacattctttgtaatctttctgcaagtcatttcattttactctttttaataaaaaaatacaatccccgattcgccccaagcttacaaccgtcccacaaaattctcatatccaaacgcccgcaccacttccgctgtcccatcttcatgccggtatacgatcgacggaagcggcattccattaaaggtattatttttgaccatcgtatagagcgccatatcgccaaacaccagccttccgccctctttcagcggtgcatcaaacgaataatccccgatgcagtctcccgaaagacaggttggtccgcccaggcggaacgtatacggcttttcgcccgcttctcccgctccgataagcggcggacggtacggcatttccaacacatccggcatatgacaggccgccgaggtatccagaattgcaatctgcatgccgttttccatcgtctccagcacggaagtcacaagaaatcccgcgtttaagacaactgcctcgcccggttccaggtatacttctaccccatatttttcgcgcagcccgcgcaccagacggatcaggcgttcccgatcataatcttctctcgtaatgtggtgtccgccgcccaggttcaaccattttacctttgaaaaccaggctccaaacttctcctccgctgcccgcagcgtcgtctccaggtcatctgaattctgctcgcagagcgtatgcatatggaatccatccagatacggaaggatagtttcttcaaagcttccagcctccgaaagcatcaaaagagtcgtccccatgcgggatcccggcgcacacggatcatagatcgcgtgcccctcctgcgtggaacactccgggttcagccggagtcccgcctgttttccggctttttttactttttcaccgaatttcagcacctgccccggcgtgttaaaaacgatgtggtcggcataatttaaaatctcatcaaactcatccgggcggtaggcggcagaaaacacatgggtctccccgccaaactccgtttttccaagtcgcgcctcataaagcccgctcgccgcggttcccgacagatactggcgaatcagcgggtagaccgaatacatggaaaatgctttctgtgccagcagaatccggcatccagcccgctctgccgtatccttcaaaatttccagatttttctttaaaagcgtctcatccaccacataaaatggtgtgcggatcgccgccgtgtcccggagaaccccagccgcctcccgttcctgcatctgttttccttcctttctttcttccatcttccgtgtccgttctcttcctgcgcctaaaaaaacgcaaaataaaaccattttcttaatggaagcatttttaccttaatccaccagtgccggatcccaggattccttccacggaagtccccatttatttaacgcatccataaatggatccggatcaaattcttcaatattataaacgcccggtttctgccaggttccattcatcaccagcatcgcgccgatcatcgccggtacaccggttgtgtaggagatcgcctgagaaccaacctctttgtagcactcctgatgatcgcagatattatataagtaatacttcttctcttttccatccttcttaccctggaaaatgcatccgatatttgtttttccaacggtacgcggaccaagggatgccggatccggaagcactgcctttaagaactgcagcggtacgatctcttttccttcgtacataatcggctcgatcgaggtcatgccgacattctccaggcactttaaatgggtcaggtagctctgaccgaaggtcataaagaagcggatccgcttgattcccggcatattgagcgccaacgattcgatctcctcatggtgaagcaggtacatatccttcatgccgacgccgtcaaaatcatactctctcttgatctccatcggtttcgtctctacccagtgtccatcttcccagtaagaaccgtttgccgacacctcccggatattgatctccgggttaaaattggttgcaaacggatagccgtggtcgccgccgttgcaatccagaatgtcgatgtagttgatttcgtcaaactcatgtttcagcgcatacgctgaaaatacgccggttacacccggatcaaagccgcttcccagcagtgcggtaatgcccgcctctttaaatttctcacgatatgcccactgccatttgtactcaaattttgccgtgtcctccggctcatagttcgcagtatcgatataatgggtcttcgtcgccaggcaggcatccatgattgtcagatcctggtacggaagcgccaggttcagcaccacatccgggttaaatttctcaatcagggcaatcagctcgtccacgttgtttgcatccacctgtgcggtctggatcttcgtcttggtggttccctctaatttttctttcagcgcatcacatttggactttgtccggcttgcaatgcagatctcctcaaatgcctcgctgttctggcagcacttgtgaattgctacggaagctacgcctccacatccgataattaacgcttttcccatcttttttcctcctgtattctgaaatgtactctgtttttgttccattttataatccaaatttcacatttgcttttgttcaaacacttttcagttcatgtctcaaacacacacttttatttgatgataccagggtcaaaaggtcagaagttcgacgcaagcttgcttgcaggagaatttttgaccttgggacccgccaaaaacatttcttacctaatctttggatttcccagcagcgccagcagcatctcccttacaatcttgcacgccaccgccgtcgatgcaccggacgcatccagcgccggggataattcattcacatcacatccaacaatccgtgccgtgctgcagatctgcgtgactgcccgtcgaagttcctcaaaactgattccgcccggttccggcgttcctgttcccggaaacacactcggatccagcacatccaaatccagggtaaaatacaccggttttccttccagtttccgaagagtttcctgaaggacttccatatccacgataaatggatgcgtcgtcacgtgttcttttccccagcgccattcctcccggtcgccggagcggataccaaactgcgtgattctgccgtctcccaggacttcccagcagcggcgcagcacacaggcgtgcgaaagtttcgcccccagataatcgtcccgcagatcagcatgtgcatcaaaatggatgatatgcagatccggatatttctctgccagcgcctgcaccggtgccagcgtcaccaggtgctcgccgcccagcataaatggtatcttgccatccccggcaacctccgccgcccgttcccgcagatcctttaacgccaacgatgcgtcaccaaagcagagctcctgatcgcccgcgtcaaacacggcgtaatcggtcagatcacggtcctggtacggcgaatacgattccagcccataggattccgagcggatcgcccgtgagccgaaccgggtgcccgggcggtacgaagtggttgagtcaaacggcgcgccgtagagcacgatccccgcctcctcatagctggcgtcacacgccagaaacgtctcaatatttgccttcaacatcttctaacatctcctccacatatgccggcaggtaaaatgcccctttatgcagggtcgtcgtataataccggcagtccagcccccgcaggttccatcttgtctcatccaaattctttaacggatggtatttcttcgacgcaaatccaaacagccagtgcccggacgggtaggtcgggatatgcgcctgatagacgcggctgatcggaaacgactctacgatccgcttatgtgcccgcttgcacgcctccgcgtcctcggcataaaacgggctttcatgctgattgaccatgatgccgtcctcttttaacgccttatagcagttcccgtaaaattcccgggtaaaaagtccctcgcccggtccaaacggatcggtcgaatccacgatgatcagatcgtattcattttccttaaagcggacatatttcagcccatcctcatagtggatcgagagtctcggatcatcgagacggcacgctgtcttcggcagatatttccggcagacctccaccaccagcgggtcgatctccaccatgtcgatgtgctcgatctccggatagcgggtcagctcccggatcacgcctccatctccggctccaattaccagtacctttttgaccaacggatgcactgccatcggcacatgcgtgatcatttcgtgatagataaattcatccttttccgtcagcatcatatatccatccaaagtcagaaaccgcccaaattccggcgaatcaaagacatcgatccgctgaaactcgctctttccgctgtaaagctggcgatccacccggatggaaatttttacatttggcgtatgattctctgaaaaccagaaattcataattttcccctttctatctactgcttatttatttcagcacattcaggcgctcaatccccggatcctccggtccggtcattgaacatcctttttccagcgcatacgcaatgtagtcaatgatctcttccgtgatctgctcgcccggcgtcagaatcgggatgccaggcgggtagcacatgacaaactcactgcacacacgcccggctgtctcgcggatcggaagggattctttttctccataaaatgcctcctgcggcgacatcgccacgatcgggtcaatatagtcaaaatccatcagcgtcgatttatcccggctgaaccggcgcttgatctccgccagtgcgctgaccaggcgctctacctcccgctgccggtcaccgatggacagatatgccagaatatttcccagatcaccaaattccgcctggatatcgtactcgtcccggagaagatcataaacctcgatccccgccagcccgatatcgcgcgtgtgaattgaaagtttggtcacatcgaaatcataaatgctgtcgccgttcaccagctccttcgaataggcataataaccgccaatccggttgatttctgttctcgcatactccgccagctccaccacctgcttaaatgcctcacgcccgcgaagcgccaggttccgtctggagatatcgaggctggaaaggagcaggtaggaaccgctcgtcgtctgcgtcagattgataatctggcggacatacccggcggacatacccggacccgtcagaagaatcgagctctgcgtcaggcttccgcccgatttgtgcatcgaaaccgccgccatatccgccccagctgccatcgcggaaaccggcatattttccccgaaataaaaatgggttccatgtgcctcatcagctaaacacaacatcccatgctcatgtgccagctttacgatcgagcgcagatccgaacaaatgccgtaatacgtcggattattcacaaacaccgccttagcatctggattttccttgatcgcccggcgcacatcttccacacgcattccaagaggaatccccagtctcttatcacccgccggattcacatagaccggaaccgcgcctccaagcaccatggcgcccatgacgctgcggtggacatttcgcggcaatataatcttctcgccccgcttgactgccgtcagcaccatgctctgaactgccgatgtcgtaccgccgaccatcaggaatgcgtgtgccgccccgaatgcctcagccgccagctgctccgcatccgcgatgacggacaccggatggcagaggttatcgagcggcttcatggaattgacgtccagccgcatgcaggtctctcctaaaagtttcgtcagctccgggttgccgcgccccctcttgtgccccggcacatcaaacggcaccacgcgcatcttctgaaatgcttccagcgcctcatagatcggcgcgcgctcctgggtcagcgcgtcatctcttcgactgcctccccccgtttctttcggtcctgaagcttcctttctgcgccgtgcactccgtccgacgcccggctccagatttcttctctcttcttccatctgccgtccctcctgaaaatcactcattcgtttcttctatcgaatttccctggttttcgcggtattttccagtcaaactcttctctttcctctcaaaaagcatttcttttaaaacacatttcttccgctgaaaatttcaatcatctcccgccgcaggctctccataatactgagtctggtggtcggcggaagttcatagacatctgtcttaaacagataattctgcagatcgatctctttcagcatcatcttggtatggaacagattcgcctcgtacacattgatatcgaccacatcgtagcgccgcagcgtttccttggagatataatcctgaatcgagcggatctcacgatccataaacagcttttttccgtccacatctcgcgtgaacccgcgcacccggtagtccatcgtgatgatgtccgaatcaaacgaaccgatcaggtaatcgagagtcgaaagcggcgtgatctccccgcaggtcgccacatcgatatccacccggaaggtcgccagacaggtctccggatggtattccggataggtatggacggtcacatggctcttatccagatgcgccacctgcgtctccccctgcaccggcaccatagagccttccgcaatcagaagtgtgaccgaagccccctgcggatcgtagtcctgctgggaaatactcaatacccgtgccccgatcatatccgtcagcgatgttaggatccgggtcaggcgttccgaattgtactgctgatcgatgtaggcaatataatccttctgctccctcggtgtcttggcataacagacatcatagatattaaagctaagcgcctttgtcaggttattaaagccgtataattttaatttttcgctgtgatccatatcttccttctcctgaaatataaatggtgttgatcaaaaaagcggatgatgtgtctccacatcatccgcaaaacgttctttttctgcttcactctatttttacaaatctgccgtatagctacgaaatcttcccttgtctctatttaccgcatatactgcaaaacctttttatccacagaaatctcacattcagagtctatatagcaaatatctacttttaccactcttattgaccgttttacaagttgatgtgcatgagcactggttgtaaagtaaccaacttataaaattgagcttttaactcaatcaatagggcagctcgcactgccaatcggcatttgacccggctgtccgtatggccattccctgtttcacaggtggtcagatatatttgcatggatgactcttaaaatgttaagattttccatatcagaggtatcatacagcaattttggtaaaatgtcaagaatgatttttatttgggttgacatttgaaaatttttacttttctaacggtacttccgtcctcttcccacaaaccacaaacatcgccacgcccgccgcaaagataaacagtgagataaactgtgaagtcgagaggaacccgaccgctccccggttcaaatcaccgcggaaaaattccagcacgaagcgtcccagactgtagcagatcagatacagggataccacctgcccctgttttttgcactttttcgccgcataaagaagcagcaggcagtgcagaaaatccagaccgcttgagatgagctgggtcggaaccagcggaatgttattcggggcaaagtccgaattgtggaacacgatcgcaaaatggctgtgggtcggcataccgtagcagcagccagccaggaaacagccgatccgtccaaagccctgtgcgagcgcaaccgacggcatgaccagatccgcatactggaaaaaggaaatatgcttgatccggctcagcacatagccgcccagcacgccgccgatgatgccgccatatacgacaaatccatcgctgatatccaacaatttcttcgggttttctacaatctcatccagaattgtgacatagtacagaatttttgcacctaaaattccacatacgacaccgcagatcgcgatggagaggatcatatcgacatccatcccccgcttgtttgcccggtactctgccatgtaatacgcagcgataatgccgatgccgatcatcaggccatagccatgaatcgtgatgctgccgattgtgaataagtcatttttcatgaaatacttgtcctccgttctcttctttcctacaatttcctacaacgcatgaacatccatataatactgataatttgggaacttattctggaagtgttctgccatatagtacgccgcttctttcgggttccggttcttgattgcctcgaaaatcttcagatggctctcatagaaatacatgccgtccgtctggcggatctgatccgacaccagatccatgatgctcgaataaatcaggcggatcagctggtttccagaaaggttcaccacccggaaatggaacaggttattgtaatactggcgcgtcttcagatcggctccgcccgcaatcgcctctttcatcgaatccatcagcgcctgaaactccccgatctcctcttccgtgatcttggcggccgcaagcgacgccatctgcacctccatgatatagcggaattccagaatatcatccatcttgccgttttttaagtaaaactgcattgccagcggattgatcacctcgaccgtgtccgccgtaatataattgccgtctccctgacggctgcggataatccccagcacttccagcgcactgatcgcctgcttgagcgccggtcgcccaactccgagcatctcggctaactggcgctccggcggaagccggtcacctttttttaattcgccgtgcatgatcatttcctggatctgtgcgactaccttcttatatactgaaacattttcttcgattggctgaaacattctcagtctccctcctgctgatttacgtttcctaacgcctatcgattatatcattatttatgtgaaaaaacaaatgttaatagatagcagacaacctccagcaccggcacaatccaaaaaatacaagcgcctccctgtgctactcccaacagtcccatcggcgttacaacattggaatgccacgggaccagaagactcatgtataaagcgcccagaaagagcgaatgaatcattttctcccgtttccagcctttttcatcatacaccggcatcaggcaggagacggatatcaccagggaacacatcgccgatgctgaaaaaacatttactacaaaagcaaataaaattgctgctatatttccttttttctctgtatctgcccacttaaacaacggctgcatcatgcatcggatcgccccacttttttcaagcattccaaacaaactaaacgctaaaaggaacaaaagaaccgtcccagccatgctgctgatacctccgctgtgaaaataggatccttggtccggtccattccataaaacattcaaaattgtctgccatcgatatttctggtaaaaaaatgccactgccatcccggacacgcagcctgccatcaacgcatgcatggcgttttttctcattaacataaatataagaaccactgcagccggtatatacacgggcattcccaggcacatttccccgaatatttgcatcattttactgctttcctgtatcgatattcctgccagttctgcattcttccatcccgcataaaaacagcctgccagacaaacgcatatggttggaatgatactatttcgttctgctttcaaggttttcgccagttctatttcaacactggatgaaagtaaattcacaaaatccgacatcggagaaatcccatagccgcaaaatgctccggctattataacagctgctgctattttctcttcatatcccatacttgttccaatatttaaaaataggattcccatggttccacaggaactaaacacactgccagtcagaaaactaaacagaaagcatcctgcatacgcggtgaccggataccattccggacgaatccacaaaattcctgtatacgtcagtcctggaatcgtacctgacagattccatattcctgtcatcgctcctgcgcataaaagaaaaaagataggtgaaactgcccttgtgcaagaatgaaccattgcttcctgaagctcattccaggaataagaatttgcttctaaaaacagaatcacgtagatccatgcaagaaaaaagaatgcctgcaccggtacttggatcccgcatactggaactgccagaatcaggaaaattcctcccaccaaagcccccgatcgttttttatttaatttttctgcccccatcattcctcctgtttcttttttccactgtaacgttcaaataacccttttaattagaaaaacagatgtaaaacaggttttctctccccatcctacatctgtttgactaacttatgaaatgtcttatttatccttgtttaatttcttgattccaaacccggtaaagccccagagaaccgcaaaacaaaaacctgcgtaacaaaagattgcccacggagcatatgcgaacgtagagactcccagcgttcccgacatatacgcaccgcccgctgaccacggaaccagaggaatggaacaggttcctgcatcttccagtgttctggaaagattctgcggtgccagatttctttccttaaaggactcactgaacaattctccgcccatcaaaatcggaatatatgcatttccaacaatcagcgcaataatcaagactgaaataaccgttaccagaatcaaagttccgtcactgtgtacgaatgttttcaatttttccaagattgcattcataaaaccagccgcactcatagcacctgcaaatagaaatgcgcagagcactttcagcaccgttgccatcatgcttgtcattccgccccgctctaccagcgttttaatgcttcctgtcactgtttccggatcaattcccagcatcgataaagaaaatccgctatatgccgccgaaattacctttgcaaccgtcgctccctgaaatacaatcgctaacactcctgccagaaccgatgctgtaaacataaccggaatcgttggttttcccatcgctgaaccaaccagcacaaccaccagaggaatcaataaaaacacattaaaatgataaatagaagcgagtccctccgtcatctcatttgccgcagatgcatcgaccgatgaaaccaccattccagtacgtccagctataaaatataccactaagcagacaagcgccgccgggaccgtcgtataaaacatatgccggatgtgttcaaacaatgtggttccggctgctaccggagccagatttgtcgtatctgaaagcggtgacattttatctccaaaataagcacctgaaataattgcgcccgctgctgccggaagattaacgcccaatccctgagctactccgataagtgccagcccgacggttccaactgagccaaaactggttcccgtacacacagaaacaattactgtaatcacaaaagccgatatcagaaacagctgtggatttaagagcttcaggccataataaatcaacataggaattgttcctgataacatccaggttccgataatcattccaacaaatacaaagataaaaatcgccataaatgactttcctatcttttccgaaaccgcatctgcaatctcattccaggttgttccataaaacaatcctaaaagcaccgtaaagaaggaacaaacaagtaagagtacttccacacttagtctgaactttccaaaaccaattcccaacacgaacgccatcaccaatattggaagcatcgcagccccaaaacccggttttcttttctctttcatattcattccgtcctttcgctcgaatcatatgtttctcttctaccatccctctttataaacccctatatgaatctcacgcttacggttttacccgtttcctcacagagtgcactttcttttatgatgttcaatcatcaatcgacactcccagcgtttctgtcatcttcttatattcctgtgaaaacttttctgttatcggaccagggatctgtgtaccaatcttctttccatcgatcattttaaccggaaccacttctccgactgtaccacagataaatacctcatccgcattataatactctgaaacagatacgtttcttacctgtacttccattcccatctcttttgctatctgaatcattgtttttctcgtaattcccggaagctgtgaatctaaagtcggaagtattaatactccatctttaatcatctgtaagttcgtagagtttgtctccgccacataaccattctggtcaagcataattgcttcatccgctccctgacggattgcctcacacgccgccataatctggttcagctggttacagcaatgaatcttcggatccatgtaagacggggaatagcgtttcagccaggttgttaccagcgtaattccctctttattgaaaatagggggtttctgatccacacagataacgatcgacgcattcgtcacatttaaagtcggatgcatacctgtctgtgctttaaatccgcgcgtcacctgtaaacgcatatgtaaatcagtaaatcctgcatccagatttcgacgaatcagctcttttacaatttccttcatctcatctttggtctttcctatatcgattcccagcgtgtagcaggactcatacagacgtttgatatgctcatccagacggtatacttttcgtccatatgcacggattccttcatatacgccatctccatgctgaaaaccactgtcatatacggagataacggcttctgattttttaacaaaatctccatttacataaaggattgtatctgcaattttctgtccgtgtaacataatagaaccatcttctgtcaactgtgataacttatacatatccgttcctccttcaattatctttttatttctctgattgtcattttggtataatggtaaattggtaagtccatttacactatgatcatatcacatttctcctgtatgtcaatattaaaatttataactgttataaacacatatttatgtgtctaatgttatttgattcattgttggatttttacagaatatagtctagtatttagttttactttttcgcaattcaacgcaaaaaaacagacagaaagaataaaatttcctctccattctttctgcccgtctatttttattatattttattaaaagccaactaagcagggcgcatttttatgcctcttcccgctcttcctccggcagcaggttcgtcatgctctttaagctgatcgccagtgtcgagctgttgtgcagcagcgccgacatagacggtgtgatgataccagccacccccaagagaatcagacccaggttgaagctgatgacgaaacggtagtttccatggacacgtttcatcagatccatgctcagatgacgcagaagcacgacttcatccagggaatctttcttgatcgtgatatccgcgatctctctggcaatctccgcgccctcgctgactgcgatgcccgcgtctgctgctgacagggccggtgaatcgttgatgccgtcaccgatcatgataactttgtggcctttcgccttctcctcctcaacaaagcgcgccttatcctccggaagtacctcggagaaataatcatccacgccgaccctcttcgcgatcgccgctgcggtccgctcgctgtcgccggtcatcatgacaatgcgcttaaatccagcctcttttaactggcggatgacagacggtgcttcctcacgcagcggatcctcgatgcagataacggctgcaagctgtccgccgattgccatgtaaagatgggaacaattttccggaaggttctcaaacttctcttttccatcctccggcagtgtgcacttctcatcctcaaatacgaaatggtggcttccaatcacgacgcgttcttcgcccacataggtagcgataccgtgcgctacgatgtaatccactctcgagtgcatctcctcatgtaccagatgacgttttttcgcttcctgtacgaccgcgtttgccatcgaatgcgggaaatgttcttccaggcaggctgcgatacgaagcagttcttccttctccatgccattgaaagatactacatcggatacaaccggttttgccttggtcagggttccggtcttgtcaaatacgatcgtctccgcctcggcaacagcctccagaaacttgccgcccttgaccgtaatgtgatgctggcttgcctcacgcatcgcagacaggactgcaagcggcattgccagcttcagtgcgcaggagaaatcaaccatcaggatcgacagtgctttcgtcgcgttgcgggtcaacagataggtaagcgcggtaccgcccagactccacggaacgagtgcatctgccaggttcgacgccttgccttcaacggatgatttgagcttctccgaatcctcgatcatctgtacgatacgctcataacgggtggaaccggcggatttttctaccttgaaggtaatctctccctcttccagcgcggttcctgcgtaaacatagctgcccggctcttttctgaccggctgggattcgccggtcatcgaagcctggttgatcatcgcctcgccgctcactacgacaccatccagtggaatcactgtacccatatggacggtcagctcgtcgcccgcggtaacatccgaaagcggtacaaggacttcggtcccgtccacttttttccagaccttttccacgttcaaggacatgctccgcgccagatccccaacggatttcttatgtgtccactcctccagaagctcaccgacgccgagcaggaacataacggagccagccgtattgaaatcgcggcgcagaagggaaacactgatcgccgtcgcatccagcacctccacatgcagcttgcgcttaaatacgaggcagtggatacctttcacgatataacggatcgcctgcacggacgtgtataccgcacggaccggcgccgggagaaatgtcttcgtcgcaaagcgggtcagtaccttctgaatcagcttttctttgtactcctgattcagggcgcgtccgctgcttttaactgccatctcctgtttttcggtaatctgaccatcaaacgccgctacctgtacgagtaccgcctcccgatcctccttataatagataaccgcatctgctgtccgctcatacaccttagccgccgtcacgccgtccaggccaagcagatactgttccaaaacgtccgcttcgcgcacggtatggaatttccgggcaaggctgatacggattcttcctttgatttcatgctttataatgaatttcatgattcatcttcctccggttatagaagagctgccgcgagacagcatcccatgctatcttgcggcagccccccctgttatttagattcatgtattcttggagttgctattactgctctgccttctcagcctccggtgcggcctcggttgcctcagcagtctcgttgaaatcctcatcctcaccaaagctctcatagccgcgagcctcgttgatctgctttgcctcagccaggatgtcctcagcgttctcctgaatattggtagcggtggtcatcacacaatcacgtgcacgaagtccggctgctacgcagtttacgtaaaatttctttgcatcctcgctgccaagaatcttaacacctgctgttccgaacaaaacgccgcctgcaaataaacctaatttttttaatttgaaaatgtccatcatgattactcctcctctgatattatctaaattatattcacatatgatttttgaaaactatttattccatttcaaatgcgaatatagctgcgtttaatgactcatttctgaggtacaagtagatggtaacagcttacccccatgatagtcaaacctaactttccttattgagattttttatcaactggcatccgaagttatacttgacagctcatcctcattccgcagagaatactggcggcaacggtttaaaacgccgatttcttccagcactgcaatcatccggtacaccgttgccttgccgatccccgggtcgcgcttggatgcctcgtagtagatctccttacaactgctccatcttccctccaggatcacatccaacatgatctttctttgatcggtcatccgtttcccccgtctcttcagttcgctgataatctgctctctctgctgcatcgtatcatctctctttccatatcttctaaattatttttccgcacatctgccgtttccgtccacaacccggctttttattagcgcagactaactgttcgtttaaaatatatagcatactctgcttgccactctttttgcaagtactaaattccgcttttgcctctggctcagcctcattaagtccttagatacgactcgcactaagtgctcatattatattgtgtttcatcaaaaacaaaacataattagcatgaacaaactcgggttagaatgccgcaactcaagttagatgtctctaaccttaatttaaagactacctctttttttctcatctgtcaatgaattttcgaaaatatatttgattttcttctctgataatggtaaggtactcacagaataatcaattcagacaggaaaggaaggatttttcgatgagcttcaaagaaataaagccagaagaattaaattttaacccgtttacccgcatcggttccgactggatgcttttaaccgccggcaccgaggataaattcaacaccatgactgccagctggggtggcgcaggcgtattctggggcaaaccggctgttacctgctatatccgtccccagcgctacaccaaagaatttatagacaaagaagaactcttctccgtcagcttcttaaaagacggacaccgcgatgctctcaaactctgcggctccgtatctggccgtgaccacgacaaaatcaaggaagccggcctgaccccggtcttcatcgacggcgtaccggcatttgaagaagctgacaccatcctcatctgccgcaaaatgtaccgcacatccatgaatccggcagattttatcgataaggacgctgacagcaagttctatccggaaaaggactatcatgatatgtatattgcggagattgtgaaagcggttgtggctgaataagcagagccgttccatttaaaatttaaatcccacagggaatgccgctgtctggtctctagctgtgattgtatgttttcctgacaggcaatcacagccgaaaacgctgatttgcagcattttctgtgggaatcctttgaatgatcctttttggtttatttgtttatattgtatctttatttattcctttattttgccaattccagcatctgcgccagcggaccaaccgccctctgccgcatcgcctcatccatctccacttcctcttccggattttccagcgcccgcagtacgctgtccagatgaatcttcttcatgttcgggcaaaactggcggtgacctacggagaaaaacttcttctccgggttcttctgcagcagttcatagaacacacccatctcggtgcagatcaggaagactttctcatccgaattcgtcgcataatcaataatctgggaggtacttccgacaaaatctgccagctccagcacatcgccggtacactccggatgcgccagcacgactgcctccggatacagctcttttgctttctttacatcttccgcatgaatactcttatgtacatggcagaaaccgtcattgaaaataaaatgtttctccggcactttttttgcgataaaacgtcccagattctcatccggaataaagaaaatatccttgttcggcagtttttttacgattttgagtgcattcgatgacgtaacacagacatccgattctgccttgatctccgccatcgagttcacataacagacaacggctacatccggatactctttgcgtacttcgcggatcttctccacctcaaccatgtgagccatcggacagtccgcgctccggtctgccatgataaccgtcttctccgggcttaaaatcttcgcactctcgcccataaatgacacgccacagaaaatgatcgtcttctgcggcaccgtcgtcgccagctccgccagataatacgaatcgcccacataatcggcaatctcctgcacttccccatcaacgtaataatgtgccagaatcacggcatccttctctttttttaatgtctcgatccgctgctttatctcctgatccatctctttttcctctccttttttcaccgctctgttcacgcttccgaatccccatcgattgacagaaaccataccatttttccgacagctgcggttcattttcttctttacaatgtatccgacatctttgccacgccatatttctctgtccatatagcttccacacggtaaacttctgtgattatacctctaagagaaaagctgtgtcaatgaaattttgacactttttattacatctgtcttgtcacatagcaattcatctacatacagactgaaagtctgctttgccggcgcttcaaccagagcagccaatatgcatttatgcaatttttttgtttcacaaatgtattttactgtgcaacaaaaagtcaaaccaaaaatcggacggtttttcgctgttcaaaccgtccgatctacatgacatatttataattttatcgctttatgcacatccgcccttattgctgaaacagcaccagtctcgatacctttccttccgcgtccgcccagatcgcgcatttctttcccgattccagatcgtctgcggtcacgatgttccgggttaaatacggcagaatacgtgtctcagcgctgaccgtataggtcacgccatcctttgctttcacacagacggtatcatcattctcggcactctttttcaccgactcgatctccgtgtaaaccggcacggcgctcacatcggttacatggacgaagaagagctgtccgttcgtgatcggcggctcgctcatcgtcatcgcctccccgatgtaggcatatacaactgttcccgtctccgcctcggtcatatcgaccggattgcctgtctctgcgtcaaaaatcggcgtttccggtgaaaatgtgatcaccatctcgccggcactgctgattcccgactgattgtcaatcgtgacggaatcgctggtaacctccgaaaccggaccataaacacaaatagtttccgctgcagtggcctccccagctgactccgtatcttcgacaaccggctttgtctcctcatcgcccgcttttgcactggaagcgcacccaagcgcacctaccgacagtgctgcacaaattcctgcaatatataacgaattttttttcataatttgaatctccttccgctgttcttatgcctgctccctgtctgctcccagggacttctctgaaatttttcaaaacttcccaggcacttttttgtttctaaaaccagtgaaatatttttctttatactctgtattcagctcttctatctggttttctctgttctaacagtctaccctatttcattcaaaagtaaa

SEQ ID NO: 11035 - DNA, 7268 bp, Unknown
  gut microbiota DNA sequence
ctcaaccggacggtaggaagtcttcacaaccattggcacattgcagcgctcggtgaagattttctccagaatccgcaccagttccggtgccttatcgcgcacgatcatcgtgtcctccagcgacagcttcaggtatccttcttcttcaaaatccatctccgccttacggaacatattataaagaaggatactgtaatttttcagctccatcaaaatactgtcccggtacacattcatgagtttttccggcgtgtactggctggacagatgatatttctccaaaatcttgatcttcacccgtttgcccggaaataactgctccttgatgcctttttccagatcgtagatactctgcttgtgcatcaggcgcgggctgtcgatgtagacgcggatcacgctccggtcacggttcgtcgagatcttctcgatcccgaccatttcaagcagtccccgcacattttccgcaatatgtaaatctggaaatacctccagaaatgttttcattctatcattcctttgctttttttctcttccaccatccggtcaagctccgctttgagcgccggtaaaagttcactctccggcagttttttcacaatctcgcccttgcgtatcagaagtccttcgccgataccgccggctacgccgagatcggcttccttcgcctcgcccggtccgttgaccacgcagcccatgacggcaaccttgatatccagcggatatccctgtaccagcgtctccacctggtttgccagaccgatgagatcgatctgcgtgcgtccgcaggtcggacatgaaacaacttccacgccaccccgacgaaggcccagcgtcttcaaaatcagctttgccgacttgatctcctccagcgggctgcctgtcagggacacgcggatcgtatcaccgattccctgactcaaaatcagtcccagaccgaccgctgacttgatattgcccgcaatcacagttcccgcctctgtgataccgacatgcagcggataatgagtcttttttgcaattagttcatgtgcttttacacacatcataacatccgaagatttgatgctgataaccagattgtcataacccatctgctcaatcagggcaaccttatccagcgcactctcaacgagcccttccgctgtcacgccgccatatttctctaccaatggcttttccaaagaaccgctgttgacgccgacacgaatcggcacgccatactcttttgccttgtcaaccaccacctggatccgctctctggaaccgatatttcccggattgatacggattttgtccgcgccgcactcgatcgccgcgatcgcgagacgatagtcaaaatgaatatccgccaccaatggaatatgtatctgtcgtttaatctccgtcagggcagccgccgcctccattgtcggcactgccacacggataatatcgcagcccgcgtgctccagcgccagaatctgctcgacggtcgccttcacatcctctgttttcgtattacacatcgactggatcagaatcggattgccgccgccgatctgtcgttttccaatctgcaccactttcgtctcgtcccggtatcccatatcgttcctcccaaaccattcttctccgacacaaaatttccggcccttttcgagcgaatctttcatgcctttgaatcaaatgaattatcattacattaaatttctaatatcgttaaacaatacaaataacatcaacgtcatcaacgccgccatgcccgccatatggaccatgccctctttttccggatcaaccggcttgccgcgcagcatctccagaatgataaatacaagccgtccgccgtccagcgccggaatcggaagcaggttcatgacacccagattggcgctgagcagaatacacatattggccagattgacaagcacaatcataagtccgtagctctggctctccttgaccgtcgtgccgatcatcgacacaatccgcaccggacccgcgatatcgttcgagctgacctgccgcttcagaatcatgccaaggctgctgaacgtcacacggatccaatagcgcacttcatagaagctatactgcgccgtctgaatcacggacgccggtttccggtaaacgccgccgctgattccaataagatagcgtcccgcctcctcggaatagcgcggaaccatctgcgtcgtgtaggatttcccatcccgcacatactccaccgtgacactctttcccggatgaaactgcagatacgtctgcacatcgcggtacagataggtgcgcgtaccatttaagcgctcgatcgtatcgcccgcctgcagacccgcctcctgtgccggatagtcgtcctcaacactgacaaccgacgccggatcaaatcccacacagctgatcacgaaaaaggcgcaaaaccacgccagaatgaagttgaatacaggtcctgccaccacgactttaaaacgtgtccaggcagaaaccgcattaaaataagtccccgttgcgcccggaggcagcaggagccgatccgtttttccatctgtcagactctggttctgagcgcaggaactccctttttccgtctcacccggcgcatcatacccttcatcttcccccagcatcatacaagaaccgccaaacggaagcagcttcagcgagtaccgcgtcccgcctttcacaaaactgaaaagtctaggacccatgccgagcgaaaactcaacgacgcagattccgccccgttttgccaataaaaaatgtccaaattcgtgaaacagcacgatcaggctgaatacaatcagcgccgccagcaaacttaccaatctaccacctgctctctataaaatcataggtttcctgttctgctgccagaatctcttcgaccgtcggattctctttcacggtgtggtgttccatcgccgcctcaatcatatcagtgatggtcagatatccgatctcgcggtcgagaaatttctggactgcccgctcatttgccgcgttgaacacggtcggaagcgtgccgccgcgccgtccggctttgtatgccagggaaagtccgtggaaattctcaaaatccggcgcttcaaaggtaatctgtgccagctttgcaaaatccagccggtcgcccgccaggaagcggcgttccggataatacagcgcatactggatcggaagcttcatatccggcgtgccgagctgcgctatcaccgcgccgtcctcgtattctaccattgaatgaatcacactctgcggctgcacaaccacctgcacctgatccatctccacgccaaagagccatcttgcctccataacttccagacctttgtttaccatcgtggaactgtcgatcgtgatcttgcgtcccatcgtccagttcggatgtttcagcgcatcttcgacctgcacacccttcatctgctctctcgtccatccgcggaacggtccgccggacgctgtcaggagaatcttgtggatcttatttcccgtctcgccgttcaaactctggaaaatcgcgctgtgctcgctgtccaccggcagaatgcggacatgcttctcctttgccagcgacataatgatatgcccggccgttaccagggtctctttgtttgcaagtgcaatatcctttccagcattcatcgctgcgatcgtcgggcggataccgatcattccgactaccgctgtcaccacaatctccgcacccagctccgttgccactgcgagaagtccatccatgccgctctcgacacggatatccagatcgcgcacacggtctttcagttcttttgctttttcctcgttccagaccgccgcgatcttcggagaaaactcccggatctgtttctccagaagatcaatattgcttccagccgccagagccgttacttctatatctttattcgcccggaccacttccaatgtctgtgttccgatcgatccggttgatccaagtatcgcaatttttttcatttcttattctcctgtttctgtattttcatacatgctttcgttttatcgtaaaaacgtcagtgcaaaataaatcgccggtgccgtaaaaatcatgctgtcgaaccgatccagcacgccgccgtgtcccggaatcagatttccgtaatccttgacattgtggttccgcttgatcgccgacgccgccagatccccgatctgggaaatgaccgccgcaatcgcacacgccaccgcgcatgccaccatcggattgctgacctcgtccatcttcgcaccgaagaaatacgcataaatgcagcctaacagagccgatccgaccacaccgccgacggcgccctcgatcgattttttcgggcttaaaaccggtgccagacggtgttttccaaggagcattcccgcgcagtatgcgcaggtgtcacagccccaggagcttaaaaagatcagccagacaaggtattttccgtccgccattgcccgcacctgatacaggtaggaaagcatgattcccagataaaaaatgccgaaaaatgctactgtaatctgctcggtcccatatttcggaaacgtgaacacgtaaatgctcatcagcaccatcagggctgcaatcgcaagcagcgtcacataatgctgcccttcaaaccacaccagcccataatatcccagacatgccagatacccggcgatgcccggcgcttttttctcaatccccataacccggtaaagctcaaacataccgatcagggagatcgcggcggtcacacagtacagaaggacaccgccctttgtaaccagtaaaatcgcgagtactacaagcacaatcccgcttatcagcctcgttctgaacatggcaactcctccttatgccttgactccgccaaagcgtctgtctctttgattgaactgctcaattgcctttataagctcgtcgcggttgaaatccggccacaggcagtccgtgatataaatctcactgtaggcaagctgccacagcagataattggacaggcggatctcgccgctggtgcggatcagaagatccggatccgggatgcccgccgtatctaaataggacgcaacggtctgctctgtcacgttctccggcaccagctttccgtcctgacagtccatcatcatatggcgcaccgcgcgcgtgatctcatctctgccgccgtagttgactgcgatcacaaaggtcatgcccgtgtttgccgccgtctcgtcttccaggcggttgattccctcgatgatatcgctgtcaaatcgcgtgcggtcgccgatcattttgactcttacattatttttcttggcaatctttaaaagccgtttcagataaaaacggaagagctgcatcagcgcccctacttcttcagcagaacgcttccagttttccgttgaaaaaccatataccgtcagataacggattcccagtctcgctgcatcctcaaccgtctgttcaaccgtcacacacccctgtttatgacctgcggttctcggaagccctctcttcttcgcccatctgccgttgccatccagaatgagggcgacatgctgcggaattaccaggttttcgatgtccctttccatccagttttcctccataatattcccttaatagccagaaaacaggaccagccggccatccgcatctgcaatgccggccagccctgcttgaggcagcctgatttttacatttaaactctattgtatttttatacagtcatgatctcagctgttttttcttctactgctttatcaacctttgcgatcatcttgtcagtcagcttctggatctgatcctcgccatctgccagctcgtcctcagtgatctcgccgcctttttccagcttctttaacaggtcgtttgcatcacggcggatattgcggactgcaaccttcgcgccctcgccctttttcttaacatcctttgccagatctttacggcgttcctcagtaagctccgggaaaatcaggcggactgcacttccatcgttgttcgggttgatacccagatcggaagtcaggatcgctttttcgatatccttaatgagcttcttctcccacggctggatcagaatcatacgcggctccggcacagagatatttgccacctgctgtaacggggtcggtgcgccgtagtaatctactttgattttgtccagtacatgcgggttcgcacgtccagcacgaatggatgtatactcattcagcagtgcgtcataggacttattcatcttctcttcgtaaacttttaatctctcctgcataaaatcctcctagttatgcggtaaccactgtaccgttaatttttccgcgcattgcatttacaattccgtctttttcattcaggctgaatactgccatcggaacgtgattttccatacacatgatggaagctgtgaggtctacgaccgccagctgcttgtcgatcacctcctgaatcgtgatcgtatcatacttctttgcatccgggttgatcttcggatcgctgtcatagacgccgtcgatcgccttagccagaagaatgcagtctgcatccatctcaatcgcacgcagcgctacaccggtatcagttgagaaatacggatgacctgtaccgcctgcaaaaaatacgaccataccctttgagaaatatttattggctctgtcctttgaaaacagcttcgtcatggagccgcactcaaatggtgtcagaatctgtgtcatcatgccttcgctccggaagatctccgacacgtaaatacagttcatgaccgttgccagcattccgatctgatccgccttggtccgatcgattgcattgctctggcggcctctccagaagtttccgccgccgatcacgatacctacttcgattccgtcatcgaccgccgtcttaacctgtctggctacttccttgaccgtcgcttcatcaaacccggttttcttgtcgcctgccagcgcttctccgctcagcttcagtaatacccgctttaattccataattcggttctccctgtctatatgtacgttctgatgtacattttatctgtggtgaccgtaaaaagccgcgtcaccttatcaaagatattctaccacaaaaaatccgaatgtgcgatagaattttcgtaaatcctgtgcatcctttcatccttttcgccaaacgcctttctgtatacggattcttcgccctgtttttcttttttttccaaattttagtgcccgttttacttctttttctatttcaccttttcccgccgctctcattctgcccccagcttctcattatttatctgcacttatcctctgcaatctttttctgtgcattatttaacaaccttcctggg

SEQ ID NO: 11036 - DNA, 1787 bp, Unknown
  gut microbiota DNA sequence
atcatcatggagcagaagttttacatttgcaagcattgcggcaacatcattgccaaagttaaggacgcaggtgtccctgtcatctgctgcggcgagccgatgagcgagatcgttcccggcaccaccgacgccgccgtggagaagcatgttcccgtctggacggtagaaaacggcatcgtccatgtcaaggtcggctccgtggagcatcctatgctgccggagcactacatcgagtgggtatctctccagaccaagcagggcaatcagcgcaaggaactgcatcccggcgaaaagccggaggtctgcttcgctctctgcgagggcgatgaagtcgaagcggtctatgcctattgtaacctccatagtctgtggaaagcgtgattcatctttcaaaaatctgttgccatttctcaacccctatcgcggcaagtgtgtattcgtcctacttgtcacgctggcgaatgcggcaggcgctttgctgatccctaccatcaccgccgacaagatcaacattgccgtggagggcagacacatggattgcgatcctcggcggtgggatgcttatgaaaggcagcctgacccccggcacgttccaggcctttttccagtacatgaacatgtccagcgaaccgatcacagagctttcctatatgacaaactctctgcaatcggcgctggcctccatggagcgggtatatgagctgctggatgagccggagatggaagcagagccggaagcaccgaagcgaatcggccatgcgctgggagcggtggagttttcccacgttcgctttggccaattattggtgaatcgacattttgtttcctttatccactcatttttatgatgttccaagcacttgattcaaggcagaaagtcatgtcgcattacttaatactacagccccttctttatttcttcaattgtcatctcatatacttctgttactttttccattgcttccgatatccccggctgctctccggttccatctctcaaaagttctgtcaactcatgactaacctcatacagacggtcaaaagaaagattctgacacacccctttcagtgtgtgtgcaccgcggaaagcatcttcataatttttattttccaatgcctgttttaactgtatataactctgatcttcaaggaactttaatgcaaatctccgaatcagtgcttcgctgtgaaggcgtcccaagacagcttcatagtttcctccaatagcttcgtaacactcttgcattgtcatattttagtcctcctgtcaattgtattccactaattcatgaacctctgcgaatcaattatatacataccttaaaatcgtttttataacttcatcaatcacaatcggctttgacaaatgtgcgttcattcctgcatccagtgatgcctgaacatcttctgcaaatgaattagctgtcattgctataataggaatgttttttccatccggtctgtcattcattgccctgattgcttttgctgcttcataaccattcatttcatgcatcatgatatccatcaggattacatcaaatgtgccttccggatgatttctgaaaatctcaacagcattctttccatccacagctctttctacattcatcctgaattcttccaactgcacggcagcaatctctgcattcagttcattatcctctgcaagaagaacattcacacctgtaagattcaccttttcagaaatacctgtgtctgacttattacattccttatctgtaatttccaaaggaatatccacagtaaatgtggttccctcatgc

SEQ ID NO: 11037 - DNA, 236 bp, Unknown
  gut microbiota DNA sequence
accttatgaaggtaatcctttactgcgttctgttttttccgataaatccttttgatgtgtttcgatgatcggggatattttatgccgttttccacctgctgtgcataccatattgattgaaccctgctgatttctttgtgaaagtatctttccagcgaaagatattttcttcctagaataaaactccttccatttccggaatcataacaggtcatcagattatgaattccaagatc

SEQ ID NO: 11038 - DNA, 9711 bp, Unknown
  gut microbiota DNA sequence
atgtttttggcgggtcccaaggtcaaaaattctcctgcaagcaagcttgcgtcgaacttctgaccttttgaccctggtatcatatcaaattactttataagtataacatagaaaaatgtaaaatacctaacggaaatattacaattttaacaagtcctcggaaacaatttttcgataataatttttcgcataccggtacatcacgatcgtgtaatcgccaaattcgcgcccttccatactcttgaagaccgcccagagcgcccacaggaaaccgccgagcgccgcataggcatacgtgacaaagcgttcctcgtctgatggggcgtgctggaggtattcttccagaaggtggtcaagctcttcctgtgaataatatgaataaatactgcacatcgcaatatcaatgagcggatcgcacatgcctgcatactcccagtcgatcagacgcagggagccgtccggcagaaacaggaaattgtctgcaaccgaatcaatatgggagaggcagcaaggacgtttcagtgtatccagccgatccatcagttcattcatccgggcgcggaccgccgggtagtcctcgaacagcatttcctcatgtccgcggcagatcctttcataaaaatcaatccgttcccgaatgcggaacgtgtgcggaaccgtcacgccggaatgatgcagcttccgcagcatctccatgcaggcggccatctcctgcggattctttgcatccgcattccgagcgccctcataatactgggcgatcttgtagccggtttttccgtcaaaatacaaaatatgttcggtaatgccaagcggtgtgaccgccttgtaaacagcctcctcctctttccggttaatcagaaattctgttcccggacccggaatgcggcagatataatgttttccatccagttcaaacaggaacgactggtttgtcataccagatttgagacagcggatgttgtgtatcgcttcctcttttacattgaaaacgtgtgcgaccagctgcatggcggcattgtccgaatgattctgatatttcggatcaaacaggcgcagttcttccaggttttcaaactcatagacctgatccgccggctggcagttcatcgaaaaatccagttctttgatatgatcgacgacaacctgttcccagtaccattgttctgtgccaggctgatgataggcttcctcaatgagcggaatgagctggttggaaaaatcacgcgagaggaacgcaggtccatacatgacccaggaatcatgcccaccgacctgcaccgatgtgatacgtccctttttattagaagaaagacaccattccgacgtttcaccatccatataaacagaagagtaccatgcgccgcactcatatttatggtacatattgttccgaatccagttgtccgagacaagcagatacatattgcggccgcggaacagctcgcgggcatggtagatcgtagccagattatttttggtggcgtactccgggttatagaggagtttgacctgatatttgtcgatcagatattcaaacttttcctttaaataaccgacgataattgtgatatccgtgatccccgcttcatggagctgcttgatctggcgctcaatcatccgctcgccaaacacttccagaagcccttttggcgtttcaaacgtcagcggcacaaaccgagagccaaacccggcggcggtaatgacggcgccatccactttaaattgttccagatacttaagcccctgttcggtcagcagatatttccccgtatccatatccgtcatgagaaatgcctcctccaggcagtccccaagcaatttattcacagtccccagggaaagattcaaaatcgaagcaagctcccgctgggtcacatccggattctcatagaaactccggcagatcagtccatagcgatccatataaaacctcctgaattattaaattcttttatttttctcttatatattcacgtatttcgtcatcattatagatggataagagtgaaaataggttctagctgttgtgtgttcaaaaaataaaattaaaagtgatatatgaacattatagcataaacacagagaaagtaaacggaaaaagcaatgctgcggggggaagaataaagactgttactgggcacgtatgcgtgaacagtgacgaaaggcttgataaggtggtctgtgggaaataagaaacgtaaaaaatactggaaatataggcattttggcggttaaaacatgattgtacaaatataaatacaattacgaaactataaagaattttcgtaaaaaatccgtaagaaaatgcacagataaatgttatggtattttggaaaaacgtgtattataatgtgggtgtatcggagaaaggcagtacttcacagggaagagaaacataggaaatacagacaatattccacttcaaaataaaaagttggaaattctgtaaaaaaactattgataattttccatatccgaagtataatgacctggtaatgcagttaggatttcgagaaaaatatttcaaaaagtaaaaaggagagtgcattaattatgagaaagcagactaaattagttgcagtactttctgcagcagctttactcgctatgggtgcttccatgacttctttcgcagctggttgggagaaagatgacgctggagtttggcactactatgacagcgataatgagatggtaaccgatgagtggaagaaagatggcggtaaatggttccatcttgacgaagatggtgagatggagacagatacatgggtagatgatgactactatgtagctgaagatggtcatatgctgaccaacgagtggaaaaagaccatggctgatgaggatgaagatgatccggaagacggcggcgagcattggtactacttcaacaacaaaggtaaaaaagttaccgatacagataagaagatcaatggcaagacctactacttcaacgaagatggtgagatgcagtatggctggcacgaggaagacggcaacgcatactacttaggtactgaggacgaaggttggagagctgagtctcagtggctgtggcttgagaaatccggtaacaatgagaacgatctggatgatgatgatgatctggaagtagttcttgattgttctgaagatgacaactgtgatgatgagggttggtactggttccagtcttctggtaaagcatatcatgacacaggcaagaagaaaatcaacggcaaatactatatgttcaacgagcacggtcagatgctgtacgagtggattgatggtaaggctgttgaacagggttccaacgcacagcttgatggtaaccttgctaagggcgaattagctacaaccagcgtaatgagatactacaacgaagttgaagatggttccagaggtaacggctggtatcagatcgacggcgctgaggatctggatgctgatggtgatacagactggtactacatcgatgacggtgaagttaaatacgctgatggcggttccaaagacttcgctacttacgatgatgacggagctgtatacgttcagagaatcaaaattgaaggtaaatacttctccttcaacgaaaaaggtcagatgcaggatggcttacagtactgccaggctgacggcggattctactacttcgatgccaacggctatcagaagactggccgcgtaacatctgtagagaacgacgatgatgattacacattctacttcaacaccaagaatggtaagaatggtcttggctacaatggtctgaaagatgattatctgtacttcaacggtaagagactggatgcagatgatgactacagactgtactactatgatggagatatctatctgaccaataccaagggtaaagttcagaagacctccaagaagtatgacatcgagaacaagggcatcgctgaggatgatgtaaaagtagagatcagcggcaagaaagttgtatccgttactttagctagcggtaagacaatcaaagctgaggatctgattgctgatgcagaagctcagtttggtaaagatgttgttacagaggatcagatcgtatctgtaccgttcatccagctgtatgatgacgatatttatacctacacaaatctggctggtactaaggctgttgaaggttggttaggattaaacaaataattaatctgaattttattcgattagtcatttgacctaggataattgagaagcggtatttcaggatatttcctggaatgccgcttcttttttagtaaaaagagctccgatacctcgaagtgtttcgagatggcggagttttttatgtggtcgcaatgtaaatgaagcctgtctgtatgactgcatttgccctctgtcagttaaagaatagaatatgcaaaactctctgcagtactatcattttgagtttaagcatatcttccaagtcttgtttcactgattctttcatgatatgataataaaaacaacaaattatcatgatgtgtgataaacgtgcagttttattaaaaagagagggagccatatgggtatatatttaaatcccggaaacgcagctttttcagaagcggtgcattctcagatctatgtagataaaacagagctgatttcttataccaacagtgtgctggcaacaaaccagaaaaatatctgcgtcagccgcccaaggagatttggaaaatccattacagccaatatgctggctgcttattatagtaagggatgtcagtctgatactttatttaaagaccgaaaaatcagctgttcaaaagattataaaaaatatttaaacacttacacaactatatttttaaatatccaggaatttttaagtcgaagctctaatgtagaagaattgattcagcggatccggcgttcactcatgagagaaattcgccgtgaatatccaacgattgatttttatgatgaattagatctgacggaaaatatgaaggaaatttatgctgaaacaaatgagccatttattataatcattgatgaatgggattgtatttttagggaatacgcagaagataaagcggctcaggaacgatatctggattttcttcgtgattttctaaaggataaggcacatatacatctggcatatatgacaggaatattgccaataaaaaaatacggtacccattctgcgctcaatatgtttgatgaattctcgatggcaaatccaggtgttctggcgcaatatgtcggtttcacagaaaatgaggtgcgctgcctctgctcagattatcaaatggatttggcagaaatcaaagaatggtatgatggatatcgctttgaaaaagcctcttctatttacagtccgcgttcggttgtggctgctatgacttctggtatctgcgattcttattggaaccagaccgaaacatttgaggcactgcgcggatatattgacatgaattttgatgggctgaaagacgatgttctcagcatgatggccggagaaatggtaccggtcaatacaggtagtttcagcaatgatatgacgacatttcacagcgaggatgatgtcctgactttgctgattcatctgggatatcttggatacgatttcagccataaatcagtttttattccgaataatgaaatccgtggagagtttgtaaatgcggtttcggtttctcaatggggagaggtctcgaaagcattaaaaaactcagctgatttacttaatgctatctggagaaaagatgaagaaaaagtagctgtctatatggaacaggctcattttgaaacatcccatttacagtataataatgaaaatgcactgagttatactgtatcactggcactctacgctgccagaaacttttatcaggtttatcgtgaatttccatcgggatctggatttgcagatatagtttatttaccgcgaaaagaatttccggataagccagctttgattgtcgaactaaaatggaacaaatcggccgaaggcgcaattcaccagatattaaaaaaacaatatttccagaatctggaagattattcaggaaatatgctgctggttggaatcaattatgatttaaagacgcgaaaacatgaatgtaaaattttagaatttaaaaaatgaaaagcaagttatttgtcacggcggcagtaaaaagagatgttgattgagaaatcctctttttgcggccgatgtgatttgacatccaattcaaatctgaatcattaagctgatagcttgatataagaggactccgtcacttcagagaagtctgaggtggcggagtcctctttttgtcaaggtcgaacgttgtaccgtttactaattcaatctttcaaatataccaggcagcgtttcttaaaaaaagcaattccataacacaaaattttatcataggaatcctcaaattcttttgcatacattttttcatcgatctgggcaagtgctttttggcaggattgtttcatctggtcaagcgtgctggaatatttcacttcaaaaagggccaattgtccattttcagagtcgtagacaatcacatcgcttcgtccttctccatgctctttattcgactccaccacataaccggcaccagtaaaaatacctgccagaaatgcatggtaaaagtcttctcggtaatcatgataactgatggtttttcttaaaagtttattcatctcatccgtcatcctgtcgctgtttccatcccataccgcatgaaataattctgtgcggttccaatgcttcgttgattcgttaaaccattttataattgttgactcaaaaatatctttgatttccctattcggaatcatcaacgcggttgttccatctggaatagtttcttgaatatccatctctcgaacgcgcgtcagataaccggttaaatataaaatactccataagttatcctcggaagaatgaagataatcataggttaaattttcttcaatcttttggaaaatatatccgccggacaataatttttccaatttcattgtgatactgcttccagcataatcaatgaaagagcgaataattgcattatcgcttgtattcttccaataactctcaggcttcatggaaggattatgctgaagatcccgaagataattcatcacatcccacgggcaatatacatcaaagcatccgaaatgataaccgtcataccaggctttaatttcatccgaatattcggcagtattggattcctttaaaatctgatttacatcgttttgtgtaaagccaaaatattcatttaatcgagaatctgtgatggtatccgaaacaaaattattggttccagtgaagatactttctttagcaattttcaagcatcctgtcacaaccgcaaagcagaggctggaattatcttttaatgaggtactcatcattgctttcatgatttccagcatttcctgataatacccattgctgcttgctttcgcaacgggaacatcgtattcatccaacaaaagaataactgtcttcccataataagcctgcatcattttcatcaaaatcaggatagaaccctttacatctgttgcagatgcagtctgattttttagtcgtttaaaaatctctttatatgcatcgctgacggcatcgctttgctccaaataagagtattcgatgcatatctgggatatgacaaatttcagcatatcaaaagcactgtcaaatgtaatcccatctacatccttaaaggtaataaaaagagtcggacgctgattcatccatgtttgacaaatagctgattcatgactgatttccaaatcttgaaataacgaatggttatcatgtcgaatatcgaaaaaatgttccagcatactcatagccagcgtctttccaaatcgtctggggcgagtaatcagcgtgacgtttgctgtgcttttctttaataattccgaaatgagtcccgttttatccacatagtaatattcattttcacgtatctgagaaaaatccgagacgccaaccggaatattaagattcgtcatagaatcatcgctcctttcgaaaaatcaggctgtttttattatcatatcatgaaaggatgggggaaacaaggtggagaaagagattgaacagatagaaaaaagtcccctgggaatcgccctaacaaaaaagggttgttacaccatataagtgcacaacccttttcattttattcagatctgccacacgtttgtgtaacagctcttctttaaatgttatttgagatatagattatttattagctacagcgttctgtgctgcctcgtaagcatctgtattctcgtagtgtgtaacgcccagtgcatcctgataaattgcattgtcgaacagctcaatcttcggtaatgtagcggcgttcttataggtgccctcagaaccatctttagtagaagaggcaatctcgtatgtgtttctgaacgtaaacttaacgtcatcaccaaaattttctacatcatactctttagaagtagatttctgaagtttacctttgttgtttaccagatagtatttcttatctacaacatagattctgtaatcatcatctgcttccagtctcttgccattccagtaaaggtaaccggatttctcacctgtataaccctgaccattcttaccattcttggtctcgaagtagtaggtgtagttatcatcctcttcttcaacattagcaatcttgccggtcttcatataaccatcattgtcgaagtagtagaatttcttatcgatcatctgtaaaccagtctgcatctgaccaatttcattgaagcagaagttcttgccattgatcttgatcttcttggtatatactttagcaccgtcatcagttaagtcagtattgttcttctcaccgtcatcagctttcttagccttaccgtctttgaagtaataccaatcggtatcatcgcctgccttaagtgcatcagcaccatcgatctgataccagccatcagctctccagccctcttcaactacgttcatgtaacgtacttcagaagcggtagcttcgatggaatcgctatccagttttgcattggaagccacgtttgctttaacaccattgatccactcatacagcatctgaccatgattgttgaagtagtagtatttaccgttgatctttttctgcttagcgtctttgtacatcttaccgtcgctaccgaaccagtaccaaccttcttcatcacacggatcatcattctgagaatcatggcttacggcatctgctgcatctttctcatcatcatcttcggaatccggagcagctaaccacagccaagaagagttggttctagcaccgtcatcctcttcgcctaagtagtatacgttgttgttagaatcagcataccaaccatactgcatttttccatcttcatcgaagaagtaagtcttgccattgatctttttatcatcagaagtggtctttttacccttgctgccgaagtagtaccagctttcgccatcctcgtccggatcatcctgatcgtcatcggacacggtcttcttccactcgttagtcagcatatgaccatcttcagctacatagtagtcatcgtctacccaagaatctgtcagcatgttgccgtcatcatccagatagaaccacttaccaccgtcttttttccactcgcctgttaccatctcatcgtcgctgtcatagtagtgccaaacaccagcgtcatctttctcccaaccagctgcgaaagaagtcatggaagcacccatagcgagtaaagctgctgcagaaa

SEQ ID NO: 11039 - DNA, 353 bp, Unknown
  gut microbiota DNA sequence
aacacccgccccggcggcccccgcagcaaaggataccgtgctgtctgcctgcctgaacggcaccgtcgtcccgctggccgatgtgaaggatgaagcctttgccagcggtgtactgggggacggcattgccattgagcccaccgatggtgaactggtggcacctgctgacggtgagatctcctccacctttgagacccaccatgccgtgggcatgaccacggctgacggtgccgaactgctgatgcacattggcatcgacacggtcaagctgggcggaaagcactttacctgcctcgtcaacgagggtgacaaggtgaagaaaggccagccgttgatccgctttgagctggagg

SEQ ID NO: 11040 - DNA, 4819 bp, Unknown
  gut microbiota DNA sequence
ggacaatatcagtataaatatcatattgatggaaagcaacggtgtacaaggggtacaaacaagattaaaaagaaaagatagatttgaaagtaagtagagtgggataatccagaagttagagcttagattttccactctacttgaacgtggtcgctagttgcgctgattgaaataatcaggccgtcaacggctttccttttgtcgtcaaattcaatgctgtcccaatggtcgaggtaataagagagttcctgctccttttggggtgacattgtttcaatggacatttccgcaatctcctttgaaatggtctggcggcgagtgtccagttcttcaatttttttgttagcataggcaagaagtgttgcgttggctccggttagcgtatcaagtagtttttcaatctcggcttcaacttgcgccagttcaatttgatgggcggtcagtttgggattgactttttcctcccggctatggcggacttgaaaatttttaaatctcgcccgcatagcactgaaaataaattcctcaaattcagatttacggattttaccacagcccgggcagcctttattttcagtccgtttactacagcgaaaatagccttcgctgttcggaacgtgtgttgcctttaaggcatatccgcaacacccgcatttaacttttccggcaagccatgtatttttcggcttacgtccttgttgaaaactcttatttgtcattagcttcttcctgcatttcagccatacatcagacggtatgagcgcttcatgtggagcgattacaagtatctggtctttcaggctcctgtctttatcctccttcacgtcccggccctgatagagataacagccattggttccggcaaaatcggaagcgtcattgacaatagccgccccctggcttttaaaaaattcgtagagttctaaatctgcttgtgcgtaaacaggatttcttaaaagctgtgaaataaaggtacggaatagcgatttaccgtaaactttgatgttctgttcctcaaagtaccgtgtaatgtcaccaaaagacgtttccggctcggaatacatttcaaacatgagctttacatattgggaagtttcggggtctgccaccatcttttttgtgcggataccttcaaccactgtcggctccaactgataaccatagggggcctgtccgctcatgtgaaaacctttcaggcaccgggagtagtaagcgtccgtgacgcgtttctggattgtctcacgttcaagctgtgcgaatacgatacaaatattcagcatggcccgccccattggggttgaggtgtcgaacttttctgtggacgaaacaaactccacgtcatattcctggaacagctccatcatgtttgcaaagtccagaatggaacggctgattctgtccagcttataaacgattacccgccgcacccggccctttcggatttctcctaacagcttttgaaactccggcctgtccgtattcttcccggaatagcctttatccttgaatactttacagcttccgcctttcagctcatacttacaaaaatcaatctggctttcaatgctgatactgtccttacggtctaccgactgtctcgcgtatatacaatcttctctgataatgtccatattgggctccttccgtatggaatggagctaccaaccttacaattatattataccataggcagccccggacaacaatgttgcggttgattagtaaaatctgtccgtgtatttactgaacacatcatataagtgattttcgatttctctttttcgcttgttcttttcatccggggatagtaccggaattagattttccaatacgataagtttcccttgaaaatatacggattgtttttcgctttggtatgtaacagattgaaccatcgaaaacctccacttttcagtacggatgaacagcggccagcttccctcttgtctgctggggaaacctaaaaaagcggctccctggaaggaactgccctttgagctttccccagcctcgggccacgttggcccgaagctaataatcgccgttataatatttctgttcagcctcgttgagtgtgtataagtcaaacactccataaagctgatttactacacggctaatatctttatgggtgaatccacagtcctgcatggccataatcacatagccccggcaggcgtcattactccatatattcagcgttaattctggactagatatattttccttcataaaattctcctgttcatagaaaaatatggggcccagccagaacggttgccctatcatcagacagtaatagaggaagggccccacaggttagaaagttttttcagatagaccggacggacagttggctttttgtcccatagcatttcagctctccccattctgatggcaaggcgatctcattacctgcgacggctcacggttcgcaacaccgctgcacgctcggattgtgactaatcgcaagtatccgggttttgtgttttgtccggcagacctgccacagtctgcctacggcatgggcctggtcgctctctctagtgtaaaaatagaggtcatggcgggcctgtcactggacacaagcacccttcgtatccgtctatcttttattcagttttcaatctgcgtgaggcgtgtcccgcttcgggccaatgtggcccgaggctttgactgcctctcataagccatttcatttttgaggcgaaatcggtacaccttataaaaatttttttaaaattttttccaagttccgaaggccgcgctcaatggcgagccgcacgaccttttcatccacaccctcggcccgggcaatgtcttgtttcgtcaagccgagaatgaaatgagcgtaaatgcgctttgcctgtttgtcgggcagtcgtgagatggcggtatagagttcttgtatcgtcactttacgctcatacagttcatagggagagaacgcaacgaaaagcgcctcatgctcaattccatcattccgatccagggagtaataggctttgtgccggtatgtacgcagacggtaagcggcttccttccggtcaaactccttgaacatttcaacaacatcttctggtacttccataaagtagtctgacgtataaaaagggtaatagtcccgtaaatttataatagccatattgaacctccgctttgttttgtgatggatggacaacaaaacagaagcggcggggagcgtatatgtaggctgaaatttctgaaattttcaaaaaataacagtgaaaaatctataaaatagtaaagatggctactcgttctaaaaaagcctcgacagcttatctcaagactggctctgtttcgatagcaaatcctgaaataaggtgtcgaacataaaaaaagctcaaacaaataacagcttgtttgagccttaaaaaagtttaaattggaataaaactcctcccatctaggaggaggtaaagcaaaaggggcgttgcttcatctattttttctcaataatctaactcatgttattagcaacctccgcgtaaaaatctcgtagttcttttattatcatataatgtattttttgcaaaatttgtcgtagataggaggcaaaaataaaaaaatagagtagaggatatgttaatggttaacgtacctctactctatctaattgttactaaaaattttcttttaaaaaggttgttacaaaacagactcaatttactatatatagtatatgtcaattattaaatctaccatatacagaacattacttttctctttgcaacaacccttttaaattgtataattgctttcacttaatcagcattattttttatctgattgaatagccatcctataattcgagctatacagtataaaacaccaagtccaaggacggagcatacaactagaaaaaatatagacattgccgacatatttacatcaacacctttttgaataggactctacttatattattcttaatttaatacggtagaaacttctccattaaaaacttccgttcttaaagcgaaagaaagtgttcctactccgccgactacatttgctctcatagagccagtcacttcggccgctttgcttgaggtagatgttgcacggccaatggctaaactttcatcttcaaccgttccgccaacacagtaggtatttaaatcacgtgcattagaaattttccactggctaccactctttgataagtcaaatctgtaatccatacctgcgacaccccaaaatgcatccgatttccacgttccttcagtagcaggatcacgagttaaaggaggcgtatagctaagtgtcactgttaccggctgaccgtccttctcgaaatgtaatgtttccgaatagggctggctttcgtcaaaattattcagatcgacactgaatgtttgtctctgttctggagaatcagcagcaagagcactaaatgcgctaccaactaccatgagactcagcgctaccaacagacccaatgcctttttcaaacctttcttcataaatgacctccttgagactttaccatagtaacaaactcagattttttagcgcccaccattatgtaaggcactattctctcaaattctcctcctctatagccccaatggtattcctccctttactaatcggttatgagctttttataactaactgtagtataccacagaatccctatatatgcaatataatctaaaaatggtaaataaaacttaataaattgttaattatcaacatatatcgtatatttttctgatataaaaaccgggtattcaagttttgtgttttgatgtttgagttaaaacgataaaaagaaagagaacttgttgat

SEQ ID NO: 11041 - DNA, 727 bp, Unknown
  gut microbiota DNA sequence
gagaactgagggggaaaccgaagctggtctgtgagaatcatgcgatgccggtattctatcgggatgtcatgtatagggaagcagaaccgggagaagatacggcttatttaaagctatttgatgggcgtgagtggaagtggtttcaggtgaaattacttcataccgatatggaatatcttcgaaaaaagtggagcgggaaagaggcatctgccccaactttggaaaggaaacatcataaatatttccttcggttttcatacacagaggaagtaaccttatcgaaaacagctgtaaaagagcaggtgatatgcagtgttgatttgggaatcaatacggatgcagtctgcagcatcatgcgggcagatggcactatcctgggacgtaaatttataaatttctccagtgataaagaccatttgtatcatgtacttggcagaatccgccgttttcagagagaacattcctccagacaggttcaaagccgatggggttatgcaaaaaggctgaatatggaactgtcccgcaaaatagctacggagatcacgaaatatgccgtagaatatcaggcagatgtaattgtttttgagtatctggaaatgcagggaaaaatatccggaaaaaagaagcaaaaacttcatttatggagaaagcgggatattcagaagctatgtgaacatcaggcacatcggaacaggattcgtgtgtccagagttagtgcccggaacac

SEQ ID NO: 11042 - DNA, 112636 bp, Unknown
  gut microbiota DNA sequence
atagtaagaaatccggagaaccatagcctatgtatcttccagacaggaaagcagtataactgtgatttgtcagcaacttataatatcggggcgagatattttatacgggaacttttaaaacccttgccggaaacggaaaggtcttcactggaggcaaaagtacctgcagtgaagcgtagaacctcctgcgtttatgcagatttgagaaagctttatgtagaagtaaataacttaaaagcggcataaatacaggcagatatacagcggactacctgtaatgtggaaaccagccgtatccggcgtggaaaaagtgcgtatccgcacgaattctaagttactggcgtatccgccgatatttagtcttgccgtttaaaacggccgagaagcatgtgactttagccatgtgaggttcacccaacggcagatcaattttgttcataagattattaatcatatggagcagaatgggtatatggagaatgtggctgttttgcagaagcctccgtttgataagccaattagttttttaaagttgtttgatgtgagaacgagaacagcgcttatgaaagcgattaatgatgtccgggagaatgcggttacagtggcgggatgatgaaaaaatgacaggagactgcggaggcagtcagtatagaagaatgaaagaagcgaacgactgcgtattgtgttagaaatagacagtcgtttgctttttgaacgttattttttctttttaaaatatcgcagtgccaccgcatacccatagagcaccgccggtataacgatcgtgcagaacagcgatgccagcagcagattttctgccagtggactgtccatcagggcgaagatgatggaagagacgtagagggtgattaggataacagcacccgtcagcgccaaaatgcgttttgatttcatatatggtatcctttctaattttataactctataaaaaagagtgattggaatttgtaatcatttttatattgtttcaaaggcagattggatattgctgtctttgatgaactgtcttttattttattattataaaggatgtaagaatttttttctatacttttcatttgcggtgcggtaaaataagaagagatgtggcaactgttcacagttttttgcttaattatgaacaagaaaggggaggcacacgatgaattggaagaaaaaatttatgtgggcagcatcctttttagtatccctgtttgtttgtgggacagcgctggcggcaggtaacgatgcgtttgcggacaccccggcgcagggcaaggaagaaaatcaagtttacaggttcggcaccgaaaataatgccaatgatataacagagacagaggcatcggcgacagaaagtggcgcggctggttttgaaaataaagaaatgtatctgtatgagggcgagtgggtcggagacggcgaggactggcagtaccgcctgacggatggcagctttttgaaagcgtcctggctgaaatcgaatggtcactggtattatctgggaaaaagcagctatatgcagcggggactccggaaaatcggcacaaaccgttattatttcgccgagagcggcgcgatgatgactggctggatttatgaggaagagacggatcagtggtatcatgcaaacgaggatggggcactgacgaccggctggtatcaggcaggaaatgcctggtattggtttgattccaaatgtgttatgttcagcggcggaaaccggatggtaaacgggcataaatattatttctttgacaatggtcagatggcggcggatcagtacgtggaactcaactactacgatgcaaatggactgcgcgaccggacgcatgatgtgcgtttgatgggaaaacggcgtccgtcggacagtgaaaaagaacagattacgaaagaactggcaggcgtgccaagagagtggatcaaacgatttgcagaatcaggctgggagctgatgtactacacagacaaggcatacttctcagcgccgaaaacagagcagggtatctattttgtcaattatgatacagatgtgcattacaagaaaatcaaattttctaaaccgcagggacttgcgatggcattcggcgagttcgctgcgtcggaactaagcgacgaagaaacctcacgtgccctgacggatttcgagcgatatctggctggcagtggactggtgcagcctcttccatcctactttgacgataagccggagatgcagttcggcagctttttcgccgcctgctgtgacgaagatgtccgagctgacatccgaaaaaacagtccggaattatacaaatatgtcgtaaagttaggattctggcaggaaggacaaaaaccagacgaagccgaagggatcgagatgaactctgatccggaatttgccggaagcggagccggaccggctggggatgaatctttaaaggctaagagtggtccggcatcggaagtgccgtaagaaaacgtggtggcagcaggaatttgccgtatttaaatgcaaagccgcggcaaattccgttactgggtacgtgaacagtaacctctactctgccaattcctcccacttctcatacaatccctctaactttgcattcagttcttccttctctttattcagttccatcaaacgcggaacatcggaaaagacagtctcatcgcagagaagcgcatcgatctcctgatcgcgggtttcaagggtgtggatttcttcctcgacgcgtttcaattcattctgtttcttacgaagccgcgtctgttcttccttctgctgtttccagtccaatttgccggaggaagcgctggctgccgcctgaactgcagcggtcacggcagaagcggacgaagcagcagaggtaccagtgccatttccagaaagagcagtcggatttgcacctgccgcagcggtcggatggctggaagtccctgtgtttccggctccggaagattttgcagagcggttggttgcctgtgcggcggaagccagataggctttctcctgcgtctccttcttttccagataataatcgtagtttccaatataattaatcagtgttcccatcgtcagatcgagaatccgggtcgcagttttgttgatgaaatatcggtcatgggagacgtagagaacggttccggtgtaatgaaccagcgcgttttccagaatctccttcgaggcgatatccagatggttggtcggctcatcgaggatcaggaagttcgcctccgagagcatcagcttcgccagggaaacacgcccgcgttcgccgccgctcagatcacggatgcgcttaaagacatcgtcgccggtgaagagaaatgccgccagcacatttcggatctgcgtgttgttcatatccgggtaggtgtcctgcagctcgtcaaagagcgtcttgtccatgtgcagaacctggtgttcctgatcgtagtaaccgatatgcaccttggaacctaaccggatctcgccgttgtccggggtcagaagaccgttgatcatcttgaggattgtggtcttgccggtcccattgttgccgatgatggcgatgcgctcgccgcgttttacctcaaagttcagattcgtgaagagtgtcatgccgtcgaaactcttggcaagctcacggacggagagaacgtcatttccgctggtgacgcacggttccagcgtaatatgcatcgcgtcgttgatttcggtcggtttttccagaagatccatcttggaaagcattttttcacggctctcggcgcgcttgatggatttctcacggttaaaggatttgagtttggtgataacctcctcctgatggcggatctcctgctgttggtttaggtaagccttgagcacaccggcgcggatgatcgcttttttctcgctgtaggcggtgtaattgccctggaaagaggtggcgatgccgctgtccagctcgacaatcttggtcacgacgcggtccagaaaatagcggtcgtgggcgacgatgatgaccgtcccggcgtagttcatcagataggtttccagccacgcgatggattccatgtcgaggtggttggtcggctcgtccaaaaggatgatatccggtttggagagcaggagcttaccgagggagacgcgcgttttctgaccgcctgaaagttcggaaaccggtttggaaaattcttcctcgacaaagccgagtccctttaagacaccggtgatctcgctctgccatgcgtagccgtttaaaagttcaaattcatggtttaagcggctgtaagtgttgagcatcgtctcgagcttttcgccctcggcgtgcttcatctggagttccagcgtgcggatctgctgttccatttccagaatcggacgtttgacctccagaagagagtcataaatggtggtctggctgtgcagatcctggtgctgtgccaggtaaccgagggttttgcccttggcgatggtcacggagccctcgtctgctgcgagttctccgacaattatttttaaaagagtcgatttaccggctccgttgatgccgacgatggcggctttttcgtgatcttctacatgaaacgatacgtgtttgaggatttcctctgtaccgaatgcttttgaaatattgctgcaagataaaatcatagattcctcctgtggttgtatccatgtatttcggttaaaaatataccgtcaatctcaaattataatataaataaagaagcaatgcaagaatgagaacggttaatggctgtttctggtcagaaaattttgcgaaatacaatgtaaaatccctcatatgaaataaaaaaattgacaattatttatcatatgactataataaatttatcagattgtccgaaggtttgcgtaaaccatatggacaacgttagaggaaagaaaggtggaagaaagccgtggaacagaaagagatatctaaagcggtcatttctaggctacccagatactatcgttacttgggcgaattgctcgaggagggagtagagagaatctcatcgaatgatttgagtatccgcatgaaggtgacagcgtcccagattcgtcaggatctgaataatttcggcggatttggtcagcagggatatggttataatgtaaagtatttatattcggagattgcccggattctgggaattgaccgtcagcataacctaattattatcggtgcgggaaatctgggtcaggcgatcgcgaattatacgaattttgagcggcgtggttttttaatcaaaggcatgtttgatgtgaatccgcgtctggtcggtctggtagtccgtggagtggagatccgcggtattgaggatctggagcagtttatcaaggacaatgaagtgcagatcgcagcactgacgattccgaagtcgaaagcgccggagattgcggatcggcttgtcaaagccggaatcaaggcgatctggaattttgcccatacagatttacaggttccagatgacgttgtggtggaaaatgtccatctgtcggagagcctgatgcgcctttcttaccgcgtatgcagcatgcaggatcagaaagcgagagaagaagcgcagagaaagcaggaagaggtagctggtgccggagaaacaaaatgatcgtcggaattggtacggatctgatagagatagagcgaatcaaaaaagcctgtgaaaaagaggcttttttggtgcgtgtatatacagaagaagagcgtcggcaggctggggggaaggtgtcccggctcgccggcgattttgcggtaaaagaggcagtctcgaaggtgtttggaacaggctttcggggctttggactgctggatatagaagtgctccgggatgagcttggaaaaccgtgggtgcggcttcacgggggagcaaagaaacttgcggacagcctaaaaatcacccggattcacgtgtcgatcacgaatacaggcagtcttgcatccgcttacgcagtcggagagggggaatggaaatgagacgtctggtgacaggaaaacagatgaaagagatagatggatatgcaatccggaaagtggggataccctctctggtactgatggagcgagcggcgctggcggttgcagacgagatggaaaaacggtatggaaagctttcagggcagaggcttctggtattttgcggaacgggcaataacggtgcggacggcgcagcgttggctaggattctctttctgcgcggcgcgcttccgacggtgctcacggtcggtgacaaggcacactggacgggggagatgacctgtcaggtggcgattgaccggaatctggggatcccggtggaggcgtttgaaaattatgtgccggggcatgtggagatcatggtggatgcgatctttggcgtgggtctttccagagaggtcggcggtgaatttgccgaggcgatccgttttatgcgggagcaggagccaaaggcggtagttgcggttgatattccgtccggcgtcagctcagagacgggggcggcgcttggcgaggcagttgaggcggatctgaccgttactttcggctatgagaagctgggaatggtgttctatccgggacggaagctgtgcggcgagattgtgattgccgacatcgggtttccggcgtatacaaaatatgaagggcatacctattttgcctatgattcggaggatcagaaccagatcccgaaacggcgggcagacgccaacaagggaacgtatggaaaaatcctgatcgcagccggttcggaggggatgtgcggcgcagcgtatttgagcgctctggctgcgtaccggatgggcgcgggacttgtgaagatcctgaccgtccgggcaaatgtgccgattctgcaaaatctccttccagaggcgattctgacgccgtatgatccggaacaggcacagacggatccggcaggttttaagagcctggtggaacaggagtgcggctgggcgagcgcgatcgtgctgggaccgggattgggaaaggaagcccatgtcgcaagtctggtgcagaacgtgctgctttccgcctatgtgccgatcattgtggatgcggatggattaaatgctgtcgcacagcatccgcatttgtccgggtattttacggaaaatgtgatcgttactccgcatctgggagagatggcgcgtctgacgggacgctcgattgaggatctgaaaagggatttggtcgagtcagcggtgcggtatggcgaagaaaaaggcgtgacctgcgtgctcaaggatgccgtgacggtgacggcggggcgcgatggcaatgtgtatatcggcgacagcggctgcgccgcgatggcaaagggcggttccggcgatgtgctgaccggtgtgattgccgggcttctggcgctgggattttcagaggatgaagcggcggcgctcggcgtgttcctgcacggaagagctggggcggcagctgcctgtaaaaagggagagcattccgtgctggcaagagatatcgcggactgtctgcttgaaaagatagattgaaaataaaaaggaagacaaaaagatggaaaaagcatatacaatggcagaagaaccatatacccggatttatgcgcggattgacctggatgcgattgtgaaaaatatggaggcgatgcgcgaaaatcttccggcaaaaacgaagatgatcggcgtggttaagacggatggttacggtcacggggctgtcccggtggcgaagacgatcgcgccgtttgtatggggctatgcggtggcaaccttggaggaaggacagaacctgcgccgccacggcattgacaaaccgattctggtgcttggcagcacgcatccgcggcattttgcggaattgattgaggacgatatccgtccagcgatctttgaggaagacaaggcagagctgctctcaaaacttgcggtttcgatgggaaagacggcgaaaatgcatattgcgctcgataccggcatgggacgaatcggatttcacccggatgaaaatagcctgaaagagatagagcggattgcaaagcttccgggcattgagatcgagggaatgtttacacattttgcgcgtgctgacgaggcggataaggcatttacccatttacagtatgagcgctaccagaaattccatgaaggtctggaagctgcaggcgttcatattccgatgtgccactgtgcgaacagcgcggcgatcatggaactgccgcggatgggactggatgcggcgagagccggtatcacggtatacggtctgtatccgtcggatgaggtagagaggaacatgaagatttacccggcgatggagatccgcagctttattacctatgttaaggaagtggagccgggcacgccgatcagctacggcggaacctttgtgacggaccgtccgatgcggatcgcgacgattggcgccggatacggcgatggctatccgagaaatctctctggaaagggttatgtcctgattcatggacaccgcgcaccgattctgggacgcgtctgcatggatcagtgcatgatcgatgtgaccgatatcccggaggctgttgaggacacgcgggtaacgctggtcggacgcgacggggacgacgagatctcgatggaagagctggcggaatggagtggcggtttccactatgagatcccatgcgtgcttggaaaacgtgtgccgcgcgtgtacgtgagaggtggaaagatcgtcgggaaaaaggattataatgatgatcggtatgaggattttatggagtaaagccggtgtttgaaccatttagaaaaaggattcataagataaagtagatagcttcggcaaagccgggaacctggactgccggatgcatttatgggacgacccgcgtataggcggtgtaaatctgtccatactaacggtataaacggactgtggagctgtgaaagtacaaagcagttatttatatcttaaaatagtttggacggagtgtgaatcgagtggttatcagacgaggagatatttattacgcagatttaagaccggtcattggctcagagcagggcggcgtccgcccggtgctggtcatccagaatgatatcggcaacaagcacagcccgaccgtgatctgcgcggcgatcacatcaaagatgaacaaagccaagctgccgacgcatgtggaattaaacacgcgccgctgtgcgatggtgagggattcggttattttactggaacaactccgcacgatcgataagcagcggctgaaagagaaaatctgtcatatcgacggggcgcttttacaggaagtggaccgtgcgctgaaggtcagtctggaactggatacataaaatcagccgcgaaccccttgtcaagcatacagaatggtgttaaaatagttaagatgcagctttttagtgccgaaatcggcgtgatataaaagctgatgagcgaaaagatacaacaaagaagatagaaagaggagtgttattttatgtcaggacattcaaagttcgccaatattaagcacaaaaaagagagaaacgacgcagcaaagggaaaaatctttaccgttatcggccgtgagattgccgtagctgttaaggaaggtggttcggatccggcaaacaacagccgtctgcgtgatgtgattgcaaaagcaaaagcgaacaatatgccgaacgataccatcgatcgtggtatcaagaaagcagccggagatgcaaactctgtcaattacgagaatcttacatacgagggatatggtccgaatggcgtcgctatcatcgtagataccctgaccgacaacaagaaccgtaccgcagcgaatgtccgcagcgcatttaccaagggcggcggaaacgtaggtactccgggcagcgtgtccttcatgtttgataaaaaaggtcagatcatcatcgacaaagaagagtgcgagatggatccagatgagctgatgatgcttgcactggatgcgggagctgaggatttctccgaggaggaggacagctacgaagtgatcaccgcaccggaagatttctctgcagtccgcgaggcgctggagaaggctggcgttccgatgatggaagcagacgttaccatgattccgcagaactgggtagagcttaccgatgaggaatccatcaaaaagatgcagaggatcctggatcttctggatgaggatgatgacgtacaggctacttaccataactgggatgagtaattgatatcatatttgatatagatttaaaaaaataaagatacgattcatataaaaactgtcgctggaatacaatggcgggctggacttttcaaagaagagggctggcagccggatgtatttggcggcagtttttgtgtaataggaatttccttggagacacattcgtttttattttgcaaattttatggaagcgttaaagaaaaaaataccatgtccggcagcaataaacttgcctgaacatggtatttactcgtattttatctactagttgcttgtataatgatagctgtctaacagctgtgccttcatatgccacagctcgttggagagatccacatgaatctcatgcgggtttaccagacggcgggactcatcccacagcgtctcctgttctttcctgcagtattcgcggatgtccataacctttggagactcgtaaacgcatttgccgtttttgaagattggaacgagaagttcgcgcatggtgtaggtgcccggcgcgaggtgtgtctttttccatgtctcgatcggatcgaagagcagaagggaattcttctcatcgaactcttcatccacgagacagatcagatctgcgataatcttgccagtctccttgtcatagattcgctggatggtcttgttgcccggattggtaaccttttctgtattttccgaaagcttgatcttcgggataaatttgcctgtgtgacggtccatgatggcagccagcttataaacgccgccgaaggaagggcagtccttggaggtgatgaggtttgtgccgacaccccaggacgtgatggcagcgccctgaatcttcaggctgtcgatcaggtattcatccagatcgttggaggcggagatgactgcatccgggaatccggcgtcatccagcatcttgcgggctttcttggaaatatatgcaaggtcgccgctgtcgaggcggatgccgtagaaagtcagcgggataccggcgtcgcgcatctcctggaagacgcggatcgcgttcggaacaccggaacccagggtatcataggtatcggctaacaggatgcaggcactcggatagagctttgcataagcgcggaacgcagtcagctcatccgggaaactcatgatccagctgtgtgcgtgggttcccttgaccggaacgtcaaatagttttccggccagtacattggaagtgccgatacagccggcgatcatggctgcgcgggcgccataggtaccggcgtcagcaccctgcgcgcggcgaagcccaaactccatgattccgtccccgcgtgcggcgaagacgatacgggatgttttggtcgcgatcaggctctggtggttgatgatatttaagatggcagtctcaaccagctgtgcttccatgatcggcgcgatgaccttgacgaggggctcacgcggaaagacaacagtgccttccgggattgcgtagatgttacccgaaaatttgaaattgtgaagatattcgaggaaatcttcatcaaaaatgccgagtccgcgtaagtattcgatgtcggcatcatcgaagtgaagatttttcacatagtcaatgacctgctctaagccggcgcagatggaaaacgcatttccatccgggtttgtgcggtagaacgcatcaaaaatgacggtttcgttggcatctttctcccggaaatagccctgcatcatcgtcagttcatacaggtcggtcaatagggtaaggtttcttggctccataatattctcctttgttgcgaaagacggctgcgggcacgcccttctttatatatatagtatacttcattgtttatatttgcaatgaatgtctgtgtctgtttttttaagtaaatacagacatattttatatactataccataaaatcaggggaatggcaaaataatgataattttataacatgtgaatcatatccgaaacattccttgacaaccatctggaaaaaagatacaatgtccatgttagtgatttgattactaattatgataggaaaagcaatgatggagacagtagcgccgcacggaaagcgggagcgaggcagggacggtgagagcctgctgtgagtaaggcggatgcgaagatcactccggagcttcgggctgaaccatttttggaagtctgagcgccgtttctgacagcgcccggaaggaaaattcagtaagtatcgacggtttcctccgttatagggagcgcatataaaggtatgcagtaataggtggttaaaagcaagtggacccttgtcctgttacaggatgggtccatttttatttcatatttttaggaggaatttatcatgtacaacaaagttccggcaaacatgaatttcgtggaacgtgaaaagaacattgagaagttctgggaagatgagcagatttttaagaagagtatcgacagccgtaagcagggaccgacctatacattctatgacggaccgcctaccgcaaacggcaagccgcacatcggacacgtgctgacccgtgttatcaaggatatgattccgagataccgcgcgatgaagggctacatggttccgagaaaggctggatgggatacccacggtcttccggttgagctggaagtagagaagatgctgggactggacggcaaggagcagattgagcagtatggtctggagccgttcatcgagcactgtaaagagagtgtctggaaatacaaaggaatgtgggagaaattctccaacaccgttggtttctgggcagacatggagcatccgtatgttacctaccacaacagcttcattgagtctgagtggtgggcattaaaagaaatctggaacaagggacttctttataagggcttcaagatcgtaccgtactgcccgcgctgcggcaccccgctgtccagccatgaggtggcacagggatataaggacgtcaaagagcgttctgcgattgctaaattcccggtaaagggcgaagatgcatacattcttgcatggacgaccaccccgtggacacttccgtccaacgtggcgctctgtgtaaatccggacgagacatatgtaaaggtaaaaatgaaagaggatggcacggtttattatatggcgcaggcgctgtgtgataccgttctgggcgagggcacttacgatgtcctggaaacctttgtcggaaaagatctggaatataaagagtatgagccattatttgactatgccgtagcaacctgtgaaaaacagcataagaaagcattctacattgtctgcgataattatgtaacactgaccgatggtaccggtgtcgtacacatcgcgccggcatttggtgaggatgactccaaggtcggcagaaaatatgaccttccgttcgtacagttggtagacggcaagggtgagatgacgaaggagactccgtgggctggtatgttctgcaagaaagccgatccggaggttctgaaagcattaagagaaagcggacttctgttctctgcaccggtatttgagcatagctacccgcactgctggcgctgcgatacaccacttatctactatgcacgtgaatcctggttcatcaagatgaccgcagtcaaggatgacctgatccgcaacaacaacacgatcaactggattccggagagcatcggtaaagggcgtttcggcgactggctggagaatgtccaggactggggcgtgagccgtaaccgttactggggtactccattaaatatctgggagtgcgagtgcggctgccagcacgcgatcggaagccaggcagaattaaaatctatgagcccgaactacacggacgttgtgaaaaaatatgcaaaagagatggatcaggaggcaaatggagaggttgagcttcaccgcccattcatcgatgatgtgacgatcacctgcccgaagtgcggcaaacagatgcaccgtgtaccggaggttatcgactgctggtttgattctggttccatgccatttgcacagcatcattatccatttgaaaataaagaactgtttgagcagcagttcccggcagatttcatctccgaggcggttgatcagacgcgtggatggttctactccctgttagctatctcgaccctgatctttaacaaggcgccgtacaagaatgttatcgttctggggcatgtccaggatgagaacggacagaagatgagtaagtccaagggcaacgcggttgacccgttcgatgcactgcagacttacggcgctgacgcgatccgctggtatttctacattaacagtgcaccgtggctgccgaaccgtttccacggaaaagccgttatcgagggacagagacgtttcatgggtactctctggaatacctatgcattctttgtactctatgcgaatattgataattttgacgcaaccaaatatacactggaatacgataaacttccggttatggacaaatggctgctgtctaagttaaacagcctcatcaaagaggtggacgacgatctgggcaactaccgcattccggaggctgcaagagcgctccaggatttcgtcgatgatatgagtaactggtatgtcagaagaagccgtgagcgtttctgggcgaagggcatggagcaggataagatcaatgcgtacatgacactctacaccgcactggtaactgtagcgaaggtggcggctccgatgattccgttcatgaccgaagacatttaccagaatctggttcgcagtctggataaagaggcaccggagagcatccatctgtgcgacttcccggttgcaaatgaggcgcacatcgacaaggatctggaagcgaaaatggaagaagtcctgaaggttgtcgttctgggccgtgcagcaagaaatactgctaacatcaagaaccgtcagccgatcggacgtatgttcgtgaaggcagagaccgctctgccggagttctatcaggaaatcatccaggatgagctgaatgtgaagaaggtagagttcacggatgatgtccgcgcatttacctcctacagcttcaagccgcagcttcgtaccgttggacgcaagtatggcaagtatgtaaacgagatcaaagagattcttgcaggtctggacggaaatcaggcgatggataccttaaatgaaaccggccttttaagctttgagacgcaggacggtacaaaggtagagctggcaaaagaagatcttctgattgacatggcacaggtaccgggctttgtatctgagggtgacaatttcgttaccgttgttctggatactaatctgacaccggaactcatcgaagagggctttgtccgcgagatcatcagtaagattcagacgatgcgtaaggaagccggttttgaggtaatgaaccatatcaacgtcttccaggacggaaatgataaacttgcagaaattttaaagaaccatacagaggaaatcaagaaagaggttctggctgataatatcctgattggcaccatgagcggatacacaaaagagtgggatatcaatggcgaaaaaggtatgtttggtgttgagaaaacgactgactgatgtgcctggcgggaaaccgtgatactacgaatattaggaggacaggatgcgcgagatcagcaaagaagagtttaaaaagagtattatcgaaaatgtaaagaaccagtaccgcagaacgatcgacgaggcgacaccgcagcagatattccaggctgtgtcctatgcgatcaaggatgtgattatcgacgactggattgcaacccagaagcagtttgacgagacaggcgcaaagaaggtatattacctttctatggagtttctgatgggacgtgcgcttggtaacaatatcatcaacttgggtgcgaaaaaagcagtgaaggaagcactggaagagctgggttttgacctcaatgcgattgaggatcaggagccggatccggcacttggaaacggcggtctggggcgtctggcagcatgttttctggattccctggcaactcttggttatccggcttacggctgcggcatccgttaccactacggtatgttcaagcagaaaatcaaggacggctaccaggtggaggtgccggatgagtggctgaaaaacggttatccgttcgagcttcgccgcccggagtatgcgaccgaggttaaatttggcggttatgtcaagaccgagtgggacggtgagcgcaaccattttgtacaggaaggttatcagtctgttctggcagttccgtatgatatgccgattgtcggctacggcaacaacgtagtcaacaccctgcgtatctgggatgcacagccgatcgacacgttcagcctttctgcatttgacaagggtgattaccagaaggcggtcgagcaggagaatctggcgaagaacctggttgaggtcctttatccgaacgacaaccactatgcgggtaaagagctgcgtcttaaacagcagtatttcttcatttctgccagcttacaggttgctctgaagaaattcaaagagacaaacgatgatattcacaaactgccggagaagatcgtattccagatgaacgatacgcatccgaccgtggcagttgctgagctgatgcgcctgctcctggatcaggaaggcttaaactgggatgaggcgtggggtatcacaacaaaatgttgtgcatacaccaaccacactatcatggcagaggcgctggaaaaatggccgatcgagctgttctcccgcctgcttccgcgtgtataccagattgtggaagagatcaaccgccgttttctgatcgaggtacagaataagtacccgaataactacgagaaagttaaaaagatggcgatcatctttgacggtcaggtcaagatggcgcatctggcgatcgtagccggatattccgtcaacggtgtggcaaaacttcacaccgagattctgaaaaatcaggagctgaaagatttctacgagatgatgccggagaaatttaacaataagacaaacggtatcacccagcgtcgtttcctgctgcatggcaatccgcttctggcagactggatcacggagcagattggcgacgagtggattaccgatcttccgcacctggcaaaattaaaagtatacgtcgatgatccgaaattccagcaggaatttatgaacatcaagtaccagaataaactgcgcctggcaaaatacatcaaggagcacaacggaatcgacgttgatccgcgttccattttcgatgtacaggtaaaacgtctccatgagtacaagagacagcttttaaatattcttcatgtaatgtacctgtataaccagctcaaagacaatccaaacatggatatggttccgagaacctttatctttggtgcgaaagcagcggcaggttaccagattgccaagaagacgatcaaactgattaactccgtagcagatgttatcaacaatgataaatccatcaatggtaagctgaaagttgtgtttatcgaagattaccgtgtttccaacgcagaattgatttttgcggcagcggatgtcagcgagcagatttctaccgccagcaaggaggcgtccggtaccggcaacatgaagttcatgctgaacggtgcgctgacgctgggcacgatggatggtgcgaacgtggagatcgtcgaggaggtaggcaaggagaacgcatttatcttcggtctgagcgctgacgaggttatcaattatgagaacaacggcggttacaacccggaggagatcttcaacaccgaccaggatatccgccgcgtgctgatgcagctcatcaacggctactattcaccgcaggatccggagctgttccgcgatatttacaattctctgttaaatacaaagaacagtgccaaggcagatacctacttcatcctgaaagatttccgttcctatgcggaagcacagaaacgcgtcgaggcagcttaccgtgacgagaactggtgggcgagagcagccatgctcaacacagcaagcgctggtaaattctcctctgaccgtaccatcgaggagtatgtgcgcgacatctggcatctggagaagatccatgtggacgatgatgatgtaaaggcactgtaaaaggagtaaaaagagggaggacacactatgagaggatacagaaaaagaccggggacacaaggattttcggttcctcttgtgggtgcttccctcttttttatcatttcgctgtttttgtttgcttcttataaaaacagcgcctatcagcaggcgaaaaaggaaatctattcgctttatacggcgaaccgggcgtttgatctggatgaggtgtatcaggacggtctgacggcgatctacgcgaaagagtatggaaagacggcaaccgaggctggatgcgaggcgctggagcagacggggcttccgtatgtccttttattatcgcagttttccgcaccggtggaacgcgtgtatgtgactaactgtcagctgagcgagacggggcgggagaagaaggcgcggacgtatgactacacggtttcggtgcgtttctgtctggaaaaaggcgatgaggtgctggcaccggagaagacgatggactttcatggaactgtggtgatgaagaaaaagggatggttccgctggctgctggatggtgtgacgctgggggagtaaaagaatgatagaggggaaactggaagagactgcaaagggcggcggaggaaaagccggagcgtagacttgtgatattttttgagtgcctgtcataagataaggaaggcagagaaaagaagcaggtttgtaaggcattgaaaccataagtttactggtatggcaaaacagaaaatgcgtgaaaccgtactggaacagtcaaaacaggagaaccgaaatgaagaagagaactgccgccgtactggcggcttttttgatcccatatatcacaacactggcagtttccgggcgtgtgcagggggcggatggaggaaaaatcggagaaaattcagatagaacatctggatggggaagtcagacggatgatcggcagatccttctggatcgggaggatgtcgtccgcaacaacggaaccgggtatgctgtcccactggaagaatatctgatcggtctgactgcagtgcagattccggacggctatccgaaggaggcagtcaaggcgcaggcaattctggcgcggacggcgctgtaccgggagatggacggggcggattcgatcgaggaatcggcgttagatatggattatctggagccggagcagatcgagagccggtttgaggcggctggaatgccggaatattaccagacgatctgtggggcggtgcgggagagcgcaggacagacggcgatctgggctggggattatattgagccgctgtttcatgcagtgagcgcggggcggacgcgcgaaggggatgaggcgcatccgtatctggcgtcggttgcggcaaaggaggatgagggcgctggcggctacctgacgcggcagggcatgacacgggaagaactgaaaaaacgtctggaagaaggactgaatgcattgggagaacacccggatctggaaaatctggaagaagagcggattctggaggaaattcagatcgtgaaacgggacagcgccggttatgtggaaacagtgcagattggggcggagacgtacagcggggacgcggtgcgctatgcgttaggcgtgccgtcgccagctttttccctcgaggaagacgggaacgaaatccgctgtgttacttatgggcgcgggcatggttacgggttgtcgcagtacggagcgggactcatggcggagaatgggagcagcgcggaagaaattttaaagcattattttaaaaatattcaaatcgtttctgaataaaacgattcacttcggcaagactaataccgaggtgataaacgtgaaaaataaagtaagacagttattcagggacaaacttgttctggtaatgacagtgcttggtctgctgacaatcgtagccgcagcaggaaccgtaaaaattcgaaaagataatgcgcaggatggaagaaatccgtatctggatgtgccgcagacggagggaatcctggcggaagagatgccgcagaaccgtttagaagaaaacgacggacaggcggaaacacgcgcacaggtggcaggaagttcggatgcctcgtattcggtcaataaccgggatgaagccgatcagaagccgatggaggaggaaaaagagagcagtctgggagccggagcagctgccgcacgcgcactttcctacaatggaaccgatcgcttaagctggccggtccagggcaatgtaattctcgattacagcatggattcgaccatctattttccgacgctcgatcaatacaaatgcaatccggcgctcattatccagggcgatgtgagtgagccggtcgccgcacccgccgaggcgcaggtaaccgaagtcggttctaatgaggagatcggcaattatgttgtgctggatctgggaagcggctacacggcggtctgtggacagctcaaagacgttcaggtggcgcagaagcagtatgtggcaaaagatacgatactcggatatgtggcagagccgaccaaatactattcgattgagggaaataacgtatatttcgagctgatgcacgacggagaaccggtggatgcgctggactatctggaatgacaggctgaaatgctgtttatgatacgccttgcagtctggttctggctgtggcagaaattggaaatgaagggataagtttgtgttttgtgacaggtggttttgaaacagaaagctgctgtatgaaaacatgaagacagggaattttgttgatttgaagcaaggcgggcagctaatttgctctgccttgtttttctgccaatatttgatatactataggtaaagtacgaatattttcaaagaccaaaggctgtcaatgtaggttataaataaaagttactataaattgaacgatttaataaggaggacaaagatggaacaggaattgttgaagaataattttgaacgtcacggatttaaaacgagtttctttgatacaaaggaggctgcgttggactatctgaaagatcagatttctgggaaaaaagttgcgataggcggaagcgtgacggcacaggagatgggaatttatgaagcactttccgagaaaaatgaggtgatctggcactggaaaaaggtagggcgcgagacgcttatggaagcgagaaatgccgaggtgtacataaccagcgccaatggtgtttccaaaaccggagaactagtcaatatcgatggaaccggaaaccgcgtgtcgcagaccttattcggaccggaaaaagtatattttgtcattggaaacaataaagtctgtccggatttgacatctgcgatggaacgtgcaaaacagatcgcagcaccgaagaacgcagcccgtctgcaggtccagaccccgtgtgcgaaaacgggcgtttgcgtagactgcaacagcccggcacggatttgccattcgatcgtgatcctggagcgtccgagcaatgggatggaagtagaggttgtgtttgtggatgaggagatgggttattaggagcggaatatagttactggtcacgggtatgaacagtaccgattatagaaaaatttgatggaaaaataaggatttctttatatcttttttggacggatttggtataatcaagaagaacgaagacagatttgaacgaaaatatacaaaatctacagatacgtgtgggggacgtatggggaaagatgaaaggagaacaggtaaaccatgaatatattattttttctgacaccgaaaagtgaagtcatttatgtgaatgaggaggacacggttgggcaggcaatggatacgatggaaaagtacaagtattctgcggtgccgatcatcacgaaggcagggcgttacgcaggaacattaaccgagggcgatctgctgtggggactcaaaaataagacagatctggtgcagaaaggactggaaaaagtgcggatcactgagattccacgccgttccgataatcagccggtacttgtcaatgcggatatggaagatcttctgggaaagatcatgaaccagaatttcgtgccggtgctggatgatcagaaaaattttatcggtattattaccagaaaagatgttatcagttacctttgtaaaaaatagtacataatgatcgctctgtttttcagcggcgatcgcatttatatatttcctgcataagataaagtataactgcttttgtaggagaatgaaatatgaatggttatcaggataactccagccggaaaaatgcctgccgttcgggaatgcctcttatgtcatgcccggtggcaggcatttctggcaatcgctgcataaatactgcaccgccaacctgtccgccggaaataccttgtgctggttcggtgcatcctgtttcggaaaatggggcattttgcccgcagggtccagaaatccgacctgcccgcccgtatccgcagacaggagggaacaggccgccgcagacatttctgggaggcggaaattatccggtcggcatgggatatgtaccgattcagtcctggcagcagccgtatgcgctggaaaccgcattcaggcggggaactatttttccggatctggatctgccgtttatgatgggaggtgcctgctgatgaatgagactgccagaaaattgatgaaacggattgatgatgccagctttgcaatggatgatgtgattctctatctggacacccacccggatgacaggaatgcgctgaattattaccggtatgtggtggcacttcggaaagaagctgttaaagcgtatgaggcatcgtttggaccgctcacgatcgaggatgcggacgatgcatgcacatggtcctggcttacagagcgctggccgtgggaaggggaggtgtagcgtatgtggagatatgaaaaaagattacaatatccagtcaatatcaagacgccgaatccgaagatcgcgcaatatgtaatgagccagtatggcggtctaaagtgcagtaacctatgataagcggagagccttatttttcaaggttctccgctatttcatgcataatattgaaaatcaaaatgctcggtcttccggtcgaaaacgatgcatttcaagatgctccgcagcgcgttccctttggtttcgaaccccacagaaggagatgccaggagatcgcggacgttccggacgcggtcaagaagctccttttgcggcggcgcagattcggcgggctgttcaaggagacgctgcagctcatcggacagccgctgaatctctgatcgcaggcgggctttgctttctttgtattcgtccagagtgtaaacttcgttttcgtaggcaatccgggcacgttcttcctggtgcctgagccggtcgagctgggtatgtatggactggatttcgttggatagatttgcgggggaaccggacgcgctggcagcaggtgtatactcaaaatgtccgctttccaggatgccatccagggacctaagaacaatccgctccattttcttgacgctgatcgaacaggattctgggtgcaaacccttggaatatttccagcaggtgaaatatggaacggctccactaccggtgtaagataaggttgccccgcacacagaacacctcatcagcccggagagccagtgtttacatgttgacacgttccggtgtctcatggggcgaaattcagctttccggcgttcctggcactgctcaaacaattctgtcacagatgcctttgtttcgtgcgtcccctcaaaagaaaaaccattccattctactgttccaacataaaaatgattctgtatgattcggtcgattgaccgcttctcaaacggatttccccggcgcgtaagatatccggaagcgttcagctgacgggcgatcgcagtcatatccaggcggtcaaccgcgtacatatggaaaatcatctccacaatcttgtattcatcctcgcggatcacataaggctttccgttcccgaccgcggcatagccaagcggcggaacaagctggtatcctttcagttcggctttctttgccattccgcgttttacttcgaccccgaggttataagaataaaactcatcctgccactcgataatcatttcgataagccgcccatacattccttccatgatgggttccgagacgctttcaatatcaatcttcaatttcttgcggagcatccccttgtaaaatgtgctttcgtcctgattccgggcgaagcgcgaaaatttccagacaaggatcacctcaaaaggctgtggcttttctttagcggttgcgatcatccgctgaaattccggtcggttatcggcacgtttgccgcttcgtccggttcgttccatgaaaatatattcttctggaatcaaaatatcatgcgcttttgcatatcgctgaatctcatccagctgagattccgggctgatatccagctggtcgtccgtgctgacacggatataagctgcacctattctcatttcgatcatcctttcgtataaaaatattaaaaaagggtataaaaaatacacctcttgcgaggtgcccgaaagaatgatataattcaaagtgttcaagtttgaatatatctttccgggcatccggtaagagaaatctatgcaaggccgttcggtgttaccagcaccgggcggttttgctatctaaagggttagaaaaaatcaggaggataaggctttattttagaacctccgaatttcttgttttctaattggacatatcgataataccagtctggtatttcatatttccatgctgctggcgggatacatttgctacagggttcaaaatttccggcagcaacaaataaatgaactttatgatttgcaccgcagcatccacgtatacggtgatagcactttccggtgcttgttatataaacggaaaagtgactttcaacaaaaggattgttgggacagtgcggtagcagttcatcatcgaatgtaacgccagacggaacaccacaaatagaaagaatctccttttcagtaagagtatcaagattaacggtatagttcgaagaattctttttgacttcttgagttgcagcttcgaactgtattcttaaatcttgaatatcagattcatacttatgaatcaagttattagcacagtttacttgttcttccaattctttattcttaacagttgcagcttttaaatcagcacgtaactgatcgattgtagtggtactgattcgattcttttttcgtatagagcaataaaaaagaagcaatcccgaaataaatgcgagggggatcaaaaataaataattaccaagataaaaagaatcaggttcgtcatcgacaagaggagcttccgggatactttcgctagggattgtttcgccaggagtgtcttcttgtaggactgtttcggctgcgtaaggtcgccaaggaacggtttcgcttacataggaatcttgataatcgttatcgttctcattgctctcataaggacacaccccgttcggatgctggtgtgccggataaccgtgatgataatgatattcaccagtggaacgatcgtagtgtcctccggcagaatcggttcttccagagtgtgctgaagatacaaaggaaatagaaagcaccaaacatatgaacgccaaaatagatatcgaataccgcatggcttttctcataagtttttcctcaattataaaatattaaaaaaattccataaattcacagacaaataaagtgctgttatcatatataatagacgaatgcgcccagcctttcggaaatagaaaggtgtgagagcttatgctgtctgttaaatacataagatacgataatattcacgtgtacgcactgtattaccgcagtaacagaacactttattataacttgagtttcaattctaggacaaaagtctactacattctttaaccccagccggaaggctgggcgctatcaagaagtttttgccttgatatctaccggcggatattttccttctaattcttccggagtcttcggtattccggcggccggatcttcctctgcacttctggactcaaccacatcataaaagaaatcacgtacgacctgacgctgctccggagccagttttaaatactggtagaccaggttgtagctaaaatcatcaagtctgaattctttttttaattgttccatcgtagaagatggcgtttcaataaatggttttccgcttccggttcggagccattcttccgatacactgaatgtattgcatatatcaagtatcgtcctatcggaaggatttctttttcctaattcaattaaagagatagaatttcttttcagattaagcatttcggcgaaatctgcctgactcaatcccttggcttcacgaacttctttgattcgcgcattcatattatcacttcctttctgacatcaatataatatataaatgcttacttgtcaacaagaaaactttaaatctctgcgcacaaagtgttgacaagttagcaaaaagatgataatgtatgattacaagttagcaataacttataaacaaaatgatagagggacttagaaaggaggccgcatttatgacagctacagataaaaacgtcacaatggttcacgaagaagacaaagatttcattcgttctgtgatgtcacttccgcagaataagaagattctgatccagggaatcatcattggcctggatttacaggaaaagcaggcagaaacggcggccggataaggccgtcgaaagacataaaaccagaaaactatgaatccatataaaggaggagaaaagtgagaggagacacagagttccaccagaagatccggccggaaacatgaaaagaatttggaatcaatccagagctcagcccggtagaagtagaagataaacttctcacagctatctacggcgccgaatatgccagatggtaccgggcggagcagaaaagaaagtttggacagtaaggaggaagaaagatgaaaagagagttacagtgcatggagctgagaagccaggaccggaagatcatcctggctctggagaaagagatgaaccggatgcaggcggatcttcgtttcgcgtggcgcctggcttttaccggtctaatcattgcggcggtagcgactggggcgatggtggcgattgcgcagaatgcgggggtgttctaatgagaaaacaaagaagatatgacgagatcatgaaagatcttcaggagaccaacgcaggggatcgtaaaagaatccgcagactctgcaatgaattaaagagattcagagtctgcagccggagagaacggataggagactggattgaacatatggtatttcattatggttatgcgctgtacgcactccctgcgctcttgttcttcctgtccttcgttctgatgatgttcaacatgacacgttaagcgaaaaaggtgttataaaactgcaggaagatagaagcgagagaaatggcggttgtaattgcataaggaataacgaacccccagaaccgacgtcttctgtcatcgacgaatgttgtaccacgtacacttgaaatcaaatgcatataaggacctattttgataggcttcacagctccatttgaattgcggattagataagattctccggtatcttcggcggctgatttaaaaggctttacgatgatatagtcgttgagccatagaaaatcaagaccttgctgaaagtcgagatcttttttatggcagaagtcttctcttagcccctgatagtcgatgtaaggcttctcgcagatacgctgtaaaagtttgtaataaaattctggcatttttatcccctccccacattgccagtataaaagagtggagaggaaaaagcaaataaaaaaggaggaacgtcatgaagaaagaatttgaacctggaaacgtgagaatgatcatcgctgccattccggagcggaacctgaaaaaagaggaagacatcgacaaagaagcccaccggctggaaagatgcctgcatttcttactcggatatatgggaggagatgcgaagctgcatccggaacgggtgtataccggagaagatatcgttgagcttctgaatgctgtgatccgcggaagggagtgaggtgtgtgacaatcacaaatcacatcgaaatcaatggaactgtccgtgattttgaaaccctcacaaaagaagaacgagaagaaatagctgctctgctgtctgaccgtttcatggcggcagcaggataccagagaatgaaaggagaacgggatgagaagggaaatcgaggtatacaaccccaaaagggaagcgcgcctggaaatgcagttgagaaggagaacggaggagctgaacgagaatctcagatttcagggattgctgtatgagacgatcttcgttctggcggtgctgctgatcgcgacggtcttcgcgctgtttgtcgttacatcaaacaggtttttataggaggactcatgggaaagtacaaggaaatccagattgaagtcagcgatgaggtgtatgcggcgctggagcagctggcggatgacctgaataaagcagagacgattatcctaaacagaaccggaaaacaggaactgatcggtcagagaagtatgactgtggagcatatcgcacttctggcaatcgaaacatatgttcacaatattgagaaaagaaaatgccagaaaccggatccgctgggatatacagagtaggggggagaaaaatgaaagggcttggaatcgtagtaaaaacgacagacgaacaggaggaacgtcttgaaagacttcttccttggcaccagaaacacgtggaagaggatggaagctatccgcatagcaactggatcacaagcgatatgctggaatgcctggtaaacatccatgcaaaagaactggttgagttccttctgtcggaagaggaacgccgccagggaattattcaggaaaaggaaaagggccaggcataaaagcctgaccctaaaccgtatacgaatctgtgacaagatcagtatacggcatacggcggagaaagtcaagttttacaagggtttagccgccgtttagtcactcgttacagtcattaaacttaggcagggtgtagaatgtcgtatttgagaaatagctgttatcttccgtattgcatcgaagtagaagaagtacattcgaataggtatgggaagagaggatataagagggcaccgaggaaggagccgactagggaagagatagcagaggcgaatgagcgccgccgcattaagaagctctaccgaatcatagccacgaattttgatttcggagattatcatacagtcctgacttaccggaaggatgagagaccgacaccggaacaggcaaagaagattctccgaacacttctccggaacctgagaaaagcgtaccagaaaagaggggaaccgctccattacatcatagtaaccgaatatgaacgcagcgtcatccatcaccatctgattatcaatgaaattggcgatacgattaagctcatcaagaagctgtggccgtatggagggacacatttcacacctatctacgagcagggagaagtaaaggacctggcagcgtacctcatcaaggagacacagaagagctttcgaaaaaaggacaaccccaacaagctggcgtattcatgtagccggaacctgaaaaagccggtagttaaaaccaaggttatcaaggcgaacacctggaagaaagaaccggtgccacctgctgggtatatgatccggcgcggcgatatcgtgaccggaattaatgtcctgggatatccgtaccggtattatacgatggtccgcatcactgccgggaaaggagagggctggataaagccaaggaaatatgcacctgaatcgagaggagtaccgcctgattaagcggatgagccgcggggaattgcaggactacctggaagaggtttccggagagctggagaaagaggcgatccgcaaagaggcgctgctggatgcaagggaatcgctagaaaaggcaattgatatcaaaggattaggaccgatgcggaaagcagagatccggaaaaaatataaaaaagcaatggaggaaaaagagcatggaagaaaaacgggagctgccggagggtgttaaagaggaaatgggcgcatgtatcttttgcggtcagacgtacatgtttgcgaatgtcggactcagtacggagcagttaaacgaagcagcgacggagagatgcacctgcgaggaagcaaagaactggcaggtgcagcggaatcaggcgaagaaggtacgcaagaaaacggaaagaatctttgctaatgataagtgtctgaattttatgctgatgtcggcgaatatgatcttgtccggagaactggataaggtaacggtaaaaatgaatgatggaaccgtgggaaccatcgcgttgacaaaaaaaggtagtatcaagatccagcgcagcaagacgatccaggacgcagcggagggataagatgtatgaggtaaccgtaaaaattggcggaaatgccagtaaatactgggcgtcactggaatttgacgatgccaaggggaagactcatcgaaaagagattgccagggagcgcagcgccacgaaatcaagcaatacgctgcaggcgctgattgacgccctcggcattcttcggaacccatgcgttttaacaatctataccgaagacgatgccctggcagcagcctggtcgaacggatgggtcaacacctggcagcagcatagttggaaaaacgctaaggggaatacgatacggaatgcggagcagtggcagcagctctatgagctcatgacaccacacgggaggcgatttgtatgtcaaaaagcataatggaaccagtaggggcgtgcgagtgctggaattgcggcgatacgcggaacctggaagtgcatcatattttttatggaatccgtgccagaaaaaagtcagaacactatggtttgaaagtgcatctctgccctggctgccatcgatgggcgaagacgggggtgcatggcggaaatcatgaattagatattcgcttgaagcaggaagcggaacggctttttgaatcaaaatacagccgggagctgtttagacaggaatttggcaggttttacacagaggaaaatgccgaaaacacgaataaaacattagatcttttgggggtacagtggatatgacggtggatgatttgttaaaggtattaaataatccggatatgatccggatcatcaatgatggcagtgatgtttatgtcggatatctcggaacgatgcagtatcacaaaggggatttatcaaaaatcatgaagcaggaagtacattcattccagtgtattccggaaatccgtcataggaattggagagaaaagggactggatgcccctcttcttccggacgcgataccgacctatgcgtatgcggatctgcagagcacactatattacacaatttacatataaaggagtaaaaaatgaagaaaacagaaggaaaacgcacttcggttgcggaatatgtgagaaaaagagcctgcggggaaagtgcgggaccgggaaaggaagaggttctgcctgtttgtgagaaaagcgcgcagcaggaggaagtaaaaagcgatttggaactgcttcaggcatgttgtaagaaagaaaaatacttcctggaaatgttccggaaagcgagcggtagcaatgtgaatgatgtgagagcgagggcgctgaaagtgcaggcatttgaacaggcgatccgggcgctgacgggggagagggcagcagaagagccgaaggaacagatcccactaccgcccatgaagaataacacccagcggaaggaatggctggcagactatcgctcctggggagtctggtacacagacaagcatatcggcgcggtttactacaagtatgattttgagaatggtgcgaaattgattgtcgaggaatacgaggacacacttaccaccctcagaaaggcagaaaagcgtatcagccagtattatcatctggtgggaggtccggagccggtcagaaggacggacgggagtccgaaatggagccgccatgaaaactatactaaatatccggacagcgaaagcgagctggtagagtttttgaaagatatacagaaataaacctctatgtggcagttatatattaccgaatatgccattggtctatagagcgaggctccggaactccaccggagccggaaaggaggcggctgtgagagctgcagaaatgagagatattatcatcagtaaattaaaagatggacccaagacaacccccgaacttgttgaaatgacgggattcagccccgaacagatccgggagcggatgcgccgggcaaaagtcgagggaatggtggaaagtgctgtgatagacaaagaatttatgtggtacgacaaaaaacagtgggatcatgttgtacaggttaaagaggataaaggaccgattacattcggagaattaagaagaatcagccactatatcagaccaaacttccgaatccgggtttatgactacatcccgaagaggggagaagaaaaggctggtgtgatccggatgaagcatatagacaagatatatcgccatgttgtcacgttcaaggaaggagggagtaccacgcttgtgaagttggcgcagtatttccgggatggcagcaggaccagatgcatacggtaattcgatacccgggcagtaaggcgcggctggcggactggatcatcagtcactttccagagcaccgcagctatttagagccgttttttggttctggagcggctctcttccggaaaatgcggagcccgattgaaacggtcaacgatctggatggagatgtgatcaacctgtttgaatgcatccggagagatccggaacgtctggcatgggaaatctataacacaccgtatgcaagggagacatatgaggcagcagatgagccggtagacgcctacagtagggcgacaaaactctgcatccgggcaaatcaaggttatggttttagaacggcgggatcgccagcaggctggaaaagggatgtgtgtggacgagaaaaggcgtatacggcgcgggattggtgccgcttgccggatgccatcatgcaggcggcggaaaggctgcggggcgtacagatagagtgtatggacgcggtcatgctgatccagcagtacaaccacccgaatgtgctgatttattgcgatcctccgtatgtcctcggcagcaggacagggaagcagtataaacatgagatgagcgacaaagatcatgagcgattgctgcaggtgcttctgcggcatacgggaccggtgttgataagtggctatgacaataagatatatcgagacatgcttcggggctggcgtctggaaacgcaaatggaatactgccgggcgaataagcgccggacagaatgtctctggatgaattttgagccagaggggcaaatgaaaatgttctgaggagggaatggcgatgatgatagagaagattggtaccccggccatgctggaacagctggcgaaagaggcggcagagctgtcacaggcggcactgaaactggcgcgggtgctacgcggcgagaatcctacgccagtaacacggagagaggtaaggaaacatttgatagaggaatacgatgaggaatcagaacgcttccgaaagagatgggaggaaaagaaggcagcagaagaaaaggatggaaacaggcaccgggaggcatatggtaaactgtacgataaatttttaaaagcatactaggaaaaggagataaaacactatgccagaaaaaaatggaactaacaaagtgcgcctgattggcgaggtgatatcaaaatttacattcaaccatgaagtgtttggagagaaattctatttcgtaagtttgtctgtcactcgtttgagcggacaggtggatgtgatcccaatctcaatctcagagagacttatggatatatctaaagattatcgcggcacgacgatggaggtgcttggacagtttcgttcctacaaccgccacgacggagaaaaaagccatttgatactgttcgtgttcgcgcaggaagttcgactcctggaagagcctgctggatacactggaacgaatcagattttcctggacggatacatctgtaagaaacctatctatcggcggacaccgatgggaagagaaattgcagatatgcttctggcggttaatcgattatgcagaaaaacagattatataccgtgtatcgtatggggcagaaatgcccgctatgcatccggttttgatgtaggaagtcatgtgtgtgttgaggggcgtatacagagccgcgagtatatgaaaaaactgagcgaaacggaatgcgagaagcgcgtagcgtatgaggtatcagtcagcaaatatctggacaatagaagaagcttggaaaaaggagaagatgatggaggaggagctgcttaaaatgtctgtaaatgcgaggtgtgttggctgtaaagaaccgacaaaatttgtagctggtttttatgacggtccgaggggagaacatggctgcttttatgattgtgaaaacgaagcttgtgtggtgaatcagatacttcggtgtgcggagtctaaagaagctcagaagatgatgcagatccaggaagataacggtcggcttggaatgtatgcgggagagatagcagcgctgcggaaagatgtagggctcacgataatgcagatgtcgcaaatggccggatgcagcccggcggagtacagcgcatatgagcatgaacggaaaaagtttgatccggaagtatatcgaaaatgtaaagggtacctgcatgaaagaagggtgaaaaatggaacgattaacgagtaaacgagtaaacggcatcaagtccggctattggtctgcagccaaaaaggacgagctgatcgccagactggcagaatacgaggataccggaaagactccggaagagatccggggatttgaagagactgcccggaaaatggtggagagaacgatctctttgcatcgagaattgaaagctgaacaaagcaaggatgaatggattcctgtatgtgaaaaactgccggagctggaaacgtgggttctggcaacagtaaaacgtcaccgctggatcagcgactacaaagaagatgtgccggatgattggaaagtagatcatccggaagtgttctatgttaccctggcaaagcgaaatgctgaaggctggtggtacattgacatggaatgcgacagcttgaattacgacctaaacccagaagactatgaaaggaaagaagatttaagctgtccgcgggtggaggtccttgtctggaaaatgattccgagaggctgcgggaatgaaagaaactgaacgaggacgcatttacctgtgcgcggtctatgtgggagaccggaaagaaattaaaaaagaagcgcagcaaataagcatccagaaagacgatatctatggttacatagtagagccggagaatgggcgggcatatggatacccgaccatgcaggatctccggagagactggaaaagagggggagaatgacaagggcagaaaagagaagagccgcccggcagcaggagaaggataaagtccggtaccagctgacagcggaagaaatcagacagatagagaaaaaagcagtcgaatcaaaaaaagaacagattcgtgacagcatcatgaaagaggtgcaagaggagtggcagagaagagaggagatgttgagcgggaaagatgatggcgaaatcgtccagaatgttctctgtctgcttctggcagtcccggtcaaagttctttgtgaaaaattcaagtggaaaccatatccacttgacaaggaagaaaacaaaaactccaggatcttaaagttctcggaggcagtcatccgggaaacgaacgaagtttttgcagacaaaaacatagatatccggacatatggagaagaggtatatcgaaaatatggcattcggtacaggatagaggaggaagacgatggaagggattgagtgctgcgcgaactgtaagcactgcgtagcatatccgaaaaacaaccggtacggagacgttgattatatgtgtttgattggcggttattatattgctggaatacacaaggatcgaaataagattcggcgtcttactccgggcggcagaaaactggaatgcagatacgagaggaaaaaataaggagcggcaataatagcacgctcctctaaaaaagaaggtatgtacaacctaagttgattgagataacgcaattatacccaatcaagccagaaaaagcaagagagggggaatcttatggtatcggcaagtgctctaattaacacgatactgacacagatgcaggaatatgtcaaagagggagccctgaaagatgtgcagctgatcctctacatgaatctggcagattatagcttttcgaggaacgaagataccacggcagtcagcgaagagtcggatcggatgtatgaggtgatgcagctctggcagcaggatatgatcctcagaggactgaccaccggaacaatccgccagtatggtcatgaactcaagcagcttatcatctacgcgggaatcagcccgttagagatgggcgaataccatatcaagaactatcttgcattcggaaagatccggagaaaatggaaggataaaacatataacagcaaaatccgatcactgaaatcattctttgtttgggcgaccgaaaacaaagaaatgctggagaatccgatgaagaacatcaagccaacgaaagaggagtacaggatgcagccggttctgtcggcagaacagcgggagatcatgcgttgcgcctgcagaagcgaaagagagcttgcaattatggatctgctctattcttccggcggacgcgtctcggaaatctgccagttaaacatcgcagatatggattttatcaaccggcgggcgcgaatctacggaaagggtcggaaagaaagagaaatctatttctcggcgcaggcgtccctccatatcagagactatctaaaaacccgaacggatgataacccggctttgttagtgggaaccaagtcaccatgccgacggcttacgatagcagggatccagtggatcctcaaaagcatccagagccgagacgagagactgaacggcttaaagatatcccctcacacattccggagatcctgtggaacggatatgttaaatcgtggggcgccggttgagatggtcaaggaaaagctgggtcacgctaaggcagacacgaccctgcaatgttacgcgaaaatcagcacagaagcggtcagagacgcagaaaggcgcttcggggctgcataggaggatggagaaatgaacgacaacgatacggccaaaatactttgcccgttttatcgatccagaaaaatgaaaaaattaaggcagtcgatcacgattacatgtgaaaatctggagaataatatggggtttgatgtgaaaaatatgctgtcgttcaggtcaatccaggaacgggaggactggatggggctgttttgtcaggacttatatcaaaactgcccctattaccaaaaaatatataaaaaatacgaggagagagaagaatgggaattgtcaaaaatcagaaaaaagaaatcgagcgaaaaaaccagcaaatcgaattattgaaacatagcatcgggggaagagatcgggagatagcaatcctgagaggtcaggcactggctgcgcaggcgctgatcggagcagttataaaaaaatacggaaaactcgaaataccattggaagaagtgaggaaaaactaccgggtcaaggcgaaacttgattcagaaacaaagatgtggcacattgagagtgcagaagcataaagaaaagcgccggggagaacctggcgcttttctttatgccggtacgctgtccatatatagcgcatcggcgtttatatcgatcgcgtttttattcacaataaacaggatgtagaggatttcttaaaaaggagagcgctggaagcattcaaaaatgctcatgagctgttttattacagtcctacctacgcaatgggaatcgaatgcgagaggtgcgcgggagtcctccatgataaacacgggatgtcctgggatgagatagaagatcttgaaactaagatataccaggaatacgaaaggcagctgtaacggctgtcttttttgtatgggagaaaagtgaataaaatactgccaaaatagaggagaaagggggcgaaaacggatggcgagagcgaaatatcaagagtggattaacgatccggacaaaaaaactctactgtccggatgggcccgcaaaggattgagcgaccagcagatcgcgaaaaacataggaatctcaaggtctacgctgaatgaatggcggaaaaagtatccggacatttcggacacattaaaaaaagggaaagaagtagcagatgcggaagttgaaaatgccctctatctgaagtgtatcggtcacaaggtgcagctcaaaaagacttttaaggtcaaaaagatagaatataatgacgcaggaaagaaaatcaaagaggaggagaacctggaaacaggagaggatgaggtatacattcctccggatacaaaggcgatcatcttctggctaaccaaccggatgcgtgaagactggaaagagcgacagaacacccagatggagcaggaagaaaccgaagagagcggcgtgatcatgcttgcaccggcggatgtggagggagtgaaagagaaaattgaacactataaagccgaaaagctcaagagtgatatggcagccgcagccgaaacaggcgatcatgatgagcagaggggaagatgaggcgctttacggcggggcagcaggcggggggaagtcggattttatcctggcggaagccctgcgccaggtgcatatcccgtactatagaggaatcatctttagaaagacctatccgcagctcacagccctgatagaccgctctcgcgacatttatcagccagcctataagaaggctcgatacaacgagacggggcacgtctggaagttccccagcggcgcaaagatttacttcggatccatgcagtacaccaaggatcgaacaaattatcagggaaaacaatatgatttcatcggcttcgatgagctcacgcactttacttgggatgaatattcctacatggtttcccgaaaccgtcctgccggtccgggaacacgcgtctatatgcgttgtacagccaacccgggaggtgtgggacatggatgggtcaagcagtactttgtaaaggccggaaagccatacgagacagtgattcatgagcatgaaattgtgggaaagaacgggcagaaactccggatgtatcgaacgtcctgttttgtcccgtcaacgatttttgacaataaagagctgttaagcaataaccccaattacctggcggcgctggcatctcttccggaagcagagagggaggctcttttatatggcgattgggacagcttttccggacaggtattcgaggagttccgcgacaatccggacggctacgagacccagcaatacacgcatgtcattaagcccttccgaatcccggatgattgggcgatatatcgtggctttgactttggttatgctaaaccgtattcggtcggctggcacgcggtcgatcacgagggctgtatctatcgtatcaaggagatgtatggatgtaccggtaccccgaacacgggtgtcaagatatctccggatgagattgcaaagcaaatcagagaggtagagcacgccgatccgatgcttaaaggtcggaagatcataggaatcgccgatccgtccatctatgacgagtcccgcggagaatctatcgcggctatgatggagcgccagggcgtttattggtcgccgggagacaatacgcgactggccggaaaaatgcaatatcactatcgccttgcgttcgatgagaacggcagggcgatgttctacgtgttcgatacctgcaagaacttcattcggacgatcccggcgctggtatatgacgagaggaaagtggaggatattgacaccacacaggaggaccacatctatgatgaatgcagatatgtcctcatggagcacccgatcgcacctagaaagaacatcattcgcgagattccgcaggaggatccgctggatctgtataaagagaaccgtatggtatttagagtataggaggcacacatggaagaactaaaagaaaacctgacagagacaagaatcggagaacaggaagcccgggaagcgcttgcaacgcttgaaaagtataagcgcggtaagaaaactctggacgagcgcttgattgataacgaacagtggtggaagatgcggcactgggagcggtttaaaaagaaagacacgaacaaagaaaccatagaaccggcgagcgcctggctgtttaactccctggtaaataaacatgctgactttatggacaactatcctgaggcgaacatcctgccgcgtgaggaatcagacaaggagacagctaaaatcctgtctgaggtggtcccgtacatcatcgagaggaatggatacaaagcggtttactcggatacgacatggcagaaaattaagatgggaaccggaatctatggagtattctggaacccgcagaaagagaacggcatgggcgacattgagatccggcgctgcgatccgctcaaaatgtactgggagcctggaattgataagattcaggactctcgaaatctgttctatctcgatacgatggatacggatatcctagaacagatctatccacagctcaagggaaagctgcaggatacgttacttgatatcaaagaataccagacagatgattatgttgataacaccggaaagtcgttgattgttgactggtattataaaaaaacagtcgcgggcatatccggaggcgtgccggtcacgaagaccatcctgcactattgtaagatctgcaatggtcaggtgctctacgcttcagagaacgatccgaagatgcgagatggctggtatcaacatggcatgtatccgtttgtgtttgatatgatgttcccggtcgagaatagcccctacggattcggatacctggacacaatgaaagactgccaggaatacattgacaaattaggacaggcaattttaaagaattcgattgcgggctcgagaccgcgctacggatgcaaggatggtgcaggatttaatgagcaggagtttacagacctttcccgggatatcgtgcattatgtcggaaatagggatgatttacagccgctgacggtggcgccgctgccctcaatctattaccaggtataccaggggaaaatcgaggagctgaaagaaacatcaggcaaccgagacttttcgcagggtgccacaacctccggcgtcacagccgcatccgcgatcgcagcgctgcaggaagcagggagcaagctggcgagagatatgattgatggctcattccaggcacatcaggcagtgatttacatggttttggaactcatcaggcagttttataccacacccagagtcttccggatcacgaataaatcgggtgtagaggaatttatcacgatggataacgctggaatgcagccgcaggcgatgtcgattgacttcacaaatatgatggcacagcgtaaaccaatctacgatatcacagtcaccgcccagaaagccagcccgttcactaaaatctcacagaatgagcttgcgaaagagatgtataaccttggattcttcaatcctcagctcgccgaccaggctcttgcctgccttgatatgatgatgtttgacggcaaagaggaaatcatgcagaagatatcacagaatggaacgatgtaccagcagatgcagcagatgcagcagaccatgagccagatggcagcagtgatcgcccagagcaccggagatacccgcctgcttgatgcggtcggaatgatgggaccggcagaacagccgatcgtgtccggcggcagcacgaagtcctcgcagctggatgcaatggggaacgccacgaaagaaactgtaagctctaccgccggaaaagccagagccagggcagcagaggcagccacaccgaagggagcgcagtaatgacgaaagtaatcgaacaaaaagatggagatacgattgaatttatcattgacggtcacgctgacaagataaacccggatgaggggaatatcctgtgtgcagccgtctcaatgctggggcagacgctcatggaatgcttatggaaaataaaagcagatgccagaatggaaagccacgccggatacatccggattctgtgccgaatggaagaaaatgaggtggaaatcaagcatctgtttgacttcacaaaaaccggatttttgcttttaaaatcaaggtatccggagcaatttgacctggtgggagaattttgaaaaataatatgccaaaatacaatcatagacacgccggagagacggcaggaggcagctggagagacagacggacacgccggaaagacggcagaggacaagctggaaagacagccgacacgccggagagacggcagataggcacgccggaaagacggcagaaaggaaagaaagatgattagattgaacctcagaatgttcgaaggtggagaaggaggcgcagcgggagcgactacaggagccgcaccggcagaaaatggaacgcagccggcaggagcagtcggaacaccggaagaaggtaaaaagccagccgaaaccgtagaggagaccccggaggaacgcgccaagtcctataacgacctgattaaaggcaaattccgcgacatgtacgatgcagacgtgcagaaggtaatcaagagccgtgtgggcgatatgaagcagctgcagaagcagatgcaggaacagtcggacatcatcggattgatggcaaagaagtacggtcttgcatctgacaatatgtcggatattcgcacagcactggaaaatgacgacatgttttgggaagaggcagcagccgaccagggcatgacggtagacagctacaagaagatgatgaagctggaagcagaaaatgaatctttccggaaagccaaggaggaggcagagcgtaagaaccagcgggatgcggtattccagaaatgggatcgggaagcggaagaactgaaacggttctatccgcagtttgacctgcagaccgaaatccaggatcagagattccttgacctgatgggcgcgggaattgatatgcgtacgatctatgagactcttcatcatgatgaaatcattccggcactgatgcagcagacagccaaggcaaccgccagacagcaggcggcagctgtgcagagcggccagatgagaccggcggagaatggcatgtcaagccatccggcagcgcagatcgtgaaagatccggcaaagatgaccaaggaagagcgccaggaatacgccagaagagcagcaagaggggagatcattacattcagagagtaggaggatggaatgatttacttagatttaagattatttgatgatgtaacaaacaccactggttcgaccggtacaggaaacgaactcagtcatgagatgaagacgtactatgacaagaccttgattgacattgcgggtccgcgtctggtacacgatcagttcggccagaaacgaccgatcccgaaaaatggcggtaaaacaatcgagtttagaaagtacaccccgctcagcaaggcattaaccccgctgactgagggcgtaaccccggaaggcaacaaactggatgtcagcatcgtgacggcgaccgtcaagcagtacggtgactatatcagattgtctgatatgctgcttatgacagcgatcgacaacaacctggtggaagccatgaagctcttaggcaatcaggcaggtgcaacgctggatactgtcactagagaagtccttaatggcggaacgaatgtacagtatgcagagggacagactgcatcaagagccactttgacccaggacatgaaactgaccgtcaaagcggttaagatggcagtcagagcactgaaaaaacagaatgctcagaagattgacggctggtatgtgggaatcatccatccggatatcgcctatgacctcacggaggatgaggaatggaaagactggcatcgatacaccaagccggaaaacgcttaccagaatgagatcggagagattggcggagtccgttttgtggaatctaccgaagcaaagatctttgcaaaggcaggagctgcgggaacaggaagcgataagatcgacgtatactcaacgctgatcctcggtgcaaacgcatatggaatcacggatgttgagggcggcggtcttgaaacgatcgtaaaacagcttggttccggcggtacagccgatccgctgaaccagagagcaaccgccggatggaaagccaccaagacggcggaacgtctggtagaacagtacatggtgcgtattgagacgggaagcacattctcagaaggaaaggggaactaaatggcagcgaagaaaacggaagaaatgaccaaagaggtaagaactgaggagacaaccgaagaggtaaaagccgaagcaaaaccggaggagaagccggatgattgggtaaatgtctacctgatgagagattctgacaagtacaagggcgatgtctttgtgcaggtgaatggagtgggctatatcatccagcgcggaaagaacgtaaaagttccaaaagcggttgcggaggtgctgcagaactcccaggaacaggactccagaacagcggagctcatcgaccaggaaacggaaaaattcgaaaatggtttgaagatgctgatctaaaccggacgggatgcgtgcgcaaacacgcatcctgttttgaaaaaggaggaagagatgataacgattgagaatagacagatgttgattccacgcggagaagagataatcggaaccagcgcggacaacctgtgtgacaccagaacattctcactcccgcgcatatctgccacccttttagatttgtccgctctgaaattcttcctcgatttggaatacgccgacggaaccaaggacacggattctttgcaagcaacatatgaggaagatcgcatcctgctcctgtggcagattcggaacacacagctgcgcgttcctggcgcggtctttatcgcgctccgcggatatgatgataccgggacgatgcgatacacatcatataagacaccggtatacgtagaggatgcaatcaacaccccggaaggaaaaccgggcttgagtgagtttgaacgcctggaaaaggaactgaatgcaggtcttgagaaggctgacaccgccacgaaaaaagcagatacggcggcaggactggcgaactcagcagcaaccagagcgacaacggcagcagaagaaacggaaaaactgcgtgagaacattgcgggaaaactagaccgtggagaattaaaaggagataagggagataaaggcgaaaaaggagatactggtctgcagggaccgcaaggcatccagggcgaaaaaggagataccggtccgcaaggacctcagggaatccaaggagtgaagggggagagcggtgtcatggttccggcatcggggatgttttcgctctatctggatccggaaacaggaaatctctatgcagattatccggatggagagaagccgccagcattccattatgattcggaaacagggaatctctattaccttacaggagaggatgtgaaaaacgatggctaggattttaattggaaatatcaaaggaccgcagggaccacagggaatccagggagagactggtccgcagggcttacagggaatccagggagagactggcccacagggaccgcaaggcatccagggcgaaaaaggagataccggtccacagggaccgcagggcattcaaggaccgcttccgccactgatagcaaattatcttgctacggaatccggaaaagcggcattggatgcgattgtggggaaactgctggatgagagattgacggcagcggagaaatcacttactcagttaaatagcgaggcttccactcatctaaaagaaagtggtagcgaaaatagcttttgcgctgcttttcaatcgagatatcaatatcacactaatgctaattacatgttggcgagtggaatctacaaaacaggcaaaacgggtttaaatcttccgtttgagggctattggatcataataacctttaacacatccaacaaccttggaaatagttcgaccgcttggatcacgcaatttgccatttcaaccgattcgagtgacaaagctatttattttcgaagaaacataaactacaccccgaccacttgggaatcctggaataaacttgtagcaagttaaatagtgatattaaaattaaattttatggcaaagttacagatttatcagtaataaaaacactttgtcaacaagaatatgaatgttgggttggctatattgattggaagaatactgaaatcttgccctctactggtggtactatgctttggtttgcatttgattggatagtatgtgggttatgttatggaaagatgttttatttaaatatggatactcttacatggtcttaagtttaaatattctcatctattattaaataacaatttaactgagtaatagaggggcgaaatgttcacagtaaagaaaaataagatcgaaaatggacacgattgctggggaagaagtgaattcgataatgtgtatgatgtttatcacaataacgaatttgtatgtcgtatgatgagtgatccaacagaattaatcaacaaagttaataacatcgtaaaaaaggaggagagtccaatgaataaatacatcggaacaaaaatgattgaagcggaaccaatgacgaagggagtttacaacgaaagtagaggccgagctgttccaggggatccgaacgatgcgggatatctggtaaagtaccaggatggttacgagtcatggagcccgaaggaagtatttgataaggcttacatgaaagtagatgataatacagaacttccgtctggtgtcagcatcggccagaagatggtagatgagttcattgcatacacggaaatgaagacgatgggaacgaagacaacagtagttcgctgtgtgcttagaaacggatttgaaattgtagaatcaaccggatgcgtggacgagaaaaattattcggagaagatcggatatgaaatctgcatgggtaaaatcaaagataagatttgggagctgttaggcttcctgttacagacggcctggaagggaattcagtaggagggaagaaatgaaagcaatgttatcacagccgatggctggcaaaacggacgaagaaattgtaaaaacaagagaaaaggcagtcaaagcactgaaagaaaaagggtatgagattgtaaataccctgtttaccgatgaatggtatagcagggaaaagatggaagagagaggagtggaacagattccgctgtgtttcctggcaaagtccttagagaacatgtctttgtgtcatgctgcatatttctgcaaaggatgggaaaaggcaagagggtgccggatcgaacatgatgctgcggttgcctatggtcttacagtgctttatgaagaataaggagggatatcatggataagcttattttaaaggacggaacgaagattgagatggtagcaggagcttctctgagtgcaattcagattgagagcgagagtcgggagactatgctggagatttggaaaaagctgacagacgaaaatctgaaatcgatccggatcgaaacgtcagacggtctgacggtgggaaaatatgaagatgtccttctggtttctgaaacatccgctgttgaagggggcaaagtaaaaaccagcttcaatatgcgtgaaaagacatccgaagaaaaacgtctggacgcattggaagaaagtcaggagatccaggatgaggcgatcatagatctcggtgctgcggcgagtgagcttgcggagaaaggaggtgctaagtgatgggggctttttatggaaagaaaatcagagacgggaaaatgacacttgaaaaggtgccgttatattggcgtaaggtaaccgagaaatggttggaggagcatccggagggatagaatgatcgatacagaaattgcagtagccttgatcgcgtccggcggaggtgtcctgggggcttttgcaggtgtgattgcatcggcgaagctcatgacataccggatggggcagcttgaaaagaaagttgaaaagcataatacagtaatcgaacgcacgtataagctggaagaaatacaggctgtcatgcaggaacaaatccgagtggcgaatcatcgtatccaggatttggaggagggaagagcttgaaagaaaaacttgcgaaactgattgatgtaaaaagccttatgacattagcattgacagcgggattcattgggctgacgtgttccggggaagtatccggacaggaatacatgagcatttttactatgattgtagggttttatttcggaacccaggcagagaaagcaagaaaatagaaagagaggaaagaaagatgagttgcaacgtacatggaaacaagaatgcaaacgaagtacataactatagcgccaagaaagcgcagaaattagggcatccggaaatgacggttgatccggagtgcacctgtgatgttggctgcacgggtccggcaaaagaaggaaaagggaacacgccggtaggaccgggagcagaaacaaaaaagccgggaccggcagatgagtgcaaataatgatttagggcggatattttccgccctgtgttcgtagaaaggacaaatatgagagatattacattgtgccatccgcgtctccagcgtcttgcgggtgcgtggatgaaagcctgtgtgacacaagggattgcagtgacgattggggaaacattccggacagtagcagagcaggatgccctctatgctcagggacgtacaaaaccgggaaaaaaggtaaccaatgcaccgggcagcagctacagttcacagcatcagtggggaatcgcctttgatttttatttaataatggacattgatggagatggcagcacgtcagatgatgcatttaatgacagaacaggaatgtttaaaaaagcggctgagattgccaaggggctgggacttgcctggggaggagattggaagagcctggaagacaaaccgcatctttatctgccggactggggcagcggcacgggaattttgaagcagaaatatgggacatttgagaatttcaaaaagacttgggcggcggaggatggagctgcagcttcacagccgagcgccccgcaggtatcgatcaccgatctgaaagaagtaaagagcggcatgcgcggtctgtgcattctggcatcgccgacattgattatccgaacaatcccgggcggggcagattccggaagacgttataataacggagagcacgtgcagccgcttcggaagtgctttgtaaatggaaaaccttggatcgagacctcgctcggatggatttccggggagtatgtcggaggctggatttggcaggatggacgctggtggtatgtcctgaaaggttacaaatatctgcatgatacagtctgccggattgatggacagttgtatgcgttcgattctgacggctggatgctgacggcggatagaatcgcggaagatggacacatcataaaagcgtaacatataagatgtacaagctcatcacagcaatgtggtgggctttttgtgtgggagaaaaaaataaaaaaagctgtcagaatagagactatgaggaggcgatgaaattatgaagatagcggagattctggcaagggtagatgatgaaaagctgaaccagtacgatgccagagtaaaaacagcctggctgtcagaggtagagggaatggttgtggatgagattctgaacatggcggaaggaaatgatatagagtttgatggatacgattatgatcgggactttgaaaaaactcttctggttccggatcgtttcggagatgtctattcaaactacttagctgccaagattgactataaaaacggagagatagaacgatacaacaacagcgtggcagcgtttgaatcatccttccagacatttgcagcatattaccgaagaagtcatatcccaaaagacacagcacagttcagggggtggtaatgatgagattgccgcttattaatacggtcagtaggaccagaaaacaggaaggggtcttcggcgggctcgataccagagagatcgtgcaggatggatatttcgcggacatgaaaaatatgtcctccgattattatccggccgccggtccgagggaagcgcgcggggcggtcataaaaatcctagaaaagccgaacggactctattggaagaacggtctggcttatgtggatggaacgaaactgtattacaacgaccaggaaaagggcgaggtaacagatagtaaaaaaatcatggttggaatgggtgcctacatcatcattcttccggataaggtgtacttaaacacggattccggagaatttggttcgatggaaaagacatttgcccaagcatcgaccgccaccttcgccccgtcttacactggttccacctatacaaaaatatcatgtacaggaattggaaagcagttcaatcagtatgatggcgtggagctctccggatgcacgaatgcggactacaataagacagccaccatccaggcaaaaacagacgacagcatcacagtgataggagctctggagaaaagcttcacacaggattcaggattgacgctaaaacggaaagttccggatatggactttctgacggaatgcgaaaacagactgtggggctgcagcagtaagaaccatgaggtctatgcaagcaaacttggagatccgttgaattggaatgtgtttgagggtatatcaacagactcttatgcggcaacgataggctcagatggagatttcacagcagcggccacttactccggatatgccctgtttttcaaagagcatacgattcataaggtgtacggaaataagccgtcaaacatccagattcatacacaggaagccccgggtgtgatgaagggatgtaatgaaagcgtgagactggtgggaaccacgctgatatacctttctgataccggtgtgtatgggtataccggaggcgtcccgtttgccctgtcggaggtgctggaaaaattcaatctgtcggagggagtggcaggaaaatataaagaaaaatactatctctcagcagaaacaggaaaaggtaagaggctattggtctatgacacagccaaaagactctggcataaagaagatgatacgcagatgcttcttactgcatcgggagacggaaaactgtatttcatcaatcaaaacaaggagcttcgccagattgaaggaggagaagaaccgatagaatggtatctggaaacgggagacctggaagaaagtcttctgaatcgaaaatacatcggaaagattcagtttctcctggaattggaacgagggagccaggtagaagtctttctaaaacatgattcagacgctgcatttcgccggatgctcactgtatacgctacaagaaaacgaacctacacgattccgattaaaccaatgcggtgctttcactatcgctggagactggaaggaaagggaaaagcccgcctgattgcagtcggaaaatacatcgaagaagggagtgaaatctgatggcgcagtataaagcaatggaaggctttgacaagatggaccaaaaagaactcacaggctatctctatcagcttaacgaacagcttcgctacatgttcgataatctgacgccggaggataattactctaaccaggcgctgacgaagtatctggaagatgagaagagggtggcttctctcaagttcgacctggatggacttaaggtggaggtatctgatttcgaaaagaacacgaatgcaaaattcaaagtcacggatagcaagattgatatgaaggtttcaaagggaaccgtatcatcggaaatctctttggaatctggacaggttacaatctccggtaaccgtctggtggtaaactccacgaatttcaaactcgacgcatctggaaatgcaacattttcgggaacggtcaaaggtgctacaattaccggttcacatatccggtgtaagggtggggcatttgaggcggatgaggatgcggtatatatcggcggcttctatacgttcgataccagccggggtcagtatctgggaaccggcgatcagagtaccggaatgggagataacgatctgtattgcttctggaccggctgggatggaacggggaatatcagcgatacaaaaccgcagaggatcctggatcactatggatgtgtcttgtctccgtccaatgcctatgcacaggaattatatctcaatcaccctgttttttccgggaagacccactattggggcgtggcagaaacgatccaggatatctatgatcgcctggatgatttggaaagcagaagttaggaggcagtcatgaagaaatatatctatgatgaaattgcaatcaaagcagtcatgaatatcttgaatagtttaaaggtagaaggaatcaaccaggcacagaacttggttaagatggcggctatcttgagcgcgggagaaattgaagaaagggagggggataaataatggcagtaggaagtatcgtagattacctaaatagctcaggaagagattccagctatgcagccagacggaagcttgccgaggagtatgggatgtctggatattcgggttcagcaagccagaacacgaaactccttagaatgctgcagggcggtgctcagccgaccaatagcacagcggccaaagcacaggaattggctaatgcagcaccatcgaacaacgtcacagccggagtgataaccgcatccggctctgcatccggaggaacagaagcaaaaccggcctaccagcgctctgaccgggtgaatgaatattatgaaaagacgagaaagctggaacggaacaaaccggacgagtttgaaagcaaatacgaaggtcagatttcggatatcctggacaatatcctgaaccgcccgaagttctcctacacctccgaagatatgacgaatgacgatctctataaaatgtaccgcgatcagtatctgcgccagggaaaccttgcgatgcgtgacacgatggggaacgcagcgtcattgacgggcggttatggcaatacctacgcatcagccgccgggcagcaggcctatgacaattatgtatcgatgctgaatgataaagccctggacttctatgaccgcgcatatcagcgatataacgacgagggacaaaacctctataatcagatgaatgtagtaaccggtcttgataacacggactatcagcgatatagagatacggtcagcgattactataatgacctcaattattataacggcagatataaccaggaatacgggtatgactatggccagtatcaggaccaggtagcggcggaccagtgggcgcaggaatttgcattccagaagcagcaggcggcgcaggagcaggcgaactgggaggctgagatggcacttgccagacagaaagcggcaagctcgggcggctcgggtggaagaagaagatcgtcttcgtcgaagaagaaatcaagttcatcaagtacccagaatactatgggatggcaggaagctcacgatgtctacatatcagcattgaatacacaaggacaagcagtagcagatgaaatcatgaacagtcttgaaaaagatggattggtagatatgtataaagacgaaagacagaaagatgcacttggtccagaagtaagagctaagcttgacaaagtacttgctactggtttgacgagaaattcgaataccgtgcatacgaaagaaagtgctgctaaagaaaaactcgccgacgaatggaaaaagaaatgggagaaagttaaatgagtaccaagagcaaaaaaacaatgaaagattatcagctggaggaaggaagaagacaaaggcagaaatatcttgatgagttaggaatatcgttagatgattcatcctcgagtagctcatcttcaaataactcatcttcgagtggttcttccttgagtagttcatattcaaatacttccacgacatccaccaagagcaaaaaaacaatgaaagattatcagttggaggagggaaggagacagaggcagaaatatcttgatggctatcgaaatataccgaacgaaacgatggcacccagtgaatatttaaaaaaacattcaacaaattatgctagggaatatgctgccagcaaaactggaacacaaaaagcagcttcccaaaaatcaaccctcaccccgcgagcagccacaacctcgcgggtgagtgccaatggcacgcgcccgtatagcgaccaggaatttacgcagatggtactggactatgccaaacgcactccgaacagaggaaaccagagcttccgttcctctaccggcctgacttattccggaaagcagggaacaatcaccttcgcccaggcgcaggcagatccgaaatataaagaatacgtccaaaaaggaagccgaaacctgaaaggctattcagatggattcatcggggatctgaaagcggcggcgaaagtaagagatacatcagcagtaccggatcttcgttcggagtacatggataacgacgaaaaagagatgtacaactatctcctcggaaaatacggcacagacacggcggacgagttcgaaaaaggtctcgaggacacactgagcgccagattgagacacgatgagaccaagacggttagagatgcgtcacggagaaatgtgcttgctggtgtcggttataacgtctatggagcaatggaaagcccgaagggatatgtctacgcagctaccaaaacaggaattgacaagacgaaagaaatcaaggatctgatgaatgcaggttcaaccgatgaatataagtcaatcctggaggaatacaagaaacggaataccccggttgatctgaatgatccggcattctcaggaaatgcaatcatgaatgcctctaacgagggaatcaaacaggcgatcggcggaaccccggtaagagatttcgctatcgatacaggcttgtcgatggctcaatctgtttcccgtatgccgctgggagcactgaatgttgtaatggctggcggaagtgcggcgacggatgcgtatgtggatgcagcaaacaggggagcaaccggcgatcaggcgctgctccagggcgccgcccagggaacagcggaaggtgtcggagaaaacttcagtcttggaaaattaaagggaatgaaagaagtaccagggaaaggtgcaaaggctgtcattaaaaacctggcgaagcaggcaattgcggaaggttctgaagagggcgcgacggaaatcatgaataccattaccgacaagatgatcatgggaaataaatcaaactatgacacagcggtgaactattacataagccagggaatgagcaaagagcaggcgcagatgcgggcctatgaagagatcgcccagaatgtcggcatggcggctttgggcggtgcaacctcaggtgcaatcatgggtgccggggcgcaggcgcttggaaccttcttacagcgcggaacaatggcgcaggaatacgcggaacagagagcaatcacaccagaggaacagacggcacagcagcaggccaaagagcagcgtgcgccggtggcttctgagggtgtttcgagcatggttcaaaatacacagaataacgcaggggcggggagtacagccatctctgatattcctgtttcggatgaaaatatgccagctgcttcgaaaatcgttccaaatgcaaaagaaaatgtttctaatatcaacaaaaacgttactggtatcaacaaaaacgttgatgatatcaatgaaaacgttaccaatatcaacgaaaacgttgataacacctctgaaaatgtgcaaaattccatcagcaacattccagagcagatgaacacacagaccgaaagcaaccggcaggcagagacaagtcagcaaacagaaacaagtcagcaggaagaaacaagtctgcaagcggaaacaagtcggccggcagaaaatcagcagagcgagaaaacagcagaacgcgcccatccggattctgtacaggaaagttatgccagagaatacgctgagaatatgacagaggaaacccggagaaaggaatacatcgaaagccatagagaagatttgaatgatatcttctcagacctgggagaaaatggaagaacggcagcagtcgaatcttacgatccggaggttccggtatcgcagtatcgccgcgcatttaaccggtattatgattctgggcgctatgcgtccgatatcggagtggcggaaaaatcagtcctatccttatatctgacaggagaacagcagcttgcggcatacaaagcaggagcacaggacagaaaactggagctggatcgcatgtcaagacggcggcagcaggggccggcgcaccagggcggactggaaaatctgtcccagaacgcgacacaggcgcagcagaaccttgcagaaagtctcggaaagcgtacagggcttaaattcatcctggaggattccttggaatccggagcagtgggtgaatacgaaggaaagaaaggcacgatccggatctccgccaactcagaaaactttcttcgaacaaacagccacgaactaactcactttatcaaagagaatgctccggagcatttcacatcctatcgtgatacagttatcagcgcttacttatccgcagagggtcagacattggaacagatgacggaaagctatgaaaaagcctacgagaaacacggtcagaagctctccagggatgaaatcatggaggagattgccgcggatgctacgggaaaattctggaatgatgaggaatttgttcagaaaatcgcccgtaaggataaaacggtcgcacagaaaattgtggatttcctgagtgatatgctggatgcaatcaagagtcttattaaaaacgagcacacaggaaaagcggccgaaacgttggcagaacagaaagattcgtttgaaaaagcaagaaacctctggatggatgcactggatcaggcaagcgagaactataagatgggtgagacaagcacggagagcgctgtgcgcttccagctggcaaaaccggatcaggtgacagacaagcacatcgaagaaaactatgactatgtccggaagatggacagtgtcgcatcgattcgcggggatgagtttaagggagatccaaaggaaatacgtagcaaaatcatagaactgtataattcttacggaaatgtggttcataatgatgtggtaggggatgttgctttaagtatgcgttcggttcgcaatgatctggcgcatggttatggagacaaaaaagctgccgcttttgcaacggtaaaagatgtaattgaaaatggaaaggttttaagatattcgaaagactggaaaggaagaggatatgattctgtttcaataggagcaaagataaatattacagatggggaaaatgcaggtcagtattatgaggtatgcgttgtaaaagtagacaggacaaatcgaatgtatctacacgaagtggatatagaaaaggcagatagtgtcccgttcaactacgcccaggccgaacctgcaaaaaaacatagcggctacaactatctgcctatctccagtatatttgacagactgcgcaatgtcaagaatgaaaatgttaaatatcagcttggagataatgaactggaagagacagataataaggaattggttgcccgtaatgatctgacagaagaaaagctggtagaaagtttagatatgaacagccctatctcattaaaaacaaaaccgggtaagggtggggaagatatgggagacatttcaattgtatttaagaaagatgcggttgcttcgggcgaaatccagaaaggaaattttaaagatggcgttgctgccgtcattctgccgaccaatgcaagtgataacctaaaagcccgcttaaaccaggaaggagtcaatacgattctttatgatcccaatcttccggatgccagaaagaaggcgatcagtgaattgaaggatgttcgtttccagattgatgattccgatatggacattgattatgatgaggtagttcgggaaaatagtgagctgaggaaaatcaacgaggaattaaagaatcagctggtcctcacgaaagactacgtcccgcgtcaggaagatatccggaaatatgccggaaagcttctgaaagactataattccacctatccgcagaagaaactggaagagaatttaagccgcttttatgattacatccataaagcgaagcgcctggacgcacaggagacgatgagtatagcttctcagatagggcattctatcctggaaaaatcacagcaggtagatacggagcagacgcaggtataccggaatattctgaatgatatcaaaggaacacctatctatgttccggaagaggtaaggaacaacctggattcggagggaggttacaatgcattccgaaaaaaatattttggaaagattaccttccgaaatgctggtgtgagtgtggatgtggcatacaatgaattttcgggactgcatccggatctcttcccggcggacattatcaatccgaccgaccagcttttacagattgcggacgtcctggacgagtcccgcccgaaagttgaaaatccctatggagcggatatagatgaaatgtctgttatgttgggacaggagatcctggacaataaagccaatatccggaatatcccgccaacactggcggataagctctttgcccgcgcggatgagcgtgaggctgagtatattttaaagcggaaagaatacgaacagaagctgaaagaataccgcggaaaagtggaggaacgagagcgggggcggaaagataagaaacagatcgttcgtgatgttaccaagatgcagaaatggctcttatctcctacggatcgcgaccacgtcccggaaagcatgagatcggcagttacaaagttcttgtcctgcatcgattacagctcatccagactgaatgcagatggaaacgaaacgcagcgcacaagggattggaatgatgcgaaaaaggtgtatgattccatcctaaagagtgatggtctcttgaaaggcgaaaagagcgacatgtacatcgaggtcgatccggatctcgtttcgaaactagatgaactccagagcatggcagatgaagggcggaagctggaggacttatcagcaaaagagctccgaaccttaaaagaaactgtatcagcgatgaaacacagcatcgaagacgccaacaagatgtacacgaacaaacgctatgagaaagcatctgaggcagcagagagcacgctgaaagaatggcagggacggaaaaataagaagaccatcaaggcgctgagtgcggcggataagtttctgcaggtccatatgctggatagtttcacggcgttcgatcgtctggggaacactgccacaagtgtataccagagcctgagagacggatttgataccaaaatgagagacacccgaacagctcaggaatatatggaaaatttaaagggtgagctggaaatcgaagataaagagatccaggagtggaccggcaacaaggcaaaacgtcagacgttcaaggtctctggtggagaaatctcattgactccggcgcaggtgatgagcctttactgcctggataagcgtccgcaggcacgggagcatctttataatcagcttcggggtatccggacacagggagtagaacgagaagtcaaaataaaaggaaggaagctcttcaaagtggtagaggcaaatgttccggtaacggtgacaccaagcgacgtgcattctatcacggaaacactaacaccgaaacagaaagcccttgcagatggaattgtaaagttcttcacagaccagacggctcagtggggaaacgacgtcagcatgacgctctacgggtataaaaaattcaacgcacagaattatttcccgattgtggtcgataaaaacgagattgccaagacaaacgcggatgtcggccgtgatatccagacactgaaaaatttgggaatcacgaaaaacactacaaaacacgcgaaaaacagcctgattattgaagatatcttcgatgtctacacgcgccaggcggatcagatgggaagctatcattctttcgtggtcccgatgtcggattttcaaaaatattacaacttcaacgatgtggaaaagggaaatctgagggaacagatggagcgtgtctatggaaaagagatgagcgcctggatggatgcattcctgaaagatttgaacggagtcggcagcggcgaacgcgaattgacttcgaatttcctaagaaatgcaaaatctgccgcagttggctggaacctaagaacagcgatccagcagccgaccgcctacttccgtgcggcagcagaaatcgatccgaaataccttgcgcagggcattaaactgcatgtatcagatgcagaatgggaccaggtaaagaattatgcaccgattgcctggtggaaagaccagggcttttttgatatcaataccggccgtagtatgaaaagtatgctgattggagcggataccgttcgggaaaagatgatcaataaatcaatggactgggctggaaagggtgacgaactggcatggaaacgcttatggttagcaaccaaggcagaaacagccgcccggcacccggaactgacggttgattcggaagagtttctgcagaagagtggagaacgcttctctgaaatcattgataagacacaggtagtagacagtgtctttcatcggagctgggcgatgcgggagaactggacgaaattctatacatctttcatgtcagagcctattaaaagctataatatgctctatcgcgcggcgatgaacattgcagactccaaagagctcaatggaaaagccgggaaagcggagaaagcaaaattcgccagggtggccgctgcatatgcctctaccggaattatcacagcactggtcgcgtctgtcatggatgtggtgcgaaacgacgatgatgataaggatatatgggagaaatatattgacgccctcggcgggaatatcgcagacaacctcaatgttctgaatctgattccgattgcaaaggatgttgtttcgatgtttggcgggaactcttcccagcgtatggatctgcagggaattgaatacgccgtatatgcctgcaatgagatgaaaaaattcgtagcaggagaaagtaaatacaccccgacaggcatcctgtacaagtggatgaacccgctctcaaggctgaccggtatcccgattgggaaccttctccgggatgctggcgccgtggttgatacagcgctggatatcacagagatggatacaggggactactggaagacaaagagaatctatgacatgtcaaacccggataacgtcaccatgtacaccaagaaggctctgaaagcctacagggaggggaagggagaactaggaggcagaatcctatccgatctaatcaaagcaggacagacagagacaaaggttgattctgcaatgaaaactggtttaaagaacgaacctctgatccaggaggcggcggatgcgatgctgaactgggatctcgatacatatgagagtaagattgatgaggtggcatctaggggaattgataaggatctggtagtcaaggcggttgatacggtaatcaataagaaaaagaaagaactggaaggaggaacagaagaaacacaggaagagagcacaacgccggaagagacaggaccggcagagcagaaagaggttcaactctacgatatgtccaacgtaaatgaggcgctggcagcaggagagaacgaaaaagcgaatcaaatgctgaaaagtgtggtagaatcaaagaaagcagacggaaagacacagaaagaggtcatttcatcggtcaaaagttccttgacgaataaatataaaaagaaatacctcgccgcgggcgccgatgagcgtgcaaacatcgagatccagctggaacgcctgagagtggacggaagaagggtgttctcaagtgaggacttctcaagatggagaaaaaattcaaagaaaaaatgatatcataggttactgcgctacggcggtcctgacggcgaaatcggagcctctatgcgctacctgtcccagcggtatacgatgccttataagatgcagaaaggacttctgaccgacatcggaaccgaggaactcgcccatatggagatgattgccgccattgtccagcagctcacgcgcaaccttactccggcacagatcgagtcatccgggttcggaccatactatatcgaccacaccacggcaatctggccgcaggcagcaggcggaatcccgttcaatgcgtgcgagttccagtcgaagggcgatgcgatcacggatttatatgaggatatggcagcagagcagaaagcccgcacaacttacgacaatattctccgcgtggtcaaagatccggaagtatgcgatccgatccgttttctgcgcgagcgggagattgtacattttcagcggtttggtgaagctttaagaaatgtacaggatcacctgagcagtcgtaatttctatacgtttaacccagagtttgataaagtgaaagcgaagggataaaacaaaaacctccgtaaacaatgtcaaattcattctttacggaggttttcaaaccagcaccgagtgaggataaatccgaaccctcaacctccgccagtgtgatggtcttagaactgttcttacagttaaaagtaaggaattatcttgtcctcataaagatacaccgcatttacaaaactgtcaatcagtctttgccgctgttcccgctttgtcacatcaaatttacggaagcggtaaatgaaaaatgctatctgttctcttgtaagcaggggcttgtgcatttcctcctgcaaaatgctgacttcaagctgccttttggtttcctccaactcgtccagtctttgcttggtggacggagtaaaaatccctgcttgaatggagttgagaatattgttaatacctttttccgtttctgcaagctactttttcaaaagaggcagatcggtgctttctttcttctgcaactccatcagcgtatcaatcagtcgttccatgacttcatcattcataattgctttcatacagtaattgagcgtacatataaattagaggagaccgaggcagtgatgcagaaacagatccgggtggcaaaccatcggatcgcagatttggaaaagcagatggagggataaggtatgcagattaaagattatgtaaagccggaattacttgtggtagcagtagtgctgtactttattgggatgtggctgaagcagagtgagacagtgaaagacaaatacatcccactcattaatgggctgattggcgttgcgatttgtgccatctatgtgttcgccacctgtgcctgcggcagtggtcaggatatcgcgctggcagttttcacggcacttacacagggcgtccttgtggcgggattgtctacgtatgtaaaccagatttttaagcagtcaggaaaagaagagtagaaggaggcgatccgactatctcccgcggcagttcggggcgtggctgccgttgcggcatcgcaacaatagggggaaatcgacgaaagccgatagtaggaataaaaacccccaaggagtcgcgatccttgggggttttgtcgttgcctgtgatggacaactactatctcttagcctatcggcattatagcatatgcgaaaattctttgcaagataccccggaaaacaaaatgtcatattttttcatatcataaagaaaagaggacaaatctatgagagatatcacattatgccatccgcgtctccaggcgctgactgcgcagctcgttgataagtgtgtcggtgcaggtttgccgattaaaatcggggaatctttccggagcgtcgccgaacaggacgctttgtatgcacaagggcggactcagccgggcagtattgtcacgaatgctaggggcagcagctatagcagccagcaccaatggggcattgcagcggatttctaccgggcagatggaaaaggcgcctataatgagtctggagattattttaagaaagtcggagagcttgccaaaaatctggggcttggatggggcggcgattggaaaagcatcgtagataagccacacgtatatttgccggattggggcagcggtaccgggattttgaaacagaaatatgggacatttgaggcgtttaaaaagacctgggcggcggagaacagcacggtaccagaatagtcaaaaacggtgatcaccgatcttaaagaaattaagagcggcatacgcgggttgagagtcattgcgtcctcacttatcatccgaacaactccaaaaggtacagacacaggcaagcgctacaccaaggatcagcgtgtgcagccaattaataaatgctttgccgacggcgatccgtggatccagactgcggacggctgggtgtctggcaagtatcttactggctgggtgtgccaggacgggcgctggtggtatctgctgagtgagtacacctaccggcacgatgcagtctgccagattgacgggcaggcgtatgcgtttgattcggatggctggatgattaccgcagatcggatagcagaggatggacatatacgataaaatatgatgaaaaacacaatataagcgcatgataaggggctgtcattccttgaaaataaaggaaaaacagcccttttttcgtgtgatatttcgtgtgatatttccccagaaaaaggggttctttatactgaaatatgctttcgtggtagatgctccaaaaacaccagaaacccttgtaaataaaggaaaaatccagcatttacaagggtttccgcatccatcaaaaaaagcagataacgggaatcgaacccgcctttccagcttgggaagctagcgttctaccgatgaaccatatctgcaaatatatattaagtatactgttttttctgaaaaagtcaagaaatttatcttgccaaaaagggaggaaagttactgtacacgggtaggcacttttgggaccgaaagagacaaatatattcaaaacacccacaaaatgccctcttaacacaatttatatttcaaaaactcgcagaaggtgttataataattccgtatggattagggcgcggttttcaggcaccctttttccgtcataggaaagtgttaaggcacattttttattttgtatataaaatagagattttctgtatcggtatggcggataaacagaaaataacggaggaaactatggatataatcattatcggatgcggcaaggttggtacgacgctggcggagcagcttgtccgggaggattacaatgtggtgatgatcgatacgtctgcggagcggatgcagcgggtgtcagatgatatcgatgcgatcaagctggtgggaaatggtgccagcatttccatgcagatcgaggcaggtgtgcagacggcggacatgctgattgccgtgacagggtcggatgagatgaaccttctctgctgcctgattgcgagaaaagtggggcattgccacacgattgcgcgtgtgcggaatccgatttacagcaatgagcttacctttatcaagcagcagctgggaatttccatgattatcaacccggaatatgcggcggcgacggagatttcgagaattctgcgcttcccgtcagcgatcaagatcgatccatttgccaagggaaaggtagagcttctgaaatttaaggtaaaaccggagtttaagctggacgggctttcggtcatggatattgacagccaattccgctgcgatgtcctgatcggcggtgttgagcgtggcgatgaggtggcgatcccggatggtaaatttgtgattaaaaacggggatatggtgtcgattatcgcctccccggcaaattcggcagaatttttccgcaagatcggcatccagacaaaccaggtcagaaatacgatgattgtcggaggcggtacgattgcttattatctggcgaaacttttggcggcgatgaagatccgggttaaaattgtggagaaagataaagcgcgctgcgaggttctgacagagcttctggacgatgcgttgatcctcaacggcgacggaacggatcggcagcttcttctggaagaggggctgatgacggcggaggcatttgtcaccctgacgaatatggatgaggaaaatgtcttccttgcgctgtatgcgaaggaaaattccagcgcgaagctggtgacgaaggttaaccggatcgcctttgacgagctgatcagcaagctggacctgggaagtctgatttatccgaaatacatcacggcggactacattttacagtatgtgcgcgcgatgcagaatacgatcggcagcaatgtggagacgttgtatcatattctcgatggtcgggcggaggcactggagtttgtgatccgcgaggagtcggaagtgacgggcattccgctgatgaatttgaatctcaagagcaacctgctgatcggatgcatcaaccgcggcggcaatatcaagatcgcgcgtggacaggactgcatccagcagggcgatacagtgattgtcctgacgagccagaaaggtctgcgggatatccgtgacatcctgagaaagtaggcggcatagatgaattattcgattgtattttatatcataggctggatcctgaattttgaggcggcttttatggcgcttccgacggcagtggcactgatttaccgtgagtcggaggtatggtgctttctggcaacgatggcagtatgcctgatggttggtatgcttctggtacgccgaaaaccgaaaaatcagatcttttatgtggcggagagctttgtggcggtttctctaagctgggttttactcagtgtgatgggagcagtgccgtttgtattaagcggctatattccgaatccgatcgacgccctgtttgagacggtatcgggctttacgacgaccggtgcaagtattctgagcagtgtggagcagctgccgaaatgcttattattctggcggagttttacgcactggattggcggtatgggcgttctggtattccttttgagtgtcctgccgatggtgggcggttcccatatgaatttgatgaaggcggagagcccaggaccgatcgtgagccgtctcgttccgaaggtccagatgacggcgaagctgttataccagatttacctgggaatgacgatcctcgaggctgtgattctgattcttgggaaaatgccgattttcgacgcgatcacgatcacggtcggaacagcaggtacgggtggttttgcaatccggaatgatagtctggcgagctacacggcatttcagaaaaatgtcgtgacggtgtttatgattctgttcggagtgaattttaacttttacttcttcctgctgatgcaaaaaataggacaggcctttaaaatgcaggaggtgcgggcatattttctaatcattgcatcggcggttggcatcattacagtcaatacggtatcactctgcggcaatgcactgcaggcattccaggatgcggcattccaggtcggttcggttatcacgacgaccggttacgccacggtggattttgataaatggccgcagctttcaagaacgattatggtacttttgatgtttatcggcgcctgcgcgggcagtacaggcggcggtatcaaggtgtcgcgcgtcttgattctgcttaaatcggtaaaaaaggaactgaagcagtacctgcatccgagtgtagtggagaagatcaaaatggatggaaagatcgtagagcatgaggttgtgcgctcgacgaatgtgtttatggttgcgtatgtgctcatttttgcggtatctgttctattgatttctctggatgaatacgatctggtaacgaattttacggcggttacggctacgtttaataatatcggaccgggtctggcactggtcggaccgaccggaaactttgggtttttcagtaatttctcaaaactggttttaatctttgatatgctggcaggacgtctggagatatttccgctacttctgctgttttcaagggaaacctggaaacggttctaggggaggagaatacggatggatatactgttctttttgacggggtgtctgggactggcagagacaattgatttgttctgcggcaaagatttcctgatttttatatcggattcgatcgatccgaagaaatataacctgaaaaaggtgtatgcggttgaaaaatggctgtttgcgattgatacgctgtcgctgtttggcatggcgtttcatctgggcggcggtacgggcgatctggtgctggcggcagttgtgctggtgacactgttcgcacatgtgtatgtgtttaagagccggaacttccgggtgtaagtagataaaagtgggcgtgatgtgtctggcatgcgcccatttttgctgccatgatgcagagaaaatggctggtggcttgttttgggacagatgcttgaaacggctgacagtgtggcttccggggaagtgggacacactttgcgttgacaggcatatgatatagtatcaatgaaaaatgaaaaggagattatcatatgtgttggtcttggggtaatggttgtggacactgcggaggatgcggcggctgtggaaataatggatggggctggaatagctgtggaaataacggaagaaattcctatcggagaggtttcaacgatggttatgcaatcggctatcgggatggctatgatgccggaagagacagccagtctggctgcggctgcggcaataatggcggctgtggctgcggaaactagagagggcgattcaatttgcacgaggtgtgaactgagggaaagaaagccgggcggtgagagctgcccggctttcttcccttcagttattaagaactctaagaatacgctaaaaatcggggcaacaggatttgaacctgcgacctctcggcccccagccgagcgcgctaccaagctacgccataccccgaaaataaatcatagctgtactttgccaaatgttcagctgacatataccgccatttgttgaaatattatatgcatgataccagggtcaaaaggtcagaagttcgacgcaagcttgcttgcaggagaatttttgaccttgggacccgccaaaaacatgagtaagtagccatttttcaaagaaaaatgagcgaattgcgaatgtttttgagaattgcgggagcacgcagtgcagagcaattcggtatcagaggggtcaaaagcttttgcccccaacatcatatgcatatcattatatcaaaattacatcaaaaatcaactatgacttctaaattttcgctgccggatgtttgttttttgatgtaattttgatggttgagtggaattttatgaatcaatggaatggatcaatagaatgaatattttccaaatattgactccaaatttgaaaaatggtatgatgaaaacgtggataattaaaagaaaaggtcatagcagagtcttcggctgtgaccttttgtagtaaccaaccccaaggagaacatcatgataagttttgaccttgacatgaccctcttagaccaccggacggatcagatcacaccgagtgcgctggaggcgattgaaaagctacgcccgaagtacaagattgtgctggcaacggggcgcgatatggataattattacagtacatcgtaccgggacatcgtccgtccggatgcgattgtacatatgaacgggacgaagatcacagtgggagataagctgctgtttgagcacatctttgatccggaactcctgcgccgggtgctgagtttctgcgatgaaaagggattcggaatcggcatgacggtgggggatgaagattactatatccatccggagatcattgcggctaatgatatccgcttctggggaagctgcgggcggcagttccagaatccgtggaagatgctcacgatgccggtccggacactggcgtttgtcggcagccgtgaacaggtgaaggagatggaacgggaatttccgaccctgaaattgccgatgtttgcgagcggacatggcgcggatgtggtcgagaaaggcaattccaaggcggacggactccgcaggctggcggtgtattttggagaaaaagaagatctctccgatacagtggcatttggcgacagcatgaatgatattgaggttgtgcaggaagccggcatcggcgtggcgatgggaaatgcagtggatgcgcttaaaaaagtagccgattacgtgacggcaccgatcggggaagatggaatttataaagcgtgcgaacaccttcatttattttaaagaagttattttcctattttacctgttcccattttcctatataaatgatataatagctaccaaacggttattgtccacaggtgagtttctttgagtagaaattccatgcagtacaataacaagaaatgacttaaaaggcgcgtgcctgcaagctttgactaaaaggatgaactgcggctgcagaaatcggcagtgcggcagggaaccggacacgcaccgggaaaaagagaggatgtaacagatggaacatttaattactccggctggttataaaccggtattggatttgagagaaacacaggttgctatcaaggaaatcaaggacttttttcagagagaactggcaaaacagctcaatctgacccgtgtgtccgcaccgctttttgtactgccggaatctggtctgaacgataacttaaacggcgtagagcgcccggtatcctttgggattctggagcagaaagatcggaaggctgagattgtacattctctcgccaaatggaaacgtcaggcattaaaagagtacggatttcaggaaggtgaaggcctttacaccgacatgagcgcgattcgtcgtgatgaggatacagacaacatccattccatttatgtggatcagtgggactgggagaagatcatcagtaaaaaagatcgtacccgtgagacactggaatccattgtccgttcggtttacaaggcactgaaagtgaccgaggactatatggcatatgaatatgagtacattggacgttatcttccggaaaatatcacatttgtgacgacccaggaactggaagatatgtatccggattgcacaccgaaggagcgcgagtataagattgcgaagctgcatggtgcggtatttattgagcagattggtgacaagatgaaatccggtgagaagcacgatggtcgtgctccggactatgatgactggaaattaaacggcgatattctggtatattatccagttctggatatcggactggagctttcttccatgggtatccgtgttgatgaggattccctgaaagagcagctggtaaaggcgggatgtgaggaacgcgcggagctgccattccagaaagcagttctggagggagagcttccgtatacagtcggcggcggtatcggtcagtcccgtatctgtatgttctttctgcggaaagcacatatcggagaggtgcaggcgtcgatctggccggacggtgtgcgcgcagaggcagaggctcacaacattcatctgctgtaaaaataaaattgatgaaaagctgcccgggaaagtgattttctgcggcagttttttgtgtaataagaaattcattagaattccctattacacaaaaaggcacattctttttatgtaatgggaagcccatagaatgagaggataggatatttatatggcggatcatatctatgatttaattattatcggtgcgggaccggcgggatatacggcagcgctgcgtgcggcggcgatggggatggatgcagtcctgatcgagaaaaaagcgctgggcggctcatgcgtcaataccggctgtattcctgccaaggcgcttctgcaggcgacggcagtctatcgggatatgttgaaagcattccggtttggcatcgtggcggagaaggtcagctttgactggcggcagatgcagatttataaaaatgagtccgtggaatcattccgctcaatgattcagggaatgttagaaaaagcggaggtggagatgattcacggcgatgcgcgcctgcatgcggataatgtggtgcgtgtgacgacctccaaaggcgcattgacgctgaaaggaaaaaatgtgattctggcaaccggttccagccctgtgattccggatatcccgggaattgatctgccgcaggttatgacaagccgtgatattctgcggatggatgactggaattttgactgtctgacggtcatcggcggcggtgtcatcggtgtggagatcgcgacgatcttcgcggcgctcggttcccgcgtaacgcttttggagcaggcaaaccgtctgctggagtcgatggatccgatgatttccgagcagatggaagcaaatctgcgttctaagggtattgaagtccactgcaatgtacaggtcatggagatcaaggatcgcggcaacgacacggtgtcggtcaattaccgttgtgagcgtggctggaaggaaagcccggcggaccgcgtgctggtggcagtcggcagacgcccgaatatgtcgaaggttctggcggacgattgtcaggtacagctggaaaatgggcgtccgctcatcaagggaacttaccgcacgacgcaggaaaatgtctatgcgatcggcgataccgtggcgcggaaacgtcttgcccatgtggcagcgtcccatgcggcttatctggtcgaaaacctggcgggacgcggacaccggatgcagctttcggtcgtgccgaacggtatgtatgtcgtgcttccggttgtgccgacctgtatttatacggagccggagattgcggcggttggatttacggaaaatgacgcccgcctttataatatgaagatcaagtgcggtgtggcatatatgacggaaaatggaaaagcgcttttagcgagaaacagccgcggttttgtgcgcctgatttttgaggcgtataccaacacgctgatcggggcgcagatcatgtgtgcgcgtgcgacggacatgatcggagagatggcaacggcgatcgccaatggtcttacggcatatcagctctcgacggcgatgcgcgcgcatccgacgtacagtgaggcgatcacggaggcgatcaaagatgcgttgaaaaatggataatagagaaacaacaggaggcagaaaaatgggacgtgaggttcgggagagaattgaacagcttcgcgagaagatggcggagcgtggaatggacgcatatctgattccaacatcggatttccacggctcggaatacgtgagcgggtatttcaaatgccggaaatatatgacaggctttaccggttcggcgggaacggcggtcattacgatggaggacgcaggtctctggacggatggcagatattttgtgcaggcggcagcagagctttccggcagcggggtggaactttaccgctccggtcaggagggcgtgccgacgacgctggaatttttgaaaaaacatatgccggaacagggtgttctgggttttgacggcagagtggtcgatacggcagagggcgagcgcatcgcgaaagcactgtccgggaaaaaggtacgcatttcggagggtgaggatctggttgggagtatctgggatgaccgcccggcgcttccgatgaacccggtctggattctggaagagaagtatgcgggaaaaccggcggaggagaagattgcagatctgcgcggggagatgaaaaagcgtcaggcgacggtgcatctgctgacgagtcttgatgatatcgcgtggcttttaaatatccggggtgatgacattgtacatacgccggttgtattgtcctacttgattgtgacaaaacaggaattattcctctttattcatgagaagacgctgaacgaagaagtacgtgcctatctgcatggactgggcgttcggatcatgccatatgaggcggtataccagattgcatccgcattccgctatgagcgcgttttattggaaaagtcgaagatcaattaccgtctgttccggtgcctggatgcgagcgtgaaagtgatcgaggcgatgaatccgacggcagcggccaaagcagtcaaaaatccagtggaacaggaaaatatgcgccgtgtgcatgtgcaggacggtctggtattgacccgtttcctgcgctgggtgaaggaacatgcaggcgaaaaaggactggacgagtggaccgcaggggaatatctggataagctgcgcctggagcaaaaaaactgcctggatatgagctttacgacgatctctgcgtggggaccgaacgcggcgatgtgccattatacggcgtctgagacagagaagagcagtgtgccgaataaggggctgtatctggtcgattccggcggacagtattatgagggaacgacggatgtgacgcgtaccatcgcggtcggaccgatcacgcaggaagaaaaacgctgctgtacgctggtggcgtgttcgatgctgcgtctgctggatgcgaagtttatgtatggctgccgcggtatcaacctggactatattgcgcgcgaactcctgtggagaaacggtctggatttcaaccatggaacagggcatggtgtcggctatctgggatgtgtgcatgagcgcccgaattccatccgatggaggctgctcacatcgcctgctgaaaatgcggttctggaggaaggcatggttacctccgatgagccggggctttatctggaaggaaaatttggcatccggacggagaatctgatgctttgtgtgaaagatgtgaagaatgaatttggtcagttcatgaaatttgaaaacctgacctgggttccgatcgatctggacacgatcgatgtatcgcttatggaagcgcgcgaccgcgagcttttgaacgcgtaccataagggcgtgtatgagaagctgtctccgtatatgatggaggaagagaagatgtggctggcagaggcgacgcgagcaatttagaagaggaaaacaaggaagatacggcagtaaaacattaaaaaagcggttaaaaaccggcatagataaaagatgccggatataaactgtaaatgaccatgtaaaataaatgcgaggctgcgtgtatgcgctatcattcgttcgaccgtgtccgaatctgtgagacaactggaatgcaggacggctatctgcggatcgatgtggtaaacagtgaaaacaattttccaattaagggagcagaggcttcgatcagctatggagaatcaggacagacgcaggaagtgcttagaaccaatttatccgggcagacggaggagattgcggtagcggcgcctcctgcgttgctttcactggaagaacagaaccgggaaaagccgtatgcggattatacggtggaagtgcgggcagagggctatgggccggtgaaggtaaagggaacggaggtgctggcgggcgtgctggcagtccagccgatccggatgattccgcttccggctcagaccggagcggaggagaatatccagattccggaccataccttatatggttcctatccgcccaagattgccgaggatgaggtaaaaccagtgcaggagagcggagagatcgtgctgagccgcgtggtggtgccgcagacgatcgtcgtgcatgacggtgcaccgaccaatgcgtccgcaaaagattactatgtggcataccgggattatatcaagaacgtggcatcgagcgagatttatgcgacctggccgcgcagcacaatcgtcgctaatgtgctggcaatcatgtcgtttacgttgaaccgggtgtatacggagtggtatcggaaccagggctacgattttacgattacatcctcaacggcattcgatcacaaatggatttacgggcgcgatatttttgagccgatctcagaggtggtggatgacatttttgacaactatctgtcccgccccggtgtgaggcagccgattctgacgcagtactgcgacgggcggcgggtgtcctgcccgggctggatgacccagtggggatcctgcagtctgggagaacagggatacagcgcgatcgagatattgcggcgcttctatggaaatagtatttacatcaacactgcggaacagatatcaggaatcccgatctcctatccgggggaaccgcttaaggtggggtccagcggcgataaggtgcggcagctgcagcagcagcttgatgcggtggcgactgtgtatacagcgatcccgcgggttacgccggacgggatctacggacccggaacggaggcatccgtacgggcgttccagtcggtgtttggacttccgcagacgggcgtggtggattttgctacctggtacaagatttctcatatctatgtggggatctcgcggattgcggagctgaattgagttggaaatgggatttgcgggagaagaataacgaaaagacatatgaattcctataggtgaaatatctgtgagcaggatgcatacaggaaacagagacaaagaacataagagggggtggattggatgaaagataccagacgggaagagggagtcagacaaaccggggagactggccgggcaaatgcgatcacagagggagtgatctggaaacagcttctgctatttttcttcccgattttatttggaactttttttcagcagctctataatacggcagatgcggtggtagtaggccgttttgtcggaaaggaagcgctggcggcggtcggcggaagcacatcgatgcttacgaacctgctggttggcttttttgtaggactttcttcgggtgcgacagttatcatcgcccagttttacggggcgggacgcggtcagcgggtcagcgaggcagtccacacggcgattgccttttcgctgctgtgcggtatcctcatgacggttggcggactccttttttccgacacggcgcttcgcctgatggggacgccggaggatatcatggacaatgcaagcgggtatctgcacatttattttgtcggaatcacggcgaacctcttatataatatgggtgccggaatcctgcgggcaatcggtgattccaaaagaccgttctatttccttgtgatcagctgttttacaaacattgcgctcgatctgttgtttgtagtaggacttcggatgggcgtgcgtggcgcggcggtggcgacgattctttcccaggtggtcagtgcgtgtctggtattgggaacgctgatgcgtgcggatggctcgtaccggtttgagatccggaaaacgcggatcacaccggtgattctggtgcggatcatccggattgggtttccggctggactccagtcggttatgtattccttttccaacctcgtgatccagagcagcgtcaatgcactgggaacagacacggtggcggcgtgggctgcatatggaaagatcgacagcacttactggatgatcattaatgcgctggggatctccatcacgacctttgtcggacaaaattacggcgcggggcggctggaccgtgtgaaacgcagcgtgtacgtctgcctgggaatttcctgtattatcacggtggggctgagcacgatcctgtatctgacgggcggctatatttatctgttgttcacaacggatgcggaggtaatcgcgatcggcatgaagattcttcacttcctggtgccggcatttgtgacatacctctgtattgagatttattccggcgcactgcgcggtgtgggagactgctggattccgatgattatgacggcgctgggcgtgtgcgtcctgcgggttgtctggatcctgatcgctgttccgatccgcccggatatcctgacagtagtattcagctatccgctgacctggacgatcacaacggttctctttaatatttattattattttttcagtgcgctgaaaaaatggaatgtgccgctttcgtggaagaaaaagaggcgggagcttcataacctgtaaatagttatgcatggtttcgaaaatgattgacaaaacggggtggtactggatttttttcagaaagtgtgatattcttatgttacaaaagataggtgacagtgtttcttcctggatggatgccgcgcaagcggcagataaaacggagattcgaaacagagggcagaggcacttgccgctggtcagaaagagaggcagaattatgggctatgaaccaatgaatgagtcctggcagatggcgggggaacgccatgagacactgggacagtatgtggcgaagacatatttatggatgtttgcagggcttcttgtgacatttggcatcgcattagccggatacgtgacgggagcgattttgtatgtatttcaggttccatatgcgaccctcgcattgacgggactggagcttttgacggtgatctggctgagtgcccggattcacaagttatcggtgggagcggcgagagggctgtttctattctatgcagctttaaacggcgttgttttctcgatgtatttcctgatcttcggtgttgtggagatggtgtttgtatttgcggcgaccgcgctgttcttcggaatgatggcgggcgtcagcctgatcttcaagctggacttgagcggaatccgtccattgctcgttggcggactgctgtttctgattctctttggtctgctttcaatgtttttaaatctaggcagctttgagacagtgctctgctatgccggtatcgtggtattcttaggctttaccgcttatgatacaaccaagatccgggataattaccagattttctccgcggatccggagctgcttcagaaagcatcggtattctcagcgctgcagctgtatctcgattttatcaacctgtttctgtacattatccgcctgatgaaccggaatcggaaataggaaaaaatctttcaggagaacagaagttcctttgcaggaataaagaaaagtggaattttgcggaaaactgaatatgcaaaaatgaaatgccggaacgggggaaagctttgttccggcattattgtgtttttctgcttgaaaatcctgtttttggcatggacggcttcattcttttagcagaaagggaagcattctgtaataaatttgacagattttatttaaagtttctctattgaagtggatggggagtatctgttaaactaggttataataggaaatgttctgctgttggttacacagtgtgtggatgaaccatatttgtttcgcatatgcccccgccggatcaggcggggaaatgtatataaatggtgaacagacaacaggtataaaaggataatcaaggaggttttttggcatgaatcggaatagaatgaacaaaaaaaggatggggcgcgcgcgtgtgctttcacgggcagcggctggcatgctggcagcagcgctgtgttttcagccgatgacagcgctggcaggaccggcgggagattcttctcttacatcgtcatcctcgaatgcggggccgggcggcggttcgggcagctccaattcgggaagtacaggcagctctggcggttcgacttctgtttccaatgggggtgtgagcgcggtcacatcggggcttggcgtgtaccgggtgacggagaatgaggggatcggtgcgattgcgcgcggcgtggatgtgtcttactggcagcagaatgtaaattggagccaggtggcatcggataatgtacagtttgcgatgctggcaacccggttccgcggtaatgtggatccgtttttcgctatgaacgcggcaaatgcgagccaggcagggctgcgactgggcgcgtacatttattcgtatgcgacttcggtcgaaatggcgcagcaggaggcggattttgtcctgaatcttatcaaggattatcctatctcctttccggttgtctttgatgccgaggatgctaatacgctgggaactctgacgcagtctcaggtcagcgatgtgatcaacgcgttctgtaagcggattcaggatgcaggatattatccgatggtctatgcaaatgaatactggattgccaataagatcgatatgtcgaagatttcgtatgatatatgggtggcaaaataccagcagaagtatacatattcaaagacctcgatgtggcaggcgtccaacaccggttcggtcaagggcgtgaacggcaatgtggatattgattatctgtataaagattatacgcagatcattccgggcaatacctggcggacgatcgcggggaaccgttactattatcagaaccatgtgatgcagaaatcggcgtggattaacgatggtcagaattggtactatatgaatgcggcgggcaatccgtctaaaggatggctggagctttcaggcaaaaagtattatctggaggcggatggtcatatgattaccggctggaagacactggacggcggctggcgttattttgatgcatcgggcgagcaggcgacgggctggcgtgcggttgatgggagctggtatttcatggcggacaatggtctgatgcagatgggctggctggagacgggcggcaagaaatattatctgaacgcatccggcgcgatgcaggcgggctggcagaacctgggcggaagctggtattactttgacggctccggcgccatgacgacgggctggcaggcagtcggcggaaagtggtattacatgaacgagtccggcgtgatgcagaccggctggctggatcttggcggtaagaaatattacctggatgccagcggcgcgatgtacgcaggtattacgttcgagatggatggaaatacctggcaggcagcggcagacggaagctgcacggtagttctgccggaggagaatgcggcgggaaatggcggttcgacggatggacagactccgacaaccggaagccagtcaccggtgcagccgtctggtccggcaggggtataatataaatatgatttgaaccagtacccagatattggagctgattcagttaaaaaaatgaaaaagtaaacaaattcgaacggaaataacttgcttttttgccaacctcattatacaatgttaaacaggcaaaaaaaggacttgcttatgggatggaggaaaacagcataagtaatctggcataacatgacgtttcaaactgctatatcaactgtatgtgcaagataagctgcggctgttccggtgcggatttgacgaaagatgcgaggctcttctggctgcaaattaggaagagcctcggtatgcgttatatcggcaaaagcgcagaatcgggatggcgggcacagaagtagtgcgaaagcggggcgtttgtcagcaggaaactgtgaaagcagtggttcgcaggcaggcagctgcgctaagacgcaggcagggaaaggtcggagaatgcagattccggatttagtactgcatggaagcagcgtgtttttacatattgtataatgattatataatcagaaccgtcggcggagttgtagtgctaaaaaagggatgtcagtgcggctggctgccggaatcatttccggaaacagggatgagggcagtgtttgtcatcagtcaggcaccggacagcgcttatgtgagaatcgaataacaagtcagtggtacagatgtttatgtatgcatggctattaaagtcggattcgcatagacggaagtgcatgccatttatgtatgcagaggagattgtacaatcctctgctgccgcagcgtgtcagatggagaattcccggagtggatgacaagctctggaaattttgcaaaaacacctgcaaacacagataggtgggaagtatcacggatggcgccatgaaagaaacatggatgctgtcaggatatgattcacgaagaaagagggacgtccgtcaaagcatggaacgatctaattacgaggtgacacatttatgaaacagaatatgaaaagaatgctgcttgtactttgcatggcagtctgctttttcgctctgtccgcctgtggtagcgcttctgaagaagcggtagagccgatttctccggagatcgagcagaccatgagcgatggcgctaagagctatctggagcagttcgccagctacagtgacgaagatctggcagcacagctgaaacaggctgagaagcagaaaaacacagtcattgagtctgcaatttcttcctggaccagttctaaggacgatttaggcaagatgggtgagattcagagcgtgaccgtagagcgcgccgatgatgacagctacacagcagttgttcaggcttcctttgagaagagaaacttgactttctccctgaccgctgaggagagcgtaagcagctacggcggtacttctctggtaccgactgagttatcctttgttgtaaactacagcttcggtgagaagatggagaaggcagcattaaataccctgatgggtatgggtaccgtattcctggtactgatcttcatcagcttaattatcagcagcttcaagaaggttaacgagattgaggcaaatgtaaaggctaaaaaagcaggagcagaggcaccggcagcagcaccggcacctgtacagactgcagcaccggcagcagcgccggcacgtaccgcagcaccagcagcaggcaatgcggcaaacgatggagaactggtagcagttatcactgcagcgatcgcagcagcaaccggcgtaccggcagacagcgtaaatatccgctccattacacgtaaataatcatcgataaaatctggaggaatttaaaatgaagaattatactatcaccgtaaatggtacagcatatcaggtaaccgtagaagaaggatttgcaggcgcagcagcaccggctccagcagcagctccagcaccggcagcagctccggctccagcagcagcaccggcagcaggcggcgtaaccatcacatccccgatgccaggtaagatccttggtattaaggcagcagctggcacagctgtaaaacgtggtcaggttatcctgcttctggaagctatgaagatggagaacgagatcgtagctcctcaggacggtaccgttgccagtgttaatgttgcagtaggcgatatggtagaaccgggcgcagttcttgctacattaaactaatctaatttttataaaactggctgaaaaaatacgggatatgttattccgtttggaggaattaatatggaatatataacaactacattgtccaatcttcttcagcagacagcattcttaaacctgacatttggaaacatcgttatgattttcgtagcgctgattttcctgtatctggcaatcggaaaaggattcgagccgttactgcttcttcctatttcctttggtatgctgcttgtaaatatctatccggatattatgagatcgattgaagactcatcgaacggagttggtggacttttacattacttttatttactggatgagtggagtatcttaccatccctcatcttcatgggtgtcggtgcgatgacagacttcggtccgctgatcgctaacccgaagagcttcctgctcggtgcagctgctcagttcggtatctacggcgcttacttcatggctatcttcatgggattcaacgataaggctgcggctgctatctccatcatcggtggtgcagacggcccgacctctatcttcctggctggtaaacttggtcagacaggtctgatgggaccgattgccgtagcagcttactcctacatggctctggttccgattatccagccgccgatcatgaaactccttaccaccaaagaggagagagaaatccgtatggagcagcttcgtccggtatccaaactggagaagattctgttcccggttgttgttacaatcgttgtctgcatgattctgccgacaactgctccgctggttggtatgcttatgcttggtaacctgttccgtgagtctggtgttgttaagcagctgacagagactgcttccaacgccctgatgtacatcgtcgttatcttcctgggtacttccgtaggtgctactaccagtgcagaggctttcttaaacctggataccatcaagatcgtagttctgggtctgattgcattcgctctgggtactgcagcaggtgttatcttcggtaagattatgtgcaaggtaactcatggtaaggtaaacccgctgatcggttccgcaggtgtatctgcagttccgatggcagcacgtgtatcccagaaggttggttctgaggcagatccgagcaacttccttctgatgcacgcaatgggaccgaacgtagctggtgttatcggtactgccgtagcagcaggtacattcatggctatctttggcgtgaaataggtttattctgaataatgtatttatatagtagggtgggattcttcgggatcctgccctattgttatatgcaaacgtcggttgctgttcacaggtaggaattttctgaactgaaaattccgtacgatacagttccggcagcagattttgccgatttggaatgcgtagcatcggcaaaatcccgttgctgggcacacgtgtgtgaacagtaacaaacgtcgttttttgtcgaatttaatcggtcgaaatagtttgctttttgctggtggaagacgtaaaatgacagtgaagtaaggaggaatggcactagagaatagaaaaggagaatgcataggatggcggatatgagagaagaattagttcaaaagattgaacgggcaagacagcagctgaatcaaaatattgacacaaaggcagcatatgacacaatttatcactacagtgtggagcttgacaaactcttaaatcagtatatcgggctggagacggagactgaaagagggctggagacggcgctataaaataagagtggaaatagaaacaaatatagataagtacagaaaactcaggtacatgtgttcggaaaaagaaccggtgcctgagttttctgattttttttcgatttagaccttgccattttgatgggcatgtactaaaataaacataacaagtggtagaaagtggtgaaaagtggaacgaaatggattttcgggacacaaaagtggtacacatcggatgacgggtgattgatatgttcatgggagaatacaatcatacaatcgatgcgaagggacgtttgatcgttccgtcgaagttcagggaacagcttggagacgaatttgtggtgacaaaggggttggatggctgtctttttgtgtacgataacactgagtggaaaaagttcgaagagaagttacaggcactcccacttaccaatcagaatgccagaaaattctcccgtttctttctggcaggtgcctcggcgtgtgaggtggatcgtcagggacgaatcctgcttccttcggttctgcgggattttgcaggactcgagaaggaggttgtcctggtcggcgtcggaagccggatcgagatctggaacaaggcgacctgggcggagaagaatgtctatgatgacatggaagagattgcagaaaatatggaaggccttggcatatgatatttaatcacaaatcagtattattaaatgagacggttgacagtctctgtgtaaagccccagggtatctatgtggatgggacactgggaggcggcggtcacgcgagcgaggtagcggcacggctgggagacggcggacgcctgatcgggattgatcaggatgcggacgcgattgcggctgcgtcagaacgtctggctccctttggagataagataaccgttgtgcggagcaattatgagcggattgcacaggtgttagatgagctggagattccgcaggtggatggaatttatctggatctgggtgtttcttctttccagcttgacacagcggaacggggatttacctatcgcgaggacgatgcgccgctggatatgcggatggatcagagaaatgagcagaccgcgaaggacatcgtcaatacctacagtgagatggaactgtaccggatcatccgggactacggtgaggatcggtttgcgaagaatattgcaaaacacatcgtacaggcacgacagaaaaaagagattgagacgacaggcgagctgacggagatcatccgggcatcgattccggcaaaggtccgggcgaccggcggtcatccggcaaagcgtacgtttcaggcgatccggatcgagttaaaccgggaactggatgtgctggaagattcgatcgatacgatgattgagcgcctggcaccgggcggacggctttcgatcattacgttccattccctggaagatagaatcgtaaagaaccgtttccggacgaatgaaaatccatgcatctgcccgccggattttccggtctgtgtctgtggacgcaaaagccgcggccgggtgattacaagaaaaccgattcttccgaccgatcaggagatggaagaaaacccgcgttccaagagcgcaaagctccgggtatttgaaaaatcataaacaaaagcataactgcaccgcagaacagagatcgtttcaggtgcgggggagataaaagagagaaaaagcgaaagagcagggagggaacgttatgtctgtcagaaggagacaacatgtatcggcctccacgtatgtggacggtaataccgtgcgaaaagttcagagaaccgtggagataagaccagaaagagatgagagagaggagtaccggcataaacacgccgtgcgccgcaaccaggaaaaggcgctttacatgaacggaccgtatgtgctggcgctgaccatcgctgcgctgatcacgctggttttatgtatgaattatctgcataagcaggcgtcgatcacgacccgtatcagccacattgaggatctggagttgaaactggagaacctgaagtccgagaatgatgcacttcagacccggattgacacgtatgtggatctggatcatgtatataaagtggcgaccgaagagctcggcatggtatatgcaaataaggatcagattcttttatatgacaagacggaaagcgagtatgtaagacagtatgaggacatcccaaaacactaacggcagacagacctttcggaaatatatgcaggaaaagctggcaattaccgtcctggtaattatgctggctttgtttgcattggtgctggtgctttataatctggtaaaaagtaagggcgagtcgtacaatcagatagtcctgagccatcaggactatgagagccgcacgattccctacaagcgcggcaatattatcgaccggaacgggacgtatctggcgattagcgagaaagtttacaatctggtcatcgatccgaagcagattctggatacggaggagaactaccagtatctcgatgccacgctggacgcgctggtggagtgcttcggttacaagcgggacgagctgcaggcgatgatcgaggagaaaaaagacagccagtatgtgatctatgcgaaacagcttccagcggaagacaaagagaagtttgagacttatgagaaggacaagaacaaggaataccgggcgctgccgacggaggaaggcggcaaccagcgtatcacgggcgtatggttcgaggaagaatataagagaacgtatccgtacaatgagctggcatgcaatgtggttggttttgccctcaaggatggcaatgcatccggcggtgttgaacagtattataatgatatcctgaacggtgtgagcggtcgtgagtatggttatttaaacggcgattcgaacgtcgagcgaacggtaaaaccggcgcagaacggaaggacgctggagttgacgatcgacgtcaacatccagaagattgtccagaaatatctggatgagtggcaggcgggcattggaagtaatctggcggcggcgatcgtcatggatccgaacagcggtgagatcctggcgatggatacgacgacccgttacaatctgaatgatccgtacaatttaagcacctactatacggatgaggaaatccaggcgatggatgaaaagacgaagtccgaggcgtggtataaaatgtggagaaacttctgcgtgagcgactcctatgagccgggttctccacagaaagcatttacggtagccggggcgatcgaggaaggcgcgatttccggaaacgaggtctttgagtgcggcggaaaactgcatttcggagactgggatatccggtgtgttgcccgagccggtcacggaccgctgacgatcacacagggattgatgaaatcctgcaacgtcgttatgatgcgtattgtatcactggagggaaaagagaagtttgtccagtatcagaagattttcggatttggcgagaagacgggcatcgaccttccgggcgaggcgtcaggtctgatttatcaggcatccaatatggatccggcttctctggcgaccaacgcatttggacagaactataactgtacgatggtgcagatggcagccggatatgcgtccttaatcaacggcggttcctattatgagccgcatgtggtaaaagagattctgaacgacgaaggatccgttgtcaaatccgtttccccaaatctggtgcgagagacggtttcggaatcgacctcgaacttcattaataatgcgctttaccagacagtatcaggtgatggcggtaccgcgggcgcggcggcagttgccggttacgaagtggctggtaagacaggtacggcgcagaagcagccgcgtgcggagaagaattatctggtttcctttatcggatatgcaccggcatacaatccgcaggtactctgctatgtggtagtagataccccgcatctgccgggcgagcagcaggcacattcgacttttgccagcgagattttcagcaagattatggcggaagtccttccatataagaatgtattcccggcaggcggcgcggcacaggatctcgagaccaatctttccagccaggaagaaggcattataagcggcacagcgaccgaggatccgaatgcagctgaaacaccggcagagacgactccggctccggagggcggctgggcgaactacgatgaggaatttatcgattccggagacgagtacagctatccggatacgatgggaaatgtgcaggatgaatcggcggcggttggaaacggtgaaacggcggaaacgggcagagacaccggaacagcggataatgagtaactgttcacaggtaggaattttctgaactgaaaaatccgtacgatacagttctggcagcagattttgccgatttggaatgcgtagcatcggcaaaatcccgttgctgggcacacgtgtgtgaacagtaacgaaaatacagaataaagaaacggttcgtatgatatactgtagcaatgagatcagacaggaagcagtatgaatcggaaccggacgcatcacagaggaagaactgtctttttgtgcgccgccatctgcctgtgcatggcaggattggcggggagactgttcttcctcatgctgtataaagcggattattacagccagatggcggaggagctgcatcagcgggagcgcagtatcaaagcgccgcgcgggcggatccttgatcggaacggaacggtgatcgccgataaccggactgtgtgtaccatctctgtgattcataatcaggtaaaagatacggaggcagttatccgggttttgagcgaagaactgggacttccggaggcagaggtgcggaaaaagacggaaaaacgatcttccagggaggtgatcaagtctaatgtggagaaaacgcggggcgatgcgatccgggcaatgcgcctggagggggtcaaggtggatgaggactataaacgatattatccatatggacgtctggcatcgaaagtgctggggttcaccgggggagataatcaggggatcatcggtctggaagtacagtatgagaagtatttaaagggcacggatggcaagatcctgacgctcacggacgcggcggggatcgagctggaaaatgaggcggaggatcgcatcgagccggaggcagggcgggatctgcaggcgagtctggatgtcaatatccagatgtacgcggaacaggcggcgtaccagacgatgcagaaaaagaatgcgaaccgcgtctcgatcatcgtgatgaacccgaagaacggggaaatctatgcaatggtaaatgcaccggagttttcattgaatgagccgtttgagctggtgacagatggaaaaaacgaagattcagaaacagaagaagacatatcctggaagaatgaagtgcagtcacacgcagcatcagcgcaaaataaacaagctctcctcaatcagatgtggcgcaatccctgtttaaatgatacatacgaaccggggtctacattcaaaatcgtgactgccgctgcgggactggaggcgggcgtggtcaacctgactgatcagttttcctgcccaggattccggatcgtggaagatcggaagattcggtgtcacaaggtgggcggacacggcggggagacgtttttacagggaatgatgaattcctgcaatcctgttctgatcgatgtcggacagcggctgggaccggagcggtactatcagtattttaagcagtttggtctgctgggaaagactgggattgatcttccgggtgaggcggggacgatcatgcaccagccggatcagatcggaccggtggagctggcgaccgtctcttttgggcagtcgtttcagatcacgccgatccagctcattacaacggcatcctccctgatcaacggaggcacgcgcatcacaccgcacatcgggatccgtgccgtgcgggcagatggtcaggcagtccacgcgttttcctatccaaaaggggagaggatcttatcggagcagacgagtgagacgctgcgttatattctggaacaggtggtggcagaggggagtgggaaaaacgcccggatcgagggctaccggatcggcggaaagacggcaacttcggagaaacttccaagaagccggaaaaaatatatttcctcatttttagggtttgcaccagcggacgatccgcaggtgatcgcgcttatcgccatcgatgaaccggaaggaatctactatggcgggacgattgccgccccggtgatccgcgatctgtttgaggtcattttgccgtatctgggggtggagaaaagaggttgattattcccctaaaaagacgtatactattgaagtgtataatttgaggaactatctctgtatacataggaagataagttagaggtgtgacatggtaaatgaaacaatactggcggttatcatcgcatttgtggtcagcgcagtgctgtgcccgatcgtgataccgtttctccacaggttgaaattcggacagcaggtgcgcgatgacggaccgcagacgcatctgaaaaaacagggaaccccgacgatgggcggtctggtaattctttccagcatcatcattacgtctctgctctatatccgggattatccgaagatcattccggtgctgtttatgaccgttggattcggcgtggttggatttctggacgattacatcaagatcgtgatgaaacgttcggagggcttaaatccgatccagaagctgatcggacagtttgtgatcacaggtatttttgcctattatattgtaacctcaccggacatcggaacagggatgctgattccatttaccggcaagtatttacagcttccggtctggctgtttgtaccggcactgttcttcatcattctgggaactgacaatggcgtgaacttcacagatggtctggacggcctgtgcaccagtgtgacgattctggtagcaacgttctttacgatcgtggcgatcggggagaacagcggcattagcccgattaccggcgcagtagttggaagtcttctgggctttcttctgttcaatgtctatccggcgcgtgtgtttatgggcgataccggttcactggcactcggcggttttgtcgcttccagtgcctttatgatgcagatgccgatctttatcgcgatcgtgggtctgatttatctggtggaagtattatctgttattattcaggtaacctattttaagaagacgggcggaaagcgctttttcaagatggcgccgatccatcatcatttcgagctctgcggatggtctgagaccagggtcgtaggcgtattttcgattattacggcaatcctttgccttatagcatacttaggattataggaggaagattatgagtcagaaagtattagtagcaggaacaggtatcagcggtattgcagctgcaaagctccttctctcaaaaggcggagaggtagtgctttacgatggcaatgaaaaactggatccagaggagctgaaaaagaaatttgacgaaggcgcgacgatcacgttcgtcctcggagagctgaaaaagacggatttgttaggcgtggagctggcaattttaagcccgggcatcccgaccgatgcaccgtttgtagagatgattcgtgaaaccggtattccgatctggggcgagatgcagcttgcatatcactgtgccaaaggacgtatggcagccattaccggcacgaacggaaagacaacgacgacttccctgaccggcgagatcatgaagtcattctatgacagcgtatttgtagttggaaatatcggtgagccgtttgcattccatgcattggagacaacggatgagaccgtaactgttgcagaggtatcgagcttcatgctggagaccatgaccgatttccacccgaatgtaagcgctattttaaatattaccccggatcatctggatcgtcataagacgatggaatgctacatcgagacgaaagagagcattaccaagaaccagaaagagggcgatgtctgcgtcctgaactatgaggatccggtactgcgtgaatttggtgagactttaaaagacatcaaggtggtatatttttccagtctgcgtaccctgaaacaaggtttctacctgaaagaggatgagattgtatacaacgacggcgagaaagagaccgtgattgtcaatatccacgatctgaagttacttggccgtcataaccatgaaaatgttatggcagcggttgctatcagtatgaacatgggcgttccgctggagaagatccagaaggtgatcaaggaattcaaggcagttgaacaccgcattgagttcgtaaccgagcgtttcggcgtcaaatactacaacgattccaagggaaccaacccggatgcagcgatgcaggcgatcaaggcgatgccgggaccgaccttattaattgcaggcggatatgataagcattccgagtttgacgagtggatcgagagctttggcggaaaggtacgctatctggtgctgatcggccagacccgcgacaagattgccgagtgtgcaaaacgccacggcttcaatgatatcatgtacgcggaagatctgcaggaggctgtacaggtatgtgcatcctacgcaaatccgggcgataacgtcctgctttcaccggcatgtgcaagttgggggcagttcaagaactttgaagagcgcggacgcaaattcaaagagtttgtgagaaatttgtaataccaaggttcaaaggtcggaaatccgacgcaagattgcttgcaggaggaattgtgacttttgagaattgcggagtgcaaagcacgcagcaattcggtattggaagaataaaggttactgggcacgtatgcgtgaacagtaacgaataaaggcttaatgtatttaagggggctgtcgcagccggcatttgtctgcggcagccctgatttgaaggaaaaactgccgtttacaggcagaatttcgaaactgtaacaacaaaaagcaggggagtggaagtatgccggaaccgggaaaaattaaaaagaaaaaaccacatcggttttatgattacagtctgctgtttaccatcattttcctgacggtattcggactgatcatgatttacagcgcgagctcctataaggcgcagcttgattacggcaatccgggatattttatgcttcgtcaggcgggcatcgcgggtgtcagctttgttgcgatgtatatcgtctccaagatagattatcactggtttgcgcggtttgcgatgctgggatatatcgtttcatatgtgacgctgcttctgacgcgttttacacctctgggcgtggcatcgcatggtaagaagcgctggctgcgcctgggaccgctccagttccagccgaccgagattgtcaagatttccctgattctgcttctggcggttctgattgccaatctgggcgtgcggatcaaccagctgcgggcagtcggatttatcgtggcgctgtcggcgccgctggcacttttagttacggcgaacaacttaagttctggtatcatcatctgcggcatcgtgtttgtgatgctgtttgtggcgtgcaagatcaaatggccgttttttctctgcatcggaggcggcgttggacttctggcggtcgccccctatatagggcatttgctggtaaagctccatatcctgaaggattatcagctgggacgaatcaatgtctgggtcaacccggtgcagtatgcacgttccggcggttatcaggtgctccagggtctgtacgcgatcggttccggcggtctgtttggaaagggactgggcgagagtctccagaagctcggtttcgtgccggaggcgcagaatgatatgattttttcgattatctgtgaggaattaggtctgtttggcgcgatttcggtcattctgattttcatgtttatgatttaccgcttcatggtaattgctggaaatgcaccggatctgatgggtgcgatgatcgtgatcggcgtgatggcacacatcgcgattcaggttatcttaaatatcgcggttgttacgaatacgatcccgaacacgggtgttacgctaccgtttatcagttacggaggtacgtccgtcatgttcctgatgctggagatggggatggtgttaagcgtctcgaaccagattaagctggagcagtaggaatatttggcggagttacatatttacttcgggaaatatagaaaatgagaaccattttctctcgttggcatataataatacatagatgccggtgggaggggattgtttggctttcatcgagattcacggaccgtgccggattcagggcggactcacggtgcaggggtcgaaaaatgcagttttgccgatgatggcggcgtcagtgttaaaccgcggaattaccgtgcttgaaaatgtccccagaatacaggatgtgttctgtatgatggggattcttgattctctgggatgccggtgtgcgttgcacggaaaccgtctggaaatcgatacttcgaagattaatggctggcggatcgagcagaaagcgatggggaaaatgcgctcgtccattatgcttttgggagcgctcctgggacgcttttgcgaggcgggtgtctacagccccggcggatgtatgatcggaaaacgtccaatcgactggcatttgcgggcactccgtgcgctgggcgcggaaatacaggaaccgaagtcggacggcttcctgcatgcacagacaacgggacttcgcggggcagagattatttttccgttcccgagtgtcggcgcggtggaaaatgccctgtttgccgctgtggcagcggtggggcggacggttctgcggggatgcgcgcgggaaccggagattggacagctgtgccatttcctaaatggtatgggggcatcgatccgggggatcgggacggatgcgctgatcatagaaggcggattgccgcttcatgacagccggtttgtgatcggcggcgaccggatcgtagccgggacctatcttcttgccgctgcgtcctgtagcggtgaggtgatcgtggacggcgtgcagacacaggagctgcgtgcattgaccggggtgctggagcatatgggcgtttcgctttatcaggaaccggaacttatatatgtacacagcggacagcgcctgcgggcggtatcggtgaaaaccggaccgtatccggcgtttccgaccgatctgcagccgtttttgatggcggcgctgtcacgggcagatggaaccagtatgctgcgggagacggtatttgaaaaccggtttggcacagcggcggagcttcaaaaaatgggggcgaacatcgaatgtagcgggaacattgcccggattgacggagtggaaaccttgcggggagctttggtgcgtgcccgcgatctgcggggcggcgcagccctgacggtggcagccctgggggcggacggatggaccagagtatcagaatgtgaacatattgagcggggatatgaagatatttgccgggacttgcgggcattaggagcagagatccggcgccgggaggatgatggagatagagaagatacagattgaaaaaaagacagaggaaaaggtatggcgccgccgtggaaaaaaacatatctggatcacggcggcagcacttcttgtggcagccgcgttttttgtcggtctgtcgctgcttcagattaatacaatccatgtcagtggaaaccggcaatatacggcagagcagatagaggcgtctattttcgattcgcggctgagccggaatccggtgttctgctatatgcagtaccgcttccggccgcacaagtcaattccgttcgtgcaggattacaagctggtgttccgcagcccgtcggacgtggaggtgatcgtctacgagaagagtgtggtaggttacgtttcctacatgaacagccggatgtattttgacaaggacggcatcattgtggagagcacaagcgagacattgccgggtgtgccgaagattgccggactttcctttggacatatcgtgctgcatcagccgctgccggtcgaggatatcagcgttttcaacgagattctgaacctgacgcaggtactgtcggtcaacgaggttgcggtggacgagatccgttttaataaggaaaaggaagcgacgcttcaaatcaggagcttgaaggttgagctgggaagcaacagtgagatgaacgggaaactttcggagctgacggatattctgcgggattatccggatctgtccggaaccctctatctggacagctacgatgaatcgaatgcaaatccgatgtaccggtttgataaaaactaggaagaatcggcataatccgttactggcacgtatgtgtgaacagtaacattgtgactggtttattgaaaatttataaaagaaacgattgattttttgctgaaaatcaaatatagtattaggtaggctagatttaaaagaccctaattttagtataaagatgataaaaccggaacagatgggaaaatgaaggaggaagtatcttgttagagataaagataaatgaagcagagaactctgccagaattatagtagtaggtgtcggcggagccggtaacaacgctgtcaaccgtatgatcgatgaagatattgccggtgtagaatttatcggtatcaatacagataagcaggcactgcagttctgcaaggcgtccacagctatgcagattggtgagaagctgaccaagggacttggtgcaggcgcaaagccggagatcggtgagaaagcagctgaggaaagccaggaagagctggcacaggctctcaagggtgcagatatggtattcgttaccgcaggtatgggcggcggtaccggtacaggtgcagctccggttattgcacgtatcgcaaaagatatgggcatcctgacggtcggcgttgtcacaaagccgttccgtttcgaggcaaagacccgtatgagcaatgcgctcaatggtatcgaaaaactgaaagcagctgtcgatactctgatcgttatcccgaatgataaacttcttgagatcgtagaccgccgtaccacgatgccggatgcactgaagaaagcagatgaggttcttcagcaggcagtacagggtattaccgacctgatcaatgttccgggtcttatcaatcttgactttgcagatgttcagaccgttatggtggacaagggtatcgctcatatcggtatcggtcatgcgaagggtgatgacaaagcacttgaggctgttaagcaggctgtatccagcccgctgcttgagacaaccatcgagggtgcaagccacgttatcatcaatatttccggcgatatcagcctgatcgaggcaaatgacgcagccagctatgtacaggagcttgcaggcgacgatgccaatatcatcttcggtgcgatgtacgatgagaatgcacaggatgaggcgacgatcactgttattgcgactggactggattcccacggtgtgaacacaccggtcgcaaaagcgatgactgagttcaagactccgttcaaggcaaagacgactggcaatacatacgctcagccggcagcacagactgcagcggcagcgcagccgacctacaaggcaccgaccttccgtgcaccatctgcagcagcaccggcacagccagtcgctccgaaggaagcaccgcagtcggcaccggcacagccgttccgcccgatgcgccaggaaacacagatcaatattccggattttctgagaaataagaaataatataagagtgagagatgaactgctcttgctttagcaaaaatacaaaatatatacagaagcagttgtttttggaagagacacgcattagaagtgaaaatttctgatgcgtgtttttttgtgtaataggaaattccttggaatcccctattacacaaaaaggcacattcttttttatcgtcgattcagaccttcgacttatgtcgaatctattcaaattttacgtttttcccccgatttttggcgatcaaaacaggcgttttgcgccctcggtttgacaaattttgcggaacttttttcttataatatcccgtgtcggacagaaaggtgggaagagacagtgacctatcgtgtgtatgcggatgtcatcctgctgcaaaatctggcagcggatttcctgcttctgtcggtggtgaagaattgcctgcgtctgccggaacgccggtatgggcggttggcagggagtcttctgggagccgtgtatgcgttaggaatggtgttagctccggttccgctgggatatgccgggcggatgctcctaagcgccacgatgagcgtgctgatggcatggacggcattttccatccgtaggaagtcggaggcggcagaagccgcgatcgggctttacatagcatctatgctggcggctggctgcatggaactggttcagccgcttggaatacgggtgaatcttctgttctggctgtttaccgcgggggggagttttctgattccatctgcggtgtggcggtttggtatgcaacggtgtatgaagctggaacaccagtacgcggtaacgctttttaacaaaggcagggagcggcatgtgcaggcgattctcgacacaggcaaccatctgacgatgccgctttcggggcgtccggtgcaggtgctggatgcgtgtgtggcagagagatttttttcctgggaggacggtgtccaatacatcccatttcggagtgtcggaaagggcggcggcgtgattccggcatatcaggcggagcggatggaagtgtccggtcagggcggtatgcgggtgattgagaagccgtggattgccatttcacaggaggcgctgtcgcagaagggcgagtatcagatgctgctcaatgaaaaatattggttgtgaagaaaaacagccgttatggtctgaaccatagcgaacaacataagggggaaagcgtatgtttataaaagtttcagttccaggtcagtttcgtttaaaaatgatgccgtcgttccggtcatttctgatgcaccgggacggggaagttcattatatcgggggaaccgatatccttccggcaccgtttgacagtgtgcgggaggcggaggttttaagaaaatttggaaccagtgaggataaagaggcgcgttcggcgctgatcgaacacaacctgcgcctggtggtctacatagcaagaaagtttgacaacaccagcgtgggcgtggaagatctgatttcgatcgggacgatcggtcttatcaaggcgatcaacacgtttgacgtagataaaaatattaagctggcgacctatgcatcccgttgtattgaaaatgagattctgatgtatctccggagaaataataagacgaagctcgaggtttcgattgatgagccgttgaatgtggactgggatggaaatgaattgcttctgtcggatattttgggaacggatgaggatattatttaccgggatctggaggatgagacagagcggaaactgttgaatgcggcgatcgaccgcctgaatccgcgggaacagaaaatcgtgaagctgcgctttggtctggggagagagcaggaagatgaaatgacccagaaggaggttgccgaccttctgggtatctcgcagtcatacatatcgaggctggaaaagaagattatgaaacgcctcaaaaaagaaatttcgcagcaatgcggtctatataccagccgataagtgctggaagaaacagaccgatcaggatgtaaaacggacccatttcatagcggaaggagaccgggaagttggaaagcgtttccggtatttccttcaaaatgaagcgggcataggcaaaatcgatcagcttgaacagcgtgaaatgaatcgccataatgtcaaaggaatggcgtcctaaaaaggcaaggacctttgccagcggtctgatgcgctcggacaggtcagagagcgaaaggacgaagtaaattccaatgatggagatcggataaaataagacgcccggaatgtgcatgcttgccagatcgatgaaaatgtgaagctttgtgttcgtcaggtgcagaagcagggcgcttatcaggcagccgtaccagaccgtatagtggcggaaattggagaaaaactgctgcatcagccaggcgatgagatagaccggaacaacgagcagcgccgcctgcagattgtaagggagcgggcagcttctcatatttaagaagacaccggcaaggccaatcaggatgcatgcaaatgcacatacaggaagcttgacattatctttccgggcgaagcgggcagctgcgcgtccaaaccagacgcatccggcaaagagtccggaggacaccagccagaccggcagaaaccagagggcaccctgaacctgttccggggagttgaaggaaagactgctcatccatgccgtaagcattctggtatggttgtaaagttcctgtcccgcatagagcctgtgcgttacaaaaaagttgtgaagcaggacaaaaaacagcgtgtagaacatatacctgggccatgcaccggcgagacgggagccgaagtagagaaacggcgtatccccgtatttcgtttcattataaaaatagcctgtgataaagaagaacagtgccaggtggaacagatagacgaacgcaccggcgaaatatccggtatgccccagcacgatcgcaataatgccccatccctttacgatatcccagtagagggaacgggcttttttttgtgtgttcatgaatggatctccttgtggttgaattctattttctataaataatattgatcgtaaaacccctgaaaatatattttactatggaacggcagaaaaggcaagaaattggaatgagtgaaaacggttctcatttgtccgggtataaatgagctttgaattgtccattctaatgtataggtgacaaaacaaaaatcaaaacgattcaaccgtttgcgttgatcgtccatcatacggagggaatggaaatgccggtctataaagtggaaatctgcggggtcaatacatccaagctgcctcttttaagtaatgaggagaaagaagaactgtttcgccggattctaaagggcgatcgggaggcaagagaacagtatatcaaggggaatctgcggctggtgctcagtgtaatacagcgcttttcgggtagccgggaaaatgtggacgatctgttccagattggctgtatcggcctcatcaaggcgattgataattttgatattacccagaatgtccgtttttcgacgtatgcggttccgatgatcctgggggaggtgaaacggtatttgagggataacaattcaatccgggtcagccggtcgctccgcgatacggcatacaaagcgatctatacccgtgaaaatctgctgaaaaagcagtcaaaggagccgacactctgcgagattgccaaagaattgggagtcagcaaagaggagattgcgtatgcgctcgatgctatccagagcccggtcagcctgtacgaaccggtctatacggacggcggcgatccgctctacgtgatggatcagctcagtgacaagaaaaattcagaggaacattgggtcgaggatctgtcgctgggggaggcgatgcagcgcctgccggaccgggaacgccgcattattgatatgcgcttttttgagggaaagacccagacagaggttgccgaagaaatccatatttcgcaggcgcaggtgtcacggctggagaagagtgcgttaaaaagcatgaagcattatttgagctgaatgttgatagggattgtgttatagggattgtgtgagattcttctgattgattgtttggcggctctgtgttaaaatataggagatatagtctgcaaaaagaatctgaaaatcaagcagatgactgttatctgaactggggttgagcggagtattccatctgatatagtgataaaggcagcttggcgatgcgacactcaggcagtcatggacagcagacagagtagaaaagacaggcgcaggcggattgagcctcgcgcatgataaaatgtactctcggagtcttttctgcactcgcttttgtggctgattttccgccagccgtacccgaatttcatcaacgtacgcaccgcgtacgcctcagaaatttgggcacagctgacaaaaaatcatctcacaaaatcaagcacagaaagattccgagagtacattaaaaagagccggaggaattcaaatggagaaattacgtaagctgatgaaagaacatcaggataaagcagataaaaaagtgatgggagaggttctggagctgcttcagagagagccgggactgtttgttgtgactgtccatgcgacgaaaaacttcttcctgggtgcagagaacggcaaggcggctgctttcctttacaccagccgcgagtatgcagatgagttcgtgaaagggctggagatggtcggtgtagagacgaaggtactggagatccgcccattacagcgtatttcctttttcaacgacctctaccgcagcggttttgaggcagttgtgatcgacaagggacaggaaaatcatatgtccatgtcgctgttcagcatcatcgagaaaccaaaggatacatccgagatcgtgatgaacccgtccctggtccgttctgcaaatcagttctatcaggcactggtacagcaccaggcattcccacagatgcaggatctgatgtgcaaagagctttacggtgcgcgtctgctggttccggttgctgacccgcagaagacgacggcagtaccggttctgaccaccggaaagggtgtacgctattacccggcatttacggatttagtagaatttggcaaatttgaccgtaaacatcagtttggagcaatggaagtccgcttccgcgatctgaaaaaatatctggattacgtgaatggaatcgtggtaaatccgtttggatttgcactccgtctggacggcgagaagctgaatcggattgagaaagagaatatgaagctgaaggttgtaaaataaatgctgctgtgaccgtgaccggtaatgaatagatgtcagcataataaactgtggtgaaaaggctgtctcccatcagaatgtatcatatagatgcatctgccgagagacagcctttttgattattcggttctcctgtttttttcatataaatgtagtaatcccttcatcaacagcgccccatcatacgtgatcgtatgcgaacagagcggcaggacaatcttggagatgccgccggtggcgatgatggaagttttctctccgagttcttcctcgatgcgatccagcataccgtcgatcatcgcggcattgccaaatatgacgccgcttctcatgcagtctatggtatttttgccaatgacacggcgcggcgtatcgaggctgatgcgcggcagctgggcagtgctggcgctcatgctgtcgagggaaacgcgaagtcccggcaggatcgcgccgccgacatagcgtccgtttttgtcgatgacagacatggtcgtagcggttcccatttcgatgatgatgattggcggttcatgctctgcaagggcaccgactgcgtttacgatcatatcactgccgacggatttcgggttgtccatcaggatgtttaagccggttttcatgccggaaccgaccagcattgcgtttagtcccgttattttacggatggcggcaagaatcgtccggttaagcggcggaacgaccgaggagacgatcgcaccatcaagctgatctggggcaatatggtaaatttcaagaatacttttcagcgccacggcatattccagattcggttttccgatggtggtcgtgatgcgttctacaaaatacgttttttttgcgtcgatcacgccgataataatgttggtgtttccaacgtcgatagctagaatcataaaataactcctttatatctcctgcatctctacaataatcaacatctcttataaaaagttgattgtatagttatcgcaacggtttcatatgttcaactgttactatttattatatatccacgttaatagtatgattatatgttttttaaagaaaaggatcaagaagaagatgaaaaatgtttttaagatctgttaccgatcgcgcgtgagtgaaccgtaacttggacttgcgtattcgtttaaaataatatagaataaatacgtttagacaaagttaaagaatggtagtaagtttggaggaagatttttttggaaaatatagcggagcagatcaaaaaacggcgtacattcgccattatttcccacccggatgctggtaagacaaccctgacggagaagtttcttctctacggaggcgcgatcaacctggctggtacggtcaagggaagaaaagcggccaagcacgcggtttctgactggatggagatagagaaggagagaggtatttcggttacctcttccgtattacagtttaattatgagggattttgcatcaatatcctggatacaccaggacatcaggatttctcggaggatacctaccgtactctgatggcagccgattcggcggtcatggtcatcgatggttctaagggtgtcgaggcgcagacgatcaagcttttcaaggtttgcgttatgcgccacatcccgatttttacctttatcaacaagatggaccgcgaggcgcgcgatccgtttgagttgatggatgagatcgagagcgtgctcggcatccgtacctgcccggtcaactggccgatcggctgcggtaagaattttaagggcgtgtatgaccgtgccacaaagaagatcacaaccttcacagcagcaatgggcggacagaaggaggtcgcatctcaggagttctcgttagagggcgatgaggttaactccatcatcggtccagactaccatcggcagctgatggatgatatcgagcttctggacggcgcatgcgatgagctggatatggagcgtgtcagccgcggaaatttatccccggtattctttggttcggcgctgacaaactttggtgtagagacattcctggagcatttcctgaaaatgacaacctcgccgctgccgagaaatacgacaaccggcatggtggatccgttctctccgaatttcagcgcgtttgtcttcaagattcaggcaaatatgaacaaggcgcaccgcgaccgtatcgcatttatgcgtatctgttccggcaaatttgaggcaggcatggaagtaacgcatgtgcagggcggacgcaagatccgtctctcccagccacagcagatgatggcgcaggatcgaaagatcgtcgaggaggcatatgcgggcgatatcatcggtgtattcgatccgggtattttctcgatcggtgatacactttgtacaggtgaaaaggtagaatttgaaggcattcctacgttcgcaccggaacattttgcacgcgtgcgccagatggacacgatgaagcgcaagcagttcatcaagggcatcagccagatcgcccaggaaggtgcgatccagatcttccaggagttcaacacaggtatggaagagatcatcgtcggcgtagtcggcgtcctccagttcgaggtactgacctaccgtctggaaaatgagtacaatgtagaagtcaagctggaaaaacttccatacgagtacatccgctgggtagaaaacgctgacgagatcgacgtagctaagatccagggaacttcggatatgaagcggatcaaagacctcaaagacaatccactgcttctgtttgtcaacagttggagtgtgggaatggtagaagagcggaatccgaagcttaagttaagcgagtttgggcgtaactaaagccatgcagcggaaagcaccgtttcagcgaatggaaaatttatttttcaggcgctgaaagggggatttctgctatacggcgcagccggacagaggtgtgaaaccgcaggttttgcacccctgggcatggtaaaacaagagagagtccctattgcacccctgggcatggtgaaacaagagagagtccccatcgtcccatctgggcatggcgagaccataaaaaaagaaaaggagacatttcatatgagcagagtagatgtagtacgtgcagccatggtagaagccatgaaagcaaaagacaaagcaagaaaagattccttatccatgctgttatccgcactgaaaaatgcggagatcgacaagcgttctccgctgactgaggaagaggcggacgcagttgtaaagaaagagatcaagcagacgaaggagactctggaactggctccggcagatcgtgtggatatccgcgaggaggcacaggcacgtctggcagtttatcaggaatttgcaccggaggatctgaccgaagagcagatcgcagaggtgatcaaaagtgttctggcagagcttggcattgaaaatccggcaccgtctgacaagggcaaaatcatgaaaaccctgatgccgaaggtaaagggcaaggcagacggaaaggtagtgaaccaggtactggctggaattctgtccaaataataaccaaaggaaaagaacgaggcggaagatttatgtataaaaagaaaatcgagcagtatatcgaggcgcacaagcaggagatgttagatgacatatgcacgctgtgcagcatcaacagcgagcgttcggcataccaggagggcgatccgttcggcgaaggtccgagccgcgcactggcacaggcactcaaaatggcggaagagtatggattttccatcaacaattacgataattatgtaggaaccgccgatttaaacgacggtgagcaccagctggatattctggcacacctggatgttgtcccggcaggcgagggctggactgtgacacagccgtttgaaccgattgtaaaagacggaaagttgtacggacgcggcacggcggatgacaagggaccggcggtagcagctctgtatgcgatgcgtgcggtcaaagaactgggaatcccggtgacaaaaaatgtccgcctgattctgggaacagatgaggagtgcggcagcagcgatattgaacattattataaagtggagaaggaagcgccgatgacattttccccggatgcttcgttcccggttatcaatatcgaaaaaggacgtttcccggggcatgtgacagcttcttttgaggtatcgacggagaatgcgcggatcctgtccatcgaggctggcatcaagatcaatgttgttccgggcaaggcgcatgcgacaattacaggactgaccgaggaagaggtacgtccgatggcagagggcgtgacgaaggagactggcgtacagtttgagctgcaggcagaggaagatgtgatcgtgatcaccgcagtcggtgagggcgcacacgcctcgacaccagaggaaggcaaaaatgcgctggcatccctgcttctgcttctggatcgcctgccatttgcatcctgcggacagacgaagctgattcacagcctgactgagtgcttcccgtggaatgataccgagggaaaggcgcttggcgtggcgatgcaggcagaaggatccggagcgctgtctctggcattcacgatgcttacgatgacggagacacggatggaagcgtactttgacggacgtttcccgatcggcggcaatgatgacaacctgttgaaaccggtggaggcaaaacttgcgtcccacggcatgaagttagagtccccgcagctgcgagagccgcattttgtagacggcaattccgagtttgtcagaacacttctgaatgcttatgagctttataccggcaacaagggcgagtgcaactacaccggcggcggcacatatgtgcatgacctgaaaaacggcgttgcatttggcgcgtcgatgccgggcgtggacaaccggatgcacggggcagatgaatttgcctatgtgagtgatctggtggcaagcgcgaagatttttgcacaggtgattgcggatttgtgtaagtaacagaaaatttcgttttttccgccgtaagaattaaagaaaccttaattgattcgccgcaggttctatgttagactgaaatccacaaccgggaggtactgtgcatgtttgaagacagctgcaggaactctggcgagagggaaaggagagaacgattatgaaaaaatcattccatacagttaaaaaggcagggattctgacggcggcagcggttctgggaacagcggcactggcgggatgcggcagtaaggcagatatggcagagagtgcagcggcaagcgaggaagcaaccgaagcggtcggagaagcagaagcatcggatgcacagcttgtcatcgcaggcggagacagcgccggattgatcgcggcggttcaggcggcagccgagggcatggatccgtcgaagatcctgattctggcaccgggcgaagagctggcggcagatatggcggagatggcgccgtatgtcaatgcagccaatacagatgagcagttccaggcgaatcttacggatgattttgagatttatctgtcggatattatgacggcaggaaataatacgaacaattcggatatggcggcagatgtatcggagaacagcgaagaggcgaaagactggcttgccgacacactgggaatggagtacggcgatctgacacaggaggcaggttccacggtagcccgcagtttcccggcaaaagagggaaatctgaatgagcttgcacaggaagcgctgcttaaaaaagtcgaagagctgaagattccagttgaatataagacagaattaaagagcgtcgcttacgatgaagaaggtgcgcttgaccgcatcactgtgacggtggacggcaaggatcaggaaattgactgcctggcactggtagcgaccgatgtctccctgattccggtttttgaggaatctcaggtatatgaggcagatggaaaggcagctgccttggttgtcagcaacaatgcggaacagctaaacaaagatagcggcgagctgatcaatggtctttatgcagcaggtccgatcctgtcagcggcagtagacggtgaaggtgtgctctccggcaatgagctgaccgaggcggttgtgtttggttcgactgcaggaacagaagcagcggtttatgtttcggataaccagtaaaagctaaaatgattcacatataatgccatttctaaaaaagtagatgatacagacgaaataaaatagaaacctttaagaagaaggttcaagcaagaagcgggtaaaagcgaaaaacttttacccgcttttagtattttacagaaaacagcacggaactgatttgcaaaaataaaattatttttattgtggagacaatatctaaaaaagtaagtcagaactaactttatatcactgaattattataacttattcgcaattcgatatatttgtttataataatctggctttttgatactatgtagtcaaacctcatgaggaacacgagaaataaaaaaacattacataagggggtattacatggtggagaaaactaaaaatggggcggagaaaaaagaaactccgttgtacgtgaaaatattcattgcattgtttgcaggtatcgcgtttggttacgtcttaaattttatgggcggcgtggagaatgagatcattaacggatatgtccttccgttcttccagttcatcggagatttgtttatcaagttgatcaagatgattgtcgtcccgctggtgttcttctgtatcatcgacgcggcactttcgctgggcgatatcaagaaacttcgaagcatcggcgttaaaaccatcatctggtttttagcaactggcggtatttcagcaaccatcggtctgatacttgccaatatcatcaaaccgggacgtggcttgcagctgggaacggcagagacagcaatggaggtgaaagaacttccgggtatctaccagacactgctcgacttaattccgtccaacccattccaggcactgacaagcggcgagatgatgcagattatcgtcttttccctgtttcttggatttgccatcatcagcattggcaaggaagcacagcagttatgtgacatcatcagcctttgttcacggacgatgtttaaggttatcgacatgattcttggaatcatcccttacggcgtattcagtttgatgactgtagcacttgcaaaatatggcgttgccatcttcggaccggttctgaaattcatcttaactgattatcttgcctgcattatcatgagtactgttggatacagcattttccttatcgtgattggaaaggtaaatccgatgaagttctggcgcaaagcgtttgaaccttggatgatcgcatttagtacctgtacttcttcagcagctcttccggtatcaatggaagtagcaccgaagaagatgggcgttccgagagatattgcgagtttcgtacttccacttggatgtaccgctcagatgaacggaacgtgtgcatactttggtatcgttgttctctttgccgcacagctgtacggcgtagagttaagtattcagcagcagattatgctggttgtacaggcaaccttcttaagcgttggctgtgcagcaactccgcagattggtctggttatcagcttaaccttgatgacgcagatgggacttccgctggatgcatacgcactggtagctggaatctatcgtatcatcgaccagattcacacatctactaactctgtaggcgacctggtagcatctgtctgcatttctcagatggagggtgaactggatcacgatattttcaatcaggaagaagccaaaaaggcagcttgagttttagaaagaaacatcccggattcgtatgaaatgtgaaatatatctgggcagtagttatgtatgaaacccggaaagcggggaaacgacaaatttgtgcagaacgtgaatcaaagatggaatatggaacccccggttctgaaaagtccacgttttccggataaaaaggaaaaaaacagaaataattcccacttgcaaaggtgcaaaaatttaagggaaccagacaaaacaagaaaaggagattaaaactatgagtgataacagaattatcgaatgtatggaacgtgcacagtatcttcttggcaacctgatggctgttaaaccgggcgaggaagttttgattgtcgttgaccctcagaccgacgagagaatgacccaggcgatggcagcagccgctttaaactgcggcgctgagtacggcgtatacatgatgccgattcgtggaaaagacaaggcaaccatcttcccgaaatccctggaacttggcatggatgcctgcgatgtatttgtcggcatgaccaccgcatccggtgcagctatctacaataaccacctgaaagagctcatcaaccagaagaaacttcgcgaggtttctatctgcttaagaaatatcgacaacttcacacgcggcggtgctctggcagactatgaagcagtttatgcagacggcgagaagctgcaggcgatctggagaggtcataagatggctcacatcaccacaccggctggtaccgacctgtacatggaaatgaatcagatggagccgatcatcgagtgtggtatcgcgagaaatccgggcgatgcaatggcatggtctgatggcgaggtttccttaggaccggtgatcgacacaacccatggcaaattggtaattgatggacctatctgctactatggatgcccgaccacaccggttgagttaaggatcgaaaaaggacgtatcgcagaggtagttggcggcgatccgaagatttgtaaagaaatccgccgtcagatcgcagaagttaaagattccgacaacattgcagagatcggacttggacttaacccggcttgtatgttcaacggagacttcgaggaagagaagaaggcaagaggaacctgccacatcgcaatgggcaacggcttctactatggacagccggcacgctcgaccgtacatatcgacatggtacagtacaatccgaccgttatcttcgacgagggaacaccagaagaggttctgattgtaaaagacggcaaggttgtttgtttgggcgacaaataaaactattgcatccaactagacagt

SEQ ID NO: 11043 - DNA, 6666 bp, Unknown
  gut microbiota DNA sequence
gggctgaaaagtagcccccaaaacacccacaaaattggctctcggttaaccactttgggcaccacttgaccctctttttgccctctttttggccggttaaccacttgcggaccactaaaaattgggtgaaaacggctctcgttttgctaaatttggtcaaactatatcagcccgtttagatatagtaaaaccccggaaaaccttgattttccggggtttttgaaccattttgatacggtctgaacagcagattatctcttgctgaactgaggtgcacgacgtgcagccttgagaccgtacttcttacgctctttcattctcgggtcacgagttaagaagcctgctttcttcagtaccggacggtaatcagcgtctgcctgaagaagtgcacgggagatgccgtgtcttacagcgccagcctgacctgtgaagccgccgccacgtacatttacaagtacatcgaacttatcaactgtctcggttgctacgagcggctgacgaacaaccactttcagggtctcaagaccaaagtactcgtcgatgtctcttttattgatagtaatcttgccggttcccggtacaaggtatactctagcgatagatttttttcttctgcctgttccgtaaaatttgttagccattatagtttcctccttccagtgcctttaattaaaacttgatttctaaaacttccggcttctgagctgcctgctcgtgctccggacctgcgtatacatgaagttttgtaatcatgcttcttcctaaaggtccctttggaagcatacctttaactgctaactcgataaccttctccggcttcttagccatcatttcacgaagggttgtctctctcatgccacctacataatcagagtgattgtagtagattttctgatccatcttcttaccggttactttgatcttctctgcgtttactacgattacataatcgccgcaatccatgtgcggtgtgaagatcggtttgttcttgcctcttaatacctttgctacctcagatgcaagacgacctaatgtatatcctgtagcgtcaactacataccattttctttcgattgttgctggactagccataaaactcttcattggttgacctcctgttttacttcatataattgagattaactatatcatgaaatgcctgctccggggctttggtgccgacatcttcctgactcatgtcatactgacttattatattacacgcttccggacgtgtcaagcggtttttccttgaaaatacaaggttttttccccggatttacaagataagttcgtttcattccatgcgtctgatatacgcatgggatacacatgaaaaaggaagatttcctcctctcagattccatcttcccttttcgccgctttttaggttggtaatgaactttttctctttcctcaagagaatttatttgaaggagactgggaaatctccgtcaaaccttatttttcgataaaagcgttcctgcaatggcagaaccgattctgcctatttctgcttcttcgcttccagataatcattcagctctgtattcaggacattggtgatgaacatatgtcccggtgcgtgggtaatgactaacggaagttttgcattttcaatcgctgcctgcggggtaacgccgcaagcccagaataccgggatctcaccatcgcggatctcgaccggatcgccatagtctggtttggaaatatccttaataccgatcgctgccggatcgccgatctggaccggaccgccgtgtacgtttggataacggtctgtgatctctttggctttctgtgcgttttccggtgtcatcggacgcatgctgacaaccatcggtcccttgaacacgccggcgctctcgcactggatgttggtcttgtacatggaaacattgcagccctgcgcgatatggcgcacttcaatgccggctttcataagcgcctcctcaaaggagaagctgcagccaatcaggaatgcaaccgaatcttctttccaataagaagaaacatctgtcacctcatcgactttcacgccgtcacggtaaatgaaatatttcgggatgtccgtcacgatgctcgcgccctcgcccatatcgtggatatccggtgtgccctctacgacttccaggattgggcacggtttcgggttctttcttgcaaattctttaaaatcatccgcgtacttcttcggcaggataaccagatttgcctgtgcatatccggcacacatgccagccgtcgggcgggtaatctcgccagtccgaatcagtttccatacttccggtggtgtcattttgctataatctgccatatacgttccctccatatctttcaatacatctgaggtttatctgaatctttcagtctcttcctctaattcaaccatatattcagttccatcgatcacaacccggtaggttccaatcggattccagtatctcttcgattcacatccaaccgctacctgaatcaccgcatcgagttctccgcacggttccggtacttttgccaattcttctttaagtgccttgagtttttccacctgctcaatgtagagcttctgtgcttcctcaaccgttactttctggaaatgtactttataacccggtctggactgtgcaaccagcggaagatccacagagataacgccagcaatcttcgtataaccgccggtggtctgatgatccgccatcatgataatcggttgtccgtgggacggcacctgaatcgcaccaaaggcgataccgtctgtgataatatcgccgccatttttatgctcgatgacctcgccctcaagacggcagcccatacggtcggactcattcgtaaatgcatatgtgctgcttaagaacgtctctacacctttctcggtaaagcagtcatcctgcggtcccatgacaacgcggatggttttctcagtctgggagaagtcctccggcgtcacttttctctttctcatatttggaagggtcgtcttcggagcagcaaaaccaatctcgtctccgccgccgatctttcttccctgataaccgcctactttcagctttaagttagtggatttgctgcccatctgtaccgggatatccagcccgcctgccactgcaatgtacgcgcggcttccacttgtcataccggcaaagttcatggaatcgcccttatgtactaaaactgcctgatacatcggaagatcttttccatttaccttcggaaccagattgccgccggttactgcgataatattgtcttctgtaaattccatcatcggtcccatcagggttacttccagaaccgcctcgttttcatcatttcccaccaaaatattcgcgatcgctgcggaacgctgatccataacgcctgatacagacataccggactcctgatagccggtgcgtcccatgtcctgtacggttgtgaggaatccgccgcttgcaaacttaatgcccatctttatacctccttatcgtacacaacgtatttgtaggttccatcttcgacttctttttcgatctttttatactcttcctcggttactgcagcaaacttgatatactgtcccgcttccagaagcactggtttctcgcggtctgcatcatagagttttaacggagtccgtccaattaactgccagcctcccggagatgctaccgggtagataccggtctgctcaccggcaataccaacggagccgccctcaatcttcactctcgggctcttcagacgcggggttgcgatctctttgctcatgccgcccagatatgggaatccagcgatgaatccaatcatgtagattagatattcttcagatgtatgaatcttgatgacctcttccacggtcttgtgattgtgctccgcaacattttcaatatccggacccatctctccgccgtagagaaccggaatttcgataacggttggcggcgggatcggaatgctggataaggaacccatcaatttatcaaatttttctgtgagtgccttgaatccgatcacttccggatgataatgtactaataaggagcggtatgtcggaaccgtctccacaattcccggtatatcgcttttttcaaccgcaatcttgaatgcgcggattttcttgttgatctccgggctgatttcattgccaaactcaacgcacacagcgctgtcgcccgctacaaggtatcttacctcgctcatatatacctcctgtcagataaacgaagcccccgcctgcctgttctgcttttcttcgaaaaacctaaaaactgcttccgacccaacaagccagttacagggaaacgcccggcagacctgctgccataagccagccatctgcgtgctcatccagccagtccgccgggcgcctgtccgtttaatcgttttttattattttaccacattttttgcattttttcattcattaaccaaagatggtaagaatcttcggcagagccttgattcctgagtaaccggtcagaagaacaacgcatacaccaagtacgatgagtacggtcggatgtttgtaattttcaccgacgatatctttcctgcggcttgccagaagaatgacaagcagtgtaatcggaagaatcagtccgtttacggaacctgccagaaccagaagagttgccggctgtccaagtaatgtcatgataacggtcgatacagcgatgaagccgataacgaaccatttctcattctccatgatgaacggatgcagggtctttaagaaggatacggatgtatacgctgcaccgatgatggaggtgatagctgcaaacaggataaccagaccgaagatcttgtaaccgatgatgcctgcgcctgccttaaaagctgctgctggcgggcttgctacccatgcttcgcttccaacaacttccggagttgctgtaacaacgcctaaaactgcgaggaacagtaaaattctcataacacccgatacgctgacgcccattaatacggagcggcgaacgtgcggaagatccttggttccggagaaacctgcatccagaagacgatgtgcaccggagaatgtgatgtaaccgccgcagcttccgccaagcagggtaataatcgggaataccagattcgggaattcgttcagatgtccaacactgccgattgcctcaacaaccggaggttttgaacggaatgctacataaagtacggtaacaatcatgatgcttcctaagtatttggtcagcttatccatgaagtttttcgcatccttggataagaagatcaggataccgatgacaccggctacaacggttccgactttcagtgggaaaccgaatacgatattaaaaccggttgcggcgccgccgacgttaccgatattgaataccagaccgccgagagacacaaggaacgcaatgaaatatccgagtcccggaacaactttatttgcgatatcctgtccacgcataccggacacaccgatgatggaccagatatttaactgggttgtaacatccagaagaatggtgcagatgattgccagtgcgaaaatagagccatactgaccggtaaaggttgcagtctgtgtcaggaaaccaggtccgatcgcagacgttgccatcaggaacgcggcgccaatcagggctgtcgtgttcgcattactttttttcttttctcccatatttttcttctccttatatacgtattagcggaacagatttttaatctccactccctcggctaccagggtctcacgaatgttctttacgaactccagcgcttttgggttgtctccgtgtacacagatggaatctgccttgatggaaatgtcgtttccgttgatgctctcaactttcccttcttttaccattcttacgacacgtttgattgccaggtctttatctttgatgactgctcccggaagttttctggaaaccagggttccgtcatcgttgtatgcacggtctgcgaacacctcgctcgctgcctgtaaaccaacctcctcggctgccttgatcatctgggatcctgccagacccatgaagatgatatctttatctacttcatagactgcttcacacatcgctctcgccagcttctcatcaacagctgccatgttgtagaatgcaccgtgcggttttacgtgctggatttttacgccctggctcttagtaaatgcgctcaatgcgccgagctggtatttcagatatgctttcgcttcttccggagttaccaccatgtttcttcgaccgaagcccatcagatccggaaatcccggatgtgctcctactgcggttccgtatttctttgccagtgcgatggtcttatccataaccatcggatcacctgcatgccatccacaggctacgttggcggaagacacgtactgaagaatttcttcatccataccaatcgtatagttaccgaagctctcacctaaatcactgtttaaatcgacataaaacatggttcattcctccctttcttactcacacatctcatttttgcggcttagcgtttcttctgtctgttttcaacagctgtcggaaactatgtttaagatgagacgttttttgtatgttccccttgtttttttgcttctgctgatattttatctgacttttatgtatttttcaatcataattttaatatttttcaaaataatttaatttatatacaaaaatcgtgcaaaaacgcacgttttaggcgtgcgttttt

SEQ ID NO: 11044 - DNA, 85466 bp, Unknown
  gut microbiota DNA sequence
atactccttacgaaattccgctgcaaattcttcttgcagtctcaatccctcgacacggtttcccttatgaaattctaccattgcatccagttctttctggttcccttcaatcttcatgttattatagcgcctccattttcaactattcctcattttctgataaatcccgattgttctaatcttttttacgcccaccttcttgcccttcggacaagaagtatccctcgctcaaagagctcggtcaattccgatttttccacgtaaaaaaggatgtgcctttttgtgtaatagggaattccaggaaatttcctattacacgagaaattgctctctcatcacagttcacacattatgcaaactgcaatcccatctcgcacaatctaattatatcgcaactttattatctccgtttatccatttatagtcaaatactatcatcaaatcgccaaaatggacagcgcttgccaatacactgattgttctgagcacaatgcgtacactggacttctgtgcattccatttcgattccaaaatgcgtttttacaaaatcaaccgccgccagaatcgccagataagaatctcttttacaacacctcggaccgccggtgcgcgaaatcgcttccagtgcttttgatgtcatctgattcgaaagtccccaggattcctccgtcagtggcgtcgccccagacaagatagatacaaacatacctgcgctgattcccgctccgcaggcaccccagaatccgcaggttcctcctggaacggctttcccacggttcagcatttccatcacagattcccgcagattaatagcacctcccgcatttttatatgcagtaagcagcgccgctcccaccatgacatgatgctccggtccatgcatatggcaaaacggtgcatccatcatcttccggacaatctcgatcggatttctggatgtttcgtctatacacagggaaagaatggtgtccagtcccttcgtatgacaatcattacaaacataatgcccgttctggcatctggtcttgctcaattcttttttatgacataattcacactccatccattcatcctgtttcagataaataagaggtgctttacagacaatacattcttcttgcatgggatttccatctcctttacattcatttcccgaccagcgcgttgagtttctccactatatccatacttcccgaccggaaaccttccagatcgagtgtaatgtacagaaatcccatttcttttaatgtcctgcagatcgtctcccgctcggcaatcgctttttcaaatttatccgcatccacctcgatccggacaatatcgccatgcaggcgcaggcgcacatttccgccaaacacgcttcgaagataatcttctcctttctcaatccgcttcaaaacttccatgtcaaaggaagttccatatggaaggcgggtcgccatacatggcatggacggacgggatgcaacggaaattcctaagtcagccgcaaatgccttgacatcctttttctccagtccgcactgtgcaagtggactgacgacacccagctcacggagtgcctggatacccgggcggtacacatgcaggtcgctctcattggttccgtccatcacgcacggaatcccctcttcttttgcaaaatccagaagtgtcgcgaacaggtggtgtttgcagatataacagcggttgaccggatttgtccggatggcttccagctccatctcattgacctggataattttatggatcgcgcccagctcctttgccacccgctccgcgatctccagatcacaggctgggtgcagcatggtgtgaaatgtcacggcataaaccggcattcccgtcttcttcgccgtatcacacgccagcttgagaatcaggctgctgtccacaccgcccgaaaaggcgacacagaccggtgctttcgctttttctgccatgaaatgttttaaagcttctcttttttctgtctctgatatcattggtttattttccatggttcttgattctcctcttaattatctaacgagaatgcactgtgccgtttttcaatctaaaaagtgcttactgtaaactaatacttccgtcttccattactccgtggaatacttccatgaagcgcttccctgtctcccggcagatcgcgcgcacgctctcatactccggatagcacgtatccacgccgccgcgcttgcagatttttacctttgctgccccgtaacgggtctggatctcctttacttcccgtggcagtatcgtcctctctactggatagcggcgcacaccgatcgtggtcgtacaggagaagacaagctgttctaattcttcccgtttttctgccgttgtcagtacatgaagcacatacgccggacggtttttcttcatatatgccggtgtgtaccacacatctctggcgcccgcttccagaagcacctccatcgcatatcccagcgcctcgccggtgcagtcgtccaggtttgcctccatgacccacatggagctctcgtcgtgaccgtcttttccagtttctacttccaccgttttatccgtcagaagcatcgcccgcaggatattcgcgtgcgcgaaatccttatttccggcgccgataccgatcttttcgatctggtacttcttcggaagcgccgcttctgtccggaatgccgccgcgatcgccgcgccggtcggcgttaccatctctccttcgacatcccgaagcgtcagttccaagccctgtgccgctgcgatatttgccgtcgccggaaccggaaccggcattaaaccgtgctggcagcgtgcgaatccatgaccttcggaaagcggcgataccatcacgcggtggattcccagatcctccaggcagaatgccgcactgataacatccacaatcgagtcaattgcaccgacttcatggaaatgaacctcgctgaccggaattccgtgtgctttcgactctgcccccgccacaatctcaaacatccggcgcgccaggtttttaacgcggtcagatgcatccagacgatcgatgatctcgaaaatgtcatgaatgttgcggtggacgtgaggatgcatatgatcgtgggtgtgagcgtgatcatggctgtgctcatggtcgtgggtatgagcgtgatcatggctgtgctcatggtcgtgagtgtgttcatgatcgtgatgatgctcatggtcgtgctcatcatggctatgttcgtggtcgtgatgatgctcttcttcctctaaatgtacatcgaaatcatacgcatcgattccacatttcttcgtccgcccaaaatgcagatgatacccggacacgcccagactgtccagtgcccgtaccagtttttcccggcttgctccaagatccaacagtgcgccaaccgtcatatctccactgattccagacgcacaatccagatataagattttctcatccatttttacttctccctctacttttctcattttattgatacatttccgtttttcacttttatgcaattatcacaaaccactatcactctgccgtcttcttcggctcccgcgccgccaggcggttgatctgcgccgccaggtatgctgcgccgtagccgttatcgatatttacaaccgaaatgccgttcgcacaagaattaatcatcgtgatcaatgccgacagtccatgaaaacttgcaccataaccgaccgaggtcggaaccgcaatgaccggattttccaccagcccggcgacaactgtgccaagcgcgccttccattcccgccaccgcaatcacgcagtttgccctcgcaatcgcctcgcgtttggataaaaggcgatggatgcccgccacccctatatcatagtatcgctccacgcggcagccgaaaaattctgccgttttggcagcttcctccgcaatcgggatatccgcggttccgcctgtgcagactgccaccagcccttccagcttccgcggtgtctccgatgattttctcgcctgcaaaatttttgaaaccggatcgtattctatctccgggatgcgcgcccgcactagattccactgctctggcgtcgcccgcgttccgagtacttccccattttcccggtacagcgtctcgaaaatatccgccagataggcatccggctttccttggcagaacaccgtctccgggaatcccgaacgcaatttccggtgcagatccagcttcgcataccctaaatcttcgtaaggaagattcttgaacgcattctccgcttcctcaatacttatatccccccgttttacctcttccaacagcttccgaacatccatttttcctcctccttaccaaatcccgaattattaatctcttactatcgcccatcttcttgtcctttggacaagaagcatccctcgctcttatgaactcggtcaattccgattttctctgtcaatatgtgaaccggctaaactgctgccatcttttcctgcaatgcctttaaatcaatccgccgcgtgcaaatccgcttcaaaagagattccgaatggctcacaatcaccattcccagctcccgctcctttgactcctgcaaaagcgcctgccagatctggctctgggtcactgcgtcaaacatcgcggtgatctcatccgccagcagataccgcggatttgccgccagcgctctggcaatacagaaccgctgcagttcgccgccggaaagctccgatggaaaccgatccagccattcttcccggatgccaagccgtccccggctctcctcatccacctgaccgccttcactgagaacctggcgcatccgccagcgcgggttgaccgcctgctccgggtgctgccagattaactgcaccggcatacagccccggatattctcaatcggtatgccgtcaatctctaccgttcccgcctccggtctctcatatcccgccagcaggcgacacagcgtcgtttttccatatccgctcggcgccaccagccccacgcgctctcccggctcaattttcagggaaatacgcgtcagcacgtggcgccctccattttcatatgaaaaagataggttttccacctttagtgacatctcattctcctccaaaaaattcatgttccggcagtgcccggtagagcgcctgcgtgtatggctctttcagattccgtccctcccggaagttctccggctttacttcctccagaatcgtcccgtcataaaacaccagaatccggtccgccatctcaatcgccagttccagatcatgagtaatcaaaagcaccgctgccccgtcctgtgccatctcttttaaatgacggatcacatggcgcgcggtcatcgcctccagccccggtgtcggttcatccgccacaatcagcctcggctcctgcatcagtgccgctgccatcaggacgcgccgcgccatgccgcccgacagctcaaatggataacatttttccactgattcatccagcccgtaccgcttcaaaagctggcggcattttgcccgcgtcgcttcatcttttctgccgccgcagatctgatccccgacccgcatcaacggatcgaggtaggaaaccccctgcggaatcagggaaatcccattgccccgcagcccggcaagccgcgtctcatccagaacctctccctgataggaaatttttccttccatccggcagttgtacggcaagatccccagaatcgcgtgcgccagcaggctttttcccgaaccactcgccccgaccaccgccgtcagctccccactgaaaagtttgcaggaaaggtcgcggagcggatggagttcgcgccgtctaagcccacgcgcgtactgcgtaaaatataagtttagattttgaattttcaatatcggcttttccatggaatcacaattttcacgcaatctccgttctttgataacgtctgtctgttccaaatctgatagccgcatcgtttttgattgtttttgtcttaatcgcatcattttatcaaaatatatgtttttctgcctcattcccagcatcctctactcatgcgcgctccccggatccatcagccgccccaggctctgcccgatcgcctgaaatcccagcgttaccagcaccagtgccgcgcccggaaagagcgccagccaccattttccggtaatcaggtacgacatactctcggataaaataacaccgatcgccggttgctcggaggaaagaccgaagcccagaaaggtcacgcccgcctcatgcagaatcgcatggggaaagagaagaattaacccggtcacaaattgccgcgatacctgcgggactatgtggttccaggcaatccaccagggctttttccccagtttttcggagatccgcacatacggactgtcccggatctgtaagatttccgcccgcaaaagcctcgccagggacgcccagtgcgtcagggcaatcccggctgccacaccccggaatccctttcccagactgtaggaaatcaggatcaggagaagcatgtgcgggattcccattaccagattaatcagcccgcataccaatgaatccatcagtcccccgccaagcgacgccagcaatgcaagcgccaatgccaccgcggcgctgatcgccgcggtcagaagccccagccggatgcttaaagaaagccccgcaaccgtccgtttcagcatatcccgccccatccagtcggttccaaacagcccgccggttcccggaggcaggttttttctcgcaaaatcgacctgctgtgcggcatcctcccagacgattccaagcactgtcaccagaatcaggaaaaggagggaaattcccagcagccagagtgttttctttctcatgccctgcctcctttcctaagtctcggatcgaccagccggtacagcccatccgccgctgcatttcctgcaaatacaagcacggcactgatgagtgtaattcccagcagaagcgggatatcgcttcccagccccgccgtgaccgccgcctgtccgagtcccggataggaaaagacctgttccaccagcaccgaaccgccgaaaatctcgctgatcgagccaaattgcagcgtaattaccgggagaagcaggttgcggagtccatgccgaaaaatcagccgccagccgctctcgccccgcgcccgcgcatagagtacgtaatcactttccagaatctcaatcactttttcgcgcgtgtgcatcgcaatcgaagaaatccctgtcagtcccagcgtacacgccggcagaaatgcgtgatacaggcgatccgccaggctgacctcgtccgccgccattcccaccgggacactgaacccgattgggaagatgggaagctgcactgtaaagagaagcagcagcaccagcgccagccagaaggacggcgttcccgcgatcacgatgcaatagcccgtaatcaggcgatccacccacttgccccgttttgccgccgctgcaattcctaaaaatatccctacgattcccgaaaacagccacgcagacagaagaagccacactgacgcagacgccttttccgcgattacctccagcaccggtctgcggtacagaagggaaatgccaaaatcaccatgacagatgcccgaaagccagctaaagaagcgcttccaaactggcacgccaacgctccagtacgcctgtagcttctcgatctgctccggtgacatcgagccgagcgccgtctgcccgacattcgtctgcagcggatcgaccggagacatcgacaccagcaaaaacgataccagactgactgccaaaagcagcagaatcaggtgcagcagactgcgcccaaaccatttcatcctactcatagtaccaccgatcgacattgttgacgatggaccagccgtgaccgtgcggatgcaccttctgctctgcgacatgaagcccgtctcttacccagtacagatgatcgacattcaccagccagatccacggaagatcgccctcggctgaaacacccgtctcgccgtcccactgcgcctttttccacaattcatacgaactttccagatccaaagccgccagtgccgcatccatataagcgtccacggtctcattcgcatacggcgaatattctgccagccccgtatctgcctttgtatggtaaatattataaaattccatcggcgtgtgcgcgccccaaccccagagaagcggctgcgactgtgcctcgtcatatgcggtatcccagccggtgccgcggatcgatgcgtcaattccaatctcttttaactgctgcgccgtatcggctgccagcgcctgacgcaccgaatccccggtcggatagagaaattccagaatggctttcactccatccttttcgcggatgccgtcggcatttttcttccatcccgctgcatccagcatctcttctgccttctctgcatcataggaaatgttctccatttcatcgttgtaccacggcatcttgtcacagacactatatgccgggctgccgtacccatttaacacatgatcgatcatttcctgccggtcaatcgccaggttgatcgcccggcgcacctgcacatccgcggtaaaatcattgccgatttttacgctatcctcccgtaccgtctccggcactgccgggaggttaaatccacggttgtccaccgtctcacaatccaaaagactgaattctggcaccgactggtctgcataggacgccgccgtgtacgccacatccacctgcccggcgcgcaccgccgcaaatgccgcatcctcttccataaagagaatcgtgacctgccgcatcttcggcgcacccccataataatccgggttggcttccagaatcacctgctgccccttgtcccactgtttcaggatatatcgcccggaaccgatcggatgtgtgccgtaatccgttccatatgcatgctccggcacaattcccgtcaccgccatcgtgtatgaccagatagcaaacgggcgttccatctcaaacacaaccgtcacatcatcgatcgcctccgcctgtttcagcattgaaaaatcgttgacggaactcgtctctttcaatgtgttataagtgaatgccacatcctccgcggtcagcgtctcgccatccgtgaatttcgcatcgtcgcggatcgtcaccgtccatgtcattccatcctcggaggtctccacatccgtcgccagatcatacccgatactcaaatctgcttctgtcaccgtcagggtgctctggatcagcggttcatgcatatgctcgcccgcgccccagccatatgccggatcaaagcccgcctccggctctgaagtcggcggcatcgcgataataacgcttgtttgggtattttccgctgcattttcgccgttttcaacattttctgtctgttctgcgccggaaccgcctttctgcgcctgatttccagcgtttccgcatccggaaagcataactgccgccgctaaggcagcgacgccaagcgctctggcttctccgaacacttttccagtgattttgtctgtattttctcgttttttcatattttctgttgtacccctatatttttctttatgaaacaaaaggatatcagaaaagcgcgatccctgctgaaccgctgtaccttcctggtatccttctccatttttcttatttatctcagttaaaaaagaatgtgccttggcacattctcgtgccgagcgcggtcgcttgagacatgtttcttcttcgcgcgaatgcgcatcccgcggagcgttttttgtttcataggacgcaattccctatgaaacgagaagactcccacctctttaggtggtgagtcctgattcctattttttcgtttccccgcttctgcaaggcagcatctgcttgtgcagcgctgttttctttttcttatatacatttagactcattttagatgtctgttatcttattattattccgtcggcgtcgtctttctcacattcgtctccaggaaacggttatatccgagccagcccggattctccccgccgctctttaagacttccagcatcgtctccatcttcgcatcggtattgtccgcgaaattcaatgccagcgcctccagaagcgccggtttctttggggaaccgtactctaattcgccgtggtgcgcaaggatgcagtgctttaactccgccgctgtctttgccgggaatcccggaatctccttaatacggtctgcaaccatcatcgtgccgatcacgatatgacctaagagctgaccgtcgtccgtataatcattttccggaaatgcggataattcctgcacttttccgatgtcgtggaacagcgccgccgtcagaagcagatcgcggttcagcgccggatatgacttcgtgtagaaatcacagagtttcataacacttaacgtatgttccaaaagtccgcccacaaaaccatgatgcacactcttcgccgccgaatggaagcagaatttcttcacaaatgccttatcttccaggaaatagctggatgccagctttttcaggtacggattctggaaagactgcaccagagccgtcagctcctgatacattatcttgatatcctttgagctgaccggaaggtaatcgctttcctgatactcgccctcgtccgccttgcgtatgcgcttgatatttaactggttggaaccctggaaaaccgtcacatcgccgtccacatagacgtactgcagcggctcaaaatcattgatgcccggggaacttaaatcccagattttgcagtctaccgtgcctgttttatcctgaagcagcacggaagcgtactcttttccgtttttcgtcaccgcgtgctgtttcgtcttacataaatatacgtccgagactctcattccttcccggaactgttcaatatatctcattctgcctatatcctcctgaatttctatctggcgcgcagagataccaaaaatggaatttccgtgtatccgtcgcgccctttccgcatcacatttaccgatacagacacgccgctcgcggaattttcaatctgcgcctggagatctttgaaacttccgatctcctttgtgccaaatttcacaataatatcgccgggctggatgccagcgtcatatgccgggctgccggagactgcctccgtcacgtaaacgcccgccggaatgccgctcccctgcatcgcacggctcacatcctgtcccaggatgcccagatatgccgccgaagcgccattcgtcagccgctccagaatcggcttgtagctggaaatggtgtacgccgccgtccgatccgtacagctctcgctgcggcaggactccgatgtccagccgaccatctctccggctgtattgatcaaaaaggtacccgtctgcgaattgctgctgatatccgcatacaggatccgcgtcagtccatctgtaatctgcacattgcgcgccacgtaggataccgttccgaacgaaagcgaatgcacctgtccggacggaccgccgatacctacgaggacatcgcctgccttgaccgtatatgaattggcaagtgaaagcacctgcacctttttccgctcttcttccggcagattgccggacggcaccgccacaactgccattccgagcacttcgtcaatctggcgcactgtaccagcgatcttcgttccatccgaaaatctcacattgatcgaatctgctgcccgcaccgcatcggcgtaagtaaagatcagaaattctccatcactctccgcgatgactgcacctgcataatcacccgtattttccaccgggtttccaaatatatccgtatcctgtttgccggagctgaccgtcacgatcgacttatcaccctgttccccgattccacgcagcaccgacgtcatcgaattgaaattgtctgcggaaaactgatagctggaaagcgcctcgctgaccgcctcatcaatctcctgctccatttgttccggctgcgctgtcatatccgcatctgcaccgtccgacggcgaaacagagtccggatcgtccttggaaaactcgactgaggatgtctcctgcatcccattttcctgaaaacaccgatccgcaaacggctttaccgccgcaaacgaaaccgccgcgactcctccaaatgcggctgacgcgcatacaaagagagccacccgcttcgcaatctgttttctggtcagcggcggcttcactatcgtttctctcatgaattcccgtttttcctttttttcaagttcttctgaatccggcatttcactttcccctttgcataacatatcctaattatactttccttcttaaggttatgcaagaaaaaagtgcgaatgcttggctagacggcggggaatgtgatataatgtgaacacttgacgaggtcttttcgagtctagtgagaacttatacctgaccacttaatgaggtctttcacgaatttagtggtcacggtatcatgtgaacaccatttaaattaagaggattaccacaacatgaatgaaaaagcattaaaaactctcgaatatacaaagatcatcgaccagctcacggagtacgcctccacggagatgggaaaacagatgtgccgggaactgcagccgtcctgtgatctggggacgatccggcagagccagacggagacgaccgatgccctgacgcgcgtccgcatgaagggaagtctctccttcggcggcgtgaaggatgtgcgtggttccatgaaacgtctggaaatcggaagttccctggggatcccggagcttctctctgtcagctccctgctgacagtcgctgcccgcgcgcagagctacggacgccatgagaaatccgaagaatttccagatgattccctcgatgagcgcttccgcgccctggatccgctgacgccggtcaacaatgagatcaagcgctgcctgccatccgaggatgaggtcagcgatgacgcaagtccgggacttgccaaagtgcgccgctccatgaagatcgtgggcggacgcgtccatacccagttaaattctattttaaattccagccggacctatttacaggatgccgtcatcacaatgcgcgacgggcgctactgcctgccggtcaaggctgagtataaatcccaggtcccaggcatggtgcacgaccagtcctcgaccggttcgactgtatttatcgagccgctcgcgatcgtcaagctgaacaacgaactgcgcgagctggaaatccaggaaaaacgggaaattgagttcgttctggcagctctttccagccagcttatgccttacaccgacgcgatcctctcggatctttcgattctggcagagctcgatttcattttcgcaaaggcagctctttcccgccactataactgcgtggaaccgaaatttaacaacaaacggtatatcaatatcaaggacggacgccatccgctcttaaatccgaaacaggtcgttccgatcaacatctgggttggcgattcgtttgaccttctgattgtgacgggtccaaacacgggtggtaaaaccgtttctttaaaaaccgtcggactctttaccctgatggggcagtcaggactccatatcccggcatttgagggatctgagctggctgtttttgacaatgtatttgccgacattggcgatgagcagagcatcgagcagaatctgagtacattctccgcccatatgacgaatatcgtttcgattttaaatgaggcggacgccaattcgctctgtctcttcgatgagctctgttccggtaccgacccgaccgagggcgcggcgctggcgattgcggttttaaatttcctgcacaacatgacctgccggacgatcgcaaccacgcattacagcgaattaaaagtctttgcgctgaccgcgccaggcgttgaaaatgcctgctgcgagttcaacgtcgagactctccgcccgacctaccgcctgctcatcggtattccaggaaaaagtaatgcatttgccatttcccgcaagctggggctgccggattatatcatcgacgaggcgaaaaaccagatggagcagaaggacgaatccttcgaggatctgcttgccaatctggaaaacagccgcgtgaccattgaaaaagagcgcgaagagatcgcctcctataaacaggagattgaaacgctgaagaaccgcctccagcagaaggaagaacgtttctccgaacagaaggaaaaaatgctttccaaagcccgcgaggaagctcagaagatccttcaggatgcgaaagacaccgccgatcagacgatccgcaacatcaacaagcttgccaagtcttctggcgtcaataaagaactggaagccgagcggaccaagctgcgcggcaagatccaggatgtagacaagaaactggcagttaagaaaaccgccgcaccgaaaaaaaccgtttccgcgaaaaagctgcgtctcggcgataccgtgcgcgttctctcgatgaatttaaagggaaccgtcagctccctgccgaacgccaagggcgatctgtatgtacagatgggaattctgcgctccctcgtcaatatccgcgatctggaaatggtcgaggaagcatccatcaccggaccgggactttccggcacgcatacgggtggttcccgcggatccggaagcggaagcagcaagatcaagatgtccaagtccttcagcgtatcgccggaggtcaacctgattggcatgaccgtcgatgaggcgatcccggtactcgacaaatacctggatgatgcctacctggcgcatcttccgcaggtccgcgtcgtacatggtcgtggaaccggcgctttgaaagcgggcgtacaccgccacttgaagaaattaagctatgtcaaggaataccggcttggcgagtttggcgaaggcgatacaggcgttacaatcgtgacatttaaataagaaatatccataactgttcaggtactgaacagttacaaatatccaaaaaaacaggaggaatcaacatggctgaaaagcagcgcattctcatcgtagatgacgactacaacattgctgaactaatctcactttacctgacgaaagaatgttttgaaacgaaaattgtcggagacggggaagaagctctccgggtatttcccgaatttcagcccaacctgattctccttgatctgatgcttccgggcatcgacggctatcaggtctgccgggaactgcgaagtacctcccaggtgccaatcatcatgctctccgccaagggcgaaatctttgataaggtgctggggctggagctgggcgccgatgactacatgatcaaaccattcgattcgaaagagttggttgccagagtcaaagccgttctgcggcgctaccagctaccggtgcagattcctgcatcgtccgtgaccgaacagcatggcaattttgtcgaatatccggatctcatcgtcaacctgacgaactactccgtcatttacaacggacactcgatcgagctgccgccgaaggaactggaactgctctatttcctcgcgtcctcaccaaaccaggtattcacaagggagcagcttctcgaccatatctggggatatgaatacatcggcgacacgcggacagtggatgtccatatcaagcggctccgtgaaaaaatcaagggcaacgacaagtgggcgctgacgaccgtctgggggattggatataaatttgaggtgaaacggtaactgttagtgaagaactgaactgttgcgtgaagaggtaaccggaggtttaccatgaaatcaaaccactacacacattctctttattataaactactgatcggctatctcatcttcggtctgcttggattcatcacgatcgcgaccatctcctctgagatgacctaccgccatctggtggaacgcgaatcggaggtcctgtatgacgaggcgacaatgattgccgaccggtgcagcaaagcctacgagggtaaaaccatcaatctcgattcggcatacccgcagatcgaggcggtttccgcctatctgcagtcggatatctggatcctgaaccatgagggcatcatcgttgcggacagcagcggcaggcgtaccggcatcgcaatcgacgatttcgacccgaccgcacagggcaaccggctctattccgtcgggcagtattacaacctgtttgacagcaaggtactctccgtttccgccccgatcacaggcaatatgaatacctacggctacatcgtgattcatatgccaatccagaacattgagacggaacagaatggatttctgaatattgtttacataacatcgagcatcctgttcttcctatccctggtggtgcttctggtatttacaaaagtggtctatttcccactcaaaaagattacggtcgcagccaatgaatatgcagccggaaacctggcacacaatatcccgattaccacccacgacgagatcggctatctcgccagcacattaaactatatgtccagcgagttaaatgaaatggaacaataccagcacaatttcatcgcgaacgtatcacacgatttccgctcgccgctgacctccatcaagggctatctcgaggcgattctcgatggcacaatcccgcaggagctctatcataaatacctgcacatcgtcatttccgaaaccgaacgcctcaacaagctgacccaaggtatgctgacactcaactccctggacagcaaaggatacttaacccgaaccaatttcgatatcaaccggacgatcaaggataccgccgcaaccttcgagggcacgtgtagcgcaaaaggcatcacgtttgacctgacctttgcggatagcatccagatggtctacgccgatctcggaaaaatccagcaggttctctacaacctgatcgacaacgcgatcaaattcagccacgaggattcgatcatttacatccagacctccatccggtatgaaaaaatcttcatttccgtcaaagacaccggcatcggcatcccgaaggacagccagaagaaaatctttgaacgtttctacaagaccgacttatcgcgcggaaaagataaaaaggggaccggactgggtcttgcgattgtcaaagagattattcaggcacatggggaaaatatcgacgttgtcagcaccgagggcgtggggacggaatttattttcagtctgccgaaggcgacggcgctatagcaaattgaaactgtccaatcccttcgcaattacagcaaatcttccatctggcatcccagtgaccgtgcaagcgcacgcacggtttctgcggatgctttttgaatcttcttttttccctgttcatactgctgaatactccgcagcgtaacccccgattgctctgaaagatccttttgggtatatcccgccatcttccggatccgccgcaacgcgtttttcccctgctcttttcttcgaatgattctgtctgccgcctcaacaaatttatcctctggagcttcatgaagtgccggatacatttccacaacctcccggaccggaagccctgcttcaatttccttaaatttcttctcactgtaccactgataatacgccagtatccagccactccaatactctctggaacaggtaaattctacctgcggttccggcagttcgtccttttttcccgcttttcgaagcacttcctccgcaagctccgttccagaaaagccgctcactactcttggtacaccttccccaaatttttctgcatacccggttgtaagaaacaatttccaaaaatcttccagatccatcccacaggcattgaccgcataatctgtcatttcccccagatttctcatcgcatcatccagatattcaatcccataagcgctcatcctcagccgacacctcccctcgaatcaaatcccgcatataaataccgtcgatatcatcctcttccacctttttccggtatgcatttctagcttgctcatccctggctcttcgttttacataatattccactgaatctactccttcataagaaagaaagtgtatcgcctgaaatgccttctgactctttaatacatactgctctcccaattttcccaaccgcatcgcatacgaaagctgctctaacgatatttcattatttacaaacgcccttgcaaatgaaaaatacgaatcatccgcccggtacccaatcaccacatcatatccgtccacatccgggaggaaatgttccagcagccactctcttccccgtttcatgaccgccgaagaaaggcggattttccggtatttcatcaaaatcgccagccaatgaagaacgctgtagtgcttctccatcaaatttaaaatcaaaagaccggtttcatccatttcatactgattcacatagccgtcctcccgctcggcgcacgaccactccttcgccagctccagactctccgtacaataaaagccctgtccgtagtcattatagacctttccctgaccatacataggagtagaaataatttccaaggaaccgtgatataaaatttttctcattctgaggcaacctccttatctattatgggagcaagtagaaacatggggtatataaaaaatagattcgttttaataaaaataactctatagagatatttttattaatattatatctctatagagttatttaatcaatttttatttcagatcttaaaaagatatgccaccttacagtacgcaccttacacaaactgtaactgtcctttcacgatgttttgaattacacctaccgcgcctcttcccccggaaaatgcgcgtcggaccgcttcagaatctcccgtgcggtctttgtctttccaagaccaccaaaggtacaccgcagttccagcggcagcgacagaccgatctcatagattgcaccaattgtctcatccaatgggatcactttgtcatagcctgccagaatcatattggcgctggcgagcgcattgcttccgcccatgatatttttgccgaggcacggccattcaacacggtttccaaccggatcgcaggcaagtcctgtgatgttctggagtcctacagacgccgcatccatacaattttcgatggttccgcccatcatcgccgtgagtgccgccgctgccataccagaaccggcaccgcactctacctgacatcctgctacttccgccgaaaacgtcgcttcctctgcgaaaaagacaccgaccagacccgcaaccagaagcccctgtactaccgtttctctcggaagtgacagcgcccgcgccagtccgatgaccgttcccggcaggcatccgcaggaaccacaggtcggtgccgctacgatcacgcccatggagctcttgctttccatcaccgccgtgatacagcggatgatctcattaacaatcggatccggaatcaggcgtcctgcctgctcggctgctgccaccttgctgacctgctcgcccagaatacggtcctgatatttcgtcccggctaatcccgtctcaaccgcctgttccatgaccgacagaatctgttccatctgatggtaaaccgctttcttcgactgaccgccccgacaggcctcatattccaacgcatactcccaggaatccatcggatgctctttcgcataatcaaccagggcagctgccgtcgaaaatggaacctgacacgtactgctggaatgcgtcggaagcaccggttcaagatagcacgcctgaccgacacccgccacaccgcggacggcttgaatcacctcttttgtcagcggaacagctaatttccaattatataaaatctgaccttccttctgatcgctctggaaaaattcaacatccggcaaaagtgcttctatcttttccctaattcccggtgccacctccgcaatcaccagaagctcatagaaatctccggctatctgcaccgaaaattcctcgtatttctgcatctcgaccataccgccgccgactgcgatcgcctcccaatgcacgacatttccattctggtcccagacctctgcccggtaattgcccggatgctctgccccataatcaaggatccggtattcgatctccaatccccgttctttcgcaatcgcctcatactgtgcgacatccggcgcatccagctccatattcaaaagcccgctggcaaatcccatatccgttccgtgtcccgtgtgcgatgccgccagcgcaccattgacatcaaaatcaacaatcgcttttttcaccggtgcatccagagattgccggatcatggaggcgatccgcgccgcccccgccacatgggaactggaaggtccgcgcatcaccggaccgagtacatcattgaagatactgcagggtagtttttccatggtttgtcctcctttttgtatcaatcattccatgttttttattcatcatttttgattcgtgtttttgtaaaggaaaagggaacgtccaacttcaacgtcccctctcgtttctatcgtcccattaaaataaatggaattctggatactaccggaacattcgtaataatcgctaatgctgccagcatcgctaccaggaatggtattgcatttcgaaccgtatctccaaatttacatcttgcaatattggttgccgtgtataagcagacacctaccggcggagttgccagaccgatggtcaggttcaggcagacaatcataccagtctgaatcgggtcaacgcccaggcttgccatcgccggtgccagaatcggcgctaccagcatgattgccggagcactatccataaacataccaacaaccagaagaaccagattgaccagtaacagtttcactgctaaagaagtatgaagaccaaccagcatattcgttacagaaactgcccatctctcattggagataacccatccaaacagatagcagccgccgacaatcagcataaccgtaccactgtcgatcgcgctgtcgataatcgatttccagagctctttccagccaacggtccggtatacaaatgccgacaaaatcagggaataaagaaccgctgccgccgctgcctcggtcggagtaaagaaaccacccatgataccgccaacaacgatgatcggaagtccgatacatggaagtgcctgtctggttgcttcccatttttccttccagcttgtcttaggacctgctgaaaaatcacgtttcactgcaaatacataaacaaccagcatcatgataatacccatcaggatacccggtactactccggcgataaacatatcgccaacggataccttcgctgccgcaccgtaaataacgaatgccagactcggtgggataatcgggcagcagcaggatgcacacgcggtcagacctgctgtaaacgccggatcatacttttcatccttcattgccggaatcatcaggcatccaactgccgccgtaccagctaccgccgagcctgaaactgtaccaaacatcatacataccaggatgtctaccatcgccaggccacccttgatatgtccaacgaatgcctgtgcgaaacgaaccagacgcatggtaataccgccgtgattcataatatttcctgccagagcgaagaatggaagacaaagcatggtaaaactattaataccatagataattcgctgcggaaccaacgccaggttggcatcaccggtacttaaaagcgcataggagaccgtcgctacgatcaatacaaaagcaatcggaacgcctaatgcaagaaacaagaaaaagcttccaaataaaattatactgctgaacatattgacctcctactcttcatcccccggaagaggaatctttttcgcttccccgtaacatatattttcaagaagctgcacaaatgtataataaatcataatgagaccgctgaccggaagggctgcataaaagagcgccagcgaaaccttgatcgtcgttcccagatgtggaatctgtgcaactgtatagttccaacctgaaattgtaaataaaacaagtgcaaataataaaatcacatccgccagaaccagcataaactgacgtgtttttccatggcacaagttaattaccatgtcaacaccgatatgaagcagatgacggcttgctacggcactgccaagcatcgtggtccaaacgaagatataacaggagaactccgttgcccatggcatcgtagctccaaaccatcgcaaaataaactggccgattaccgcgatacataaagcaattgacgtaacccctaatgcaactctggcaaccgtattgatcacgtcgccaatcttgtgaagtttttcaatcaatcctgtcatttttctcccctctttgtaaatgtactcccgaaaacaggctccgggagtacatgatagttcaaaaattattgtactttatttcgctgcgcgaaccatctcaaccagaccttcccaggtcggatgtgccgcgtacattttatcatataccggagcaactttttctttccatgcatcaatatcagtcggacgtgttacggtataacctttttcttcatactcagcaatctttgcctcgtcattttccaggaaccaagctctctgctcttcgcctgcttttatagctgactctttcacgagtttctggtcttcttcgcttaaaccctcataccattttgaagaagcaacaatgataccgctggaatagtaatgatgaatatcgcagatattattaacaacctcaatataaccatctgctactgcatataatgcactattgtctgttccatctacaacgccattctgaagtcctgtgaactgctcgccagatgccaatgcaaccggtgtagcaccaagtgcttcgtaggttgccacgcaaacttcattctgcatggttctcatacgaacgcccttcatatcatctacggtattaattgtcttatctttagtcaggatatttctccagccatcctcatggaaaccaagtcctgtaattccatcaaccgcgcttaactgttccagaagggaattgccaaattctccctccagcgctttattgacattatcctcatcctcaaacaggaatggaagctcaaaaatgcctaaatctggtacaaatccgcccagtgcaccagttcctacccagccgatttccaggttattattctgaaccatctcaacacactcaacctcgtcggttgtcatatcgcctgcataaacctctactttaatccgtccgttgctgccctcctcgaccagctttttaaaagcattcgcaccgtaatcatacggagaaccggttccacatacatgtgctacacggatcgtcatctccgctccggaagtatctacgctggaaccactatctgctgcttcggttccggctgcagatgcggatgaagaagaatttccgcctgaacaccccgccattgccatcgctccgattaccaatgccatcgtaccgcaaagccatctctttttcataaagtatcctcctttatactgtttttatgtgaactcccgaggtacttctttccctcagaagtacctccctgtacctttaaactcttattttgtttctatcaatttagcctaataagaaaccttccgggaatggatcgtccggatcgaataaccatgtactctctcccatcacaaacgcccgtccgctgatctccggtactactgccggaattcctgccacctctgtctcttcaacgatatggcagtggaataaacttccaatcaggctctcatgcacaaacggctgtccgactgccagctttccttccgcatgaagaagtgccatcttcgctgatgtaccggttccgcaagggcttcggtcaatcgctgccgggggaatgacaactgcattttttacatccgaaaccccttctgtacccggttcgaaaaattccacatgcgttacctggttcatgatttccagatacggatgcttgactgttacctgctcattgataaactttttaagataatttcctttttcgacaatctcttttgcattttctttatccagctttaagcccattgccgatgccggtactaacgcaaatacatttccgccgtatgcgatgtctaacggaatctcaccatatccaggaacctgtacctttacatcccgattcatcacaaatgccggggcatttttaaaggatacccgcaccgccttgccatctttcacctcaattttcacttttaccagtccagatggtgtatctaaggtcgcatatgtatacggttcctccgcttttaagagtccgctttcaatcagtgccgttgaaactccgatcgtatcatgtccgcacatcggcatccagtttccaacctcgtaatataaaacaccaaaatctgcctccggattgcacggcttggtaacaatcgttccggacattacgtcatttccacgcggttcaaaacaaattgcttttctcatccagtcctgttcctgcatcatatagagcatcttttcttccatcgtgttccccggaatttccggaaatcccgataaaatggttcgggttggctctccctctgtatgtgtctcgatacaggttactgcctttctccccttaatctcctgcaaacaaaattcattctttttttccataggctcctccgtattaaaaattttgtccgttctctttcagttttctgaaatctcgttgttaaaatcatatcatgatgaaaactttcaaaaaacatcatttttaatacaaagttttttgtgttttggttattatgatgcatgacgtcagttaacggtagatactttcggttctatcatagtatacttttggatactttttctattttcaaagtttttccacttgcaataatcataacaacattttattatgctttatatattatcagtctattaaaaatagtttaaaacaatagttggactatagtctagtattgattccattttgttttcactaattgaatactcacgggaaaggaggcatcttcatgagtgctgaaaatctttttacaacatcacgaattgaaaacgtcaatcagatcattgctgaactttacgacgattcaattcttcttgaaaaacggatggagagttttttcctgaacctgaacaatattgttttctttgaaaaagcaaattttttgttttaccaaaagcagggacagaattacaaaacccattccatctacaccatcaactggaatgatgaacagaaacggcgatatcaggaagaatactgccatatggatgatgttctgtcgattctggactccgacagcaatgtaactttcctgactaaccagctgttcaatcaggaggttcgaaaaaattctctttattttcaggaatttctacttcccatggggctgcatgattccattgaaacgaatttttcgattcggaaccgggagctgcggggtgtgttttccatccaccgatccaacgataaaaaaaatttcctgccagatgaattaagccttgtccggttattccagccgcatttctgcaacgtatttaaaaattacgggcgggagctcaacatcggacgggcatttcatgtactggaaaattacaactgcatcggaatcggctgttttgacgataaactgaattttatcgggtgcaacacaacctaccatacatacatggagaatcatggatttgcagatttatccaacaaccccatttccaattgttttcgctctctttgccgtcagctgctccgttctggaagcattaccggacaaaatatcgaatacaagatggaaaacagccctttgtttctggaggtaagccgctcccatcttaaggagggaccagacaacgactgctttgtatgtctgttcttcgatttatcctatgtgatggatcgtactctttcccagatcagccgggatttttccctgacgaaccgagaagtaaatgttttaagccttttactgcgcggctattccaacgatcagatatcttccaccctcttcgtcagcatccctactgtcaaaaagcatctggcttccatttattccaaaatggaaatcaaaagccagaagcaaattctggaacgccttcatttctacgacaaatatttttcgcattaatcttgtttaaccacgaaaaaagggagtccgctcatcctgcagactccctttttcgtgcccctttttactctagctttcctccttgctcttcctgggtttctcttttttcgttcttgatctcccaatgaatcaaaaatgtaagcattgcccgaaggacaatgatggctcccaaaattccaagttccgaccattcccgtaccacaaccgtcctgagtacctcgccgcccatcttaaattccaacgccagcgcaattccctgtgccagattcaggcggatcagctgacgcttgtttcgtatccactgaacaaagcaggataccgctgtcgaaaccagcacaatgattccaaacaattctagcacgaccgtgcatatctgtaccaaattctctaacaaccagtctaatactttaattacttctcccattaccccttcctttccaggtattcttcccttctcgcttgtgctaattttatccatttcctgtagctcagtaaatgcgtaaacctactgaaccgctacaattttctttactatacacgccccatttcaaatatgcaacttgatttttattctgttttcatcttgacaatgaaacgtgaaactgctacaatccagctatgcaaaccacatttgatttgtgataaatctatttttagtatatatgttttatttcattcataaatattcaggaggttttgatatgttatttctcagcgaacaagaaatgtggcagtccgtcaccttagaggatgtcatggacgcgatcgaagatgcgtatgcgattcacaaaagcggcaattataagatgccggatcgttttatcgcacagcgtgataaaaatatgatgctctatatgccgtgttttctggattccgtcatcggtacaaagatgttatccgaatttccggacaattcctctctgggaattccgtatctgaacggacttatgattttaaataacgcaaagaccggtctgccgaaggcgattatgaacggaagtgtcctgaccgcaatgcggaccggtgcggtcggcggtgtcgcactgcgctatctggctccagaggatgctgcctcagttggtttggttggctgcggtatgcagggactacaccagcttctctatgcctgcgaggtgcgcccgatcacagatatttatctgtatgacgcatacgctaaggatctttccggctttatcgagcgcttatcggcgcgtctggcatcgtttggaaaaaacgacatccagattcatacctgcgcggatacccgtgaactggctgagcacagccgcgtcctgatctccgccacccaggcggtcgatccggtctacccggatgatgaagagctgcttcgcggcaaatgctttgttgccatcggctcctggcgtccggaacggcgcgaactgccggatgcggtgtggaaactcgtcaagaacgcgtacaccgagcttccgtatgcctgcgaggagagcggcgatctgaaaattccgctggaaaagggcgttctgacacagaagcgcgtccactttatcgaggatctgatcgaagataccaagcagggacatccgcatgagcagaacgagacccgctgctttaaatcagtcggcatgggactctttgatgtgcggacggcacagcttatctatgaaaaagcattggaaaaaggaattggacaaaaacttaatttctaggaaaaatggttggaatagaaaaggctgtatcacctaccgcgcgcttccatgcggcaggcaatacagcctttttcttattgttatatgtgcattaattttccagcatttttctgaatctatagactggcaaatttttcgctccatattcttctctacttatttatataacggatacttctcacacagtttcgtcacttccgcacggatgtaatctgccttgttctcgaagtcggtagctgccagccagatgcactctgcaatcacttccatgtcctcttctttcagtccacgggtggtaacagccggagtaccgatgcggacgccagaagtaacaaacgggcttctcgggtcgtttggaacggtatttttgttcagggtaatgtatacttcatcgcagcggttctgcagctctttaccggaaatatccatgccgcgcagatcaactaacatcaggtggttatcggttccgccggtcagaatcttgaatccctgcttctgaagtgcggctgccagcgctgctgcattcttctttacctgaagctgatactctttaaattctggcttcagcgcctcgccgaagcagactgccttgccagcgatgatgtgctctaacggaccgccctgggttcccgggaagatcgccttgttgaagttgaacttctcagctgcttccttatttgccagaatcagaccgcctctcggtccgcgcagtgtcttatgtgtggttgtcgtaacaacatctgcatacggaatcgggctctggtgaagaccggctgctaccagaccagcgatatgagccatatcgaccatcaggtatgcgcctactttgtctgcaatttcacggaaacgtttgaaatcaatctctcttgcataggcacttgcacctgcaatgatcagcttcggttttgcttccagtgcaatgcgctctacctcttcgtaatcaatcacgccattgtcatcgacaccatacggcacaatgttgaaatataaaccggagaaattgacagggcttccgtgtgtcagatgtccgccgtgatccaggttcatgcccataacagtatcacccggtttcagcattgcgataaataccgccatgtttgcctgcgcgccggaatgcggctgtacgtttgcataatcacagccaaacagttttttcgctctctcgatcgcgatggactctacaacatcgacacactggcatccgccgtagtaacgttttcccggatatccctccgcatatttgttggttaataccgatcccatcgccatcataaccggctccgatacaatattctccgacgcgatcagctccaggtttcttctctgacgggctgcctctgcttcaatggcttctcccacttccgggtctgcctctgtaatgaacttcattacctcatctaccatgtctgtttctcctattctttttctgtcatccatacaaaatcatcaagtggatttttcatatataaatataaaaaccactcttttgtctctccggattttttatttaaaaaagcctttttcaagtctcattaaatacgctcactatttcgcaattttttgaatttctctgctcatttacttcgccatctgccaaaagcaaacaagctcattctgtcaccagacgcttcttatgccagtagcgcttccgccatctgctccagcgacggaatatcgctctccttgagcgccccgcgaaccgtaacgaccggttcaaccaccgtgatctccttcatcgcatccagcattcccttcatcgtgcgcgctgcactcggcgcccaggaaccgttttcaatcagggcaacggtgcgtttctggtaattcttgctctgtaagtggtgcaggaaatctgccataaccggcatcacacccgcgtcataggacggtgctgccaatacaatttttccataccggaatgcatcttccagcgcctccgccatatcaccgcgcgccagatccgcgattgccactttcgggcattcttttttctcaagaatttccttgcatttcttcgccgcatcctcggtgttgccatgcagggacgcatatgcgataaatacaccctcagactcgacgccgtagctgctccaaatctggtatttttcaagcacatgaccgatcgtctctttcagaaccggtccatgcagcgggcagatgatctggatctcaagaccggcttctttcttaagaagtgcctgcacctgcattccatattttcctacaatattgaaataataccgtctcgcctcgcagtcccagtcctcatccacatcaagcgcaccgaacttgccgaaaccgtcggcgctgaacagcaccttgtcgcaggaatcatagcttaccataacctccggccagtgtaccatcggtgccatgacgaacgtcagctcatggcgccccagtttcagggtatcgccctccttgaccgtcagcgcacggctggtatcaagatcaaagtacagtttcagcatcggaaatgtcttcgcattgcctaccaatgtgatttccggataccgttctacgactgcctggatacttgatgcatgatccggctccatgtggctgattaccagataatccggggttcttccagccagtgcggtttccagattttccagaaattccgtctgtttgcgcttgtctaccgtatccatgatcgcgatcttttcatccataatcacgtatgagttatatgaaataccatttggcacctgatactgcccctcaaataagtcaatgtcatggtcgtttacaccgatgtagcgaatatcttctgtgatcatctcctgcttcctcctgttcttttcgcagctgctccatctctttacagctgcctctttttgttctcacaggcatctcgcatcctgctgtcagcctgccttatgatttcatccgttacctctgactgactctgaatcagtctttctcctcaatcgccataatcatatccacgcgtctctgatggcgtccgccctcaaattctgcgttgatccactcgtcaacgatcatcttcgcaagctcacttcctaccacgcgggcgccgaagcagagtacattggcatcgttgtggcggcgggacatcaccgctgtgtacggctcgctgcatacgcaggcgcgcacgccttttaccttgttagctgccagtgaaataccaagaccggtaccgcagattgcgatacccagatcggcttcgccggaaacaactgcacgacctaccttctctccataaactggataatcacagctctcgctgctgtctgtacccagatttaacacttcgattcctttttctttcaggaaatccacaataatgttcttcagttctaccgccgaatggtcatttccaatcgcaattttcatctcatcttctcctcatctgactgacttccggaacaaatgatatagtccggtcattatgaaatcattttagtaaagttgccgggcaatgtcaagactatgaaaatctcagaaatatataaaaagagcgcagaggaagctctttcgcacttctccgcgccctattgtttcttctatataatagttataaatccgccgtaagacgttttccgcttacgcgctatggacagccgaagccgtcagcttgccatccgaaagcccgatctctatcgtatcgcccgcacggacgccgtccgccagaatcagcttcgctgccagtgtctcgacgttcttctgcaggtaccgtttcagcggtcttgcaccgtaaaccggatcgtagccattttcaatgatgaaatcctttgcctcgtccgtcagggcaatctttaactccttatccgccagacgtttgttgacatctgcaatcagaagctcaatgatgcctccgatgttgcctttcgtcagcggcttaaagagaataatctcatccagacggttcaggaactcaggacggaagtgagctctcaagtcatgcataacggagctttccgcctccggcttgatctgtcccttttcatcgatgccgtccagcagatactgggaaccgatgttggaggtcataatcaggatcgtattcttgaaatcgacagttttgccggtcgaatccgtgatacgtccatcatccagaacctgcagcaggacgttaaatacatccgggtgcgctttctcaacctcatcgaagaggacaacagaatacggtttgcgccgtactgcctcggtcagctgaccgccctcgtcatatccgacatatcctggcggcgctccgatcagacgggaaacggaatgtttctccatgtattcactcatatcgatacgaaccatgttgttctcatcatcaaacaatgcctccgccagcgcttttgcaagctctgtcttgccgacaccggtcggacctaggaacaggaacgaaccgattggtttcgtcggatccttgatgcccgctttggaacgaataatcgcctccgttaccttggtaacgccctcatcctgtccgatgacacgtttatgcagcagttcgtccatatgcagggtcttgctgcgctcgctctcggtcagtttggcaaccggaataccggtccacttcgaaataatccgggcaatctcatcctcggtgacactctcatgtaccagactgagatcctgatttttcactttctcttcctcttccgccaactgtttctgcagttccggcagcttgccgtactggagttcagccgctttgtttaggtcatatgcctgctgcgctgcctgaatctcgccatttacatgctcaatctcttcacgcagtttggacagcttatcaacggaagatttttcattctcccactgggctttctgggtcgaaaagctgctcttgagctctgccagttctttctgcagttctgccaggcgatcctgacttaagcggtcagtctctttcttaagcgcagcctcttcaatctgcagctgcatgatacgtctcgacagttcatccagctccgccggcattgaatccatctctgtcttgatcatcgcgcacgcttcatcaaccaggtcgatcgccttatccggaaggaaacgatccgtgatataacgatccgagaggattgccgccgatacaagcgcagagtcggtaatcttgaccccgtggtaaacctcatatctctctttcagaccacgcagaatggaaatcgtatcttccacggtcggctcatcaacgtgaaccggctggaaacgacgttccagagctgcgtctttttcgatgtatttacggtactcatccagggtcgtcgcaccgatacagtgcagttcacctctcgccagcatcggcttcagcatattcccggcgtccatcgcgccctcggatttgcccgcgccgacgatcgtatgcagctcatcgataaacagaataatctgtccctcgctcttcttgacctcgtcaagcaccgctttcagtctctcttcgaactcgccgcggtacttcgcgcccgccatcagagcgcccatatccagggcaaacaatttcttgtccttcaagccctccgggacatcgccgcgcacgatacgctgtgccagtccttcgacaacggctgtcttaccgacgccaggttcaccaatcagaaccgggttgtttttcgtctttctggagagaatcataaccacgttacggatctcaccgtcacggccgatgaccggatcgagcttctgatctctcgcacgttccaccagatcgtaaccgtatttatttaaagtgtcatacgttgcctccggattatcgctgacaacacgctggttgccgcgcactgtcgaaagcgcctgcaaaaagctctctttcgtaatgccgtagagacggaacagttccttgaccgccttattcggctgttttaacatcgccagaaataagtgctcgacggaaacatactcgtcccccatcgccttggcttcgtcctccgcgttcaccagcaccttgttggcatcgttggagaaatacacctgaccgccggataccttcggcagctttccaatcgcctgctgcacctcatcacggaactggtcgcccgagattcccatctttgttattaatttaaaaatcaagctgtcttccacagtcaaaagactgtacagcaaatgttcctgatcaatctgctggtttccatattcatacgccagcttttccgtattttgaacggcttccagagacttctgggtaaatttactgatattcataaacctgcctcctttcgaacaatctgtgaaaaccttttggtctccttttgttctagcagtaatataacacttgttgttagcactgtcaagagtagagtgctaattttctgtgaagaatttgtgaaaactttttttttaaaattttcatgtaagcatatctttcttgctgatttacctgttttatgttacatttattatcaacaactcgatctgttttttaactataaaccctgcatttacatgaaagttgaatctaacttatgaatcatccatccaacgaaaatatcccatcaagaagcttttcttatcatgcctttaactttacctttttgcttcttctggcagtatttttcatttccttatacaccgttgcactgctgaaaagcaacagccgcatcaccctgagcgccgccgtagaacggaatatttcctgttcggacgcggttcaccgggcgatatcgagccggctgacgcgggcagattttgaacagatcaacacaaaatccgatatgagctccgcgcagtatcgaagcctgcagtcttatttaaatgagcttcgcagcctcaattcgacgcgctacttatacactgccaagcgtggaccgggcggaaaacctatctacctgatcgatggcctggatctggaagcacctgattttgcttatccgggcacctacctggaagaggaaatggttccgtatctggaagctgccctctccggcaaaacgatccactcacaaaagatcattgataccacatgggggcatatttttaccgcctgctatccggtcattgcctccgacggaaccaatgacattctcggtgccctctgtatcgagattgatatggaagacacttaccgatcgattgaggcgatcaaccgttcctcctttggaatcgccgctgccgcgagcatgatagcacttctgctaattgttatttcctatttttatacaaagaaacagaagtccagagaactcacccagcagcagctgctggaacagaccgcaaaagcagcagaggcagccaacaaggcgaaatcgaccttcctgttcaatatgtcgcatgatatccggacaccgatgaatgcgatcctcggttacgcagaacttgccagaaaccatctgcaggaaccggaaaaaatcggtgaatatatggacaagatccatatttccggtgaaaagatgctctctatcatcaacaatattcttcagttttcacagattgagaataaccagatacacattgaagaaacctccgtccagactgagaaaagttttgattcctgtatcgtcatggtccagactgccctggaagaaaaacagcagcattttcatgtgaccaaggacatttcgtacccatatatctacattgacacgacgtatatgtccgaaattgtattgaatattttgagcaatgcgatcaaatatactgccaagggcgggacgatctcctgtgctctccgccaggagcctggtgaaacggacggctggtgtatcacagaaatcgcaatcaccgataccggcatcggcatttccgaggaattccagtcgcatatttttgaatcattttcacgggagcgttcttccaccgtcagcggcattgaaggcaccgggcttggcatgggaatcgtgaaaaatctggtggatctgatgcatggaacgatcgaggtaaagagcaagctcggagaaggttcaacgtttaccgtccggatcccatgccggatttcctcgcaggaggaaacagagcctaccgcattcgatgaaacagctgcccagactctatccggctgccggattcttcttgcggaggataatgatctgaacgccgaaatttccatcgaacttttgacccgcgaggggcttttggtcgaacggtcaaatgacggggttgcctgcctggaaatgctgcaaaaagcgccggaagattattatgatttgattctgatggatatccagatgccgatcatggacggctacaaggcaacgcgggcgatccggcggttttcggataagaagaaggctggcattccgatcgttgcgatgacagcgaatgcatttacagaggataaagagcgggcgctggaatccggaatgaatgatcatgtggcgaagccgattgatatgaaggtgctgatgagtgtgctggatgagcagatttgtgggcataaaagtttataaatgatgaaaaacggcacaccgcattctcatcactaagtaacgagaatgcggtgtgccgttcttcaaatcctattttgtaaaatatttctctttaataatctccaccggcatctgctgtcctgtccagagttcaaaggatgcagctccctgatagagaagcatgtacataccgttgctggtcttgcagcctgccgctcttgcttcgcgcagtaaacgggtctcctgaggattgtagatgacatcgaatacgaacaggtctttgtggaacatcgttgtatcagtaatgatcgtgttgtctgtcttcggagccatgccgacggaagtaccatttaccagaatcgcgctgtctgcgatggactggcgcaggatctccggatcggagtaatcatgcagggttaccttgcaccctgtgcgctcgttcagtttctttacaatctcctcggctctcggatagaacgcgtccttgacgttaaatacgttaatttctgccacgccgtctaaagctgcctgtacaagaatcgcggttgcggcgccgccagcgcctaaaagcgtcattttcttgccaatgatgtctacaccattttctgcaactgcacgcataaatccgacgccatcggtcgtataagcagtcagaacaccgtcgtcgttgacaatcgtattgcaggcgccggaaatctcggaagccggtgaaaccttgtctgccaacttgcacatgatatttttgcccggcatcgtgatattccagccgcgcgcgcccatcgtccgcagtccctcaaccgcctgcggcatcttctcttccggcacatcaaacgccagatatgtataatccagacccaactggctgcacgcctcgttgtgcatctccggcgaaacactgtgtgcgaccgggcttcccagtaaacaaagtaaacctgtgtgccctgtgatatgattcgacatcttttttcccctttcgttttctctgtcagaactttctgagcagtcacattatttaaacttcttcacctgtgcaatgatctcctcgcagatctcattcgctgattttccatcggtcgcgatcacaatatccgctgccgcttcatacgccggtctgcgcttctccatcagttcggaaacatattccactgtcttattattttccagaagcggacggtcatggttctctttgacacgctccagaatcgtctccggcttcgcggtcagaagtataaccttgccgctctttcgcatctcctgtacattgacctcgcgcatcgctacgccgccgccgcaggatacaatcttgttcttctcgtttcctacctctttaagcaggtttgtctcctcgttgcggaaatatgcctcgccgtgcagatcgaagatctcggaaatgctcatgttgttctttttcgcgatcatttcatccatttccaccacatccatcgcaaaggtattctgcagtgcattcgaaacggtgctctttccgactcccataaatccgatcaggaaaatattgaatccaaacaactcatgggactggatccgtttgctccggtagaggacgctgtcgtaaactgccatgattgactttttgtattcataatcatccagcttcgcaagcatcttgctcttcttgcgctcttcctcctctgcctgataaatcggaagtccgtttttctgtttataatttgtaatctcctggataatctggcagcgcatccgcagggcgtcgatcagaatctcgtcgcacatgtccagatcatttcgcagcttctttaattcatccatctgtctcatccttctccacttgtattcattcagatcacttttgcactttacattgaaagtgtgttttattattatacccgaatcaggatatgaacgcaagtgctaatgcggaatagcaggtataactgtgggggataggtgttgctgttcgagctatatttttattagattcccagcttctccttcatgtaatccaccggtgttgattttcctgtatacagttcaatcgcgatcagcgcctggaacagcatcatgctcataccgttgtatacacgggtgcagccagcttctttggcctgcttcatcatcacggtctcacgcggtgcatataccgtatcagttacgatcagatccttgcggaaataggacggatccgggatattggacagatcctccagcgggtgcataccaacgccggttgcatcacagaaaatgtctgcttcgtgcattttctcttttaagagtgccagatcgcccaggtcatgcatctcggccttgcagttagagttcttgttgatgatgtcaacgatctcctcgccgcgtgcatagaacttatctttgatattgaagatatgcagctctgcaatgccgtccagtgcgccgcgtactgcaatggcggttgctgcgccgccggtaccgatgagaaccatcttcattcccttgaaatcaataccttcttccttgattccctgccagtagcccataccgtcggtgttgtaacccttcaggtatccggttacattgccgtctttgtcacgggtgttgactacagtgttgatcgcgccgcacagctttgcagcctcgtctacctcatccagatatttgtgaacgacggtcttgttcggcatggagatgttggaacccagcatcttcagcgcacggatactctcaaccgctgcttccagggtatcgttgtctacctcgaacgcaagctggataacatcgtcgccattcttgtcataggcaaggttgtgggtagtcggagactgtgtatgacggatcgggtaagccattaatcctactaattcggtatgtcctgtaatgtttggcatgataatttcctcttttcttctctattttttataatcaaataaaacgatatcattcgttcagcgaacagtcagaatctttcaaatgcgatattcaatttcttactccaacggtgccagctctaaaaatcctctcgcttccagcacgttcagaatcgcacgtccttccatcgttccctccatgatacggcgggcgcggacggaatctccgatcgggtaaatgaatgtatctgtgttgtcaaatgcctcttcgagctgtgccagaatcggattgttggcgcgcattcccaggcagttgaaaccgaggtcaaagttcagatcctcgatcgtgccatccggcagcttcacggtaaatgcgttttctttgacttcctgcagtgcagtattcacatactctttcacatcatatttgtcgtgtgtctcacgcatggaacatttcgtgatcggatctgccagcataccaatctgcgggagcatatccacgatggtacacgccgcgccgcgcggtgcgaaatactccacaacatccagaccaacggagccgccgccgactacaaccacttttttgcccttgcagaaatcatccgggtattctccggcctttactttctgaatcatctcgaaaatggtatcgacatgaccggctgcgatgttttccttgagtcccttgatcggcggaacgactggaacggaaccggttgcgttgacaatgatatccggcttgaactgtttgatcttgtccacggttgcctcgcagttcaggaaaacatacaggtttttcagtctcttcgcacgtgcttccagatatttcgggaagtctttcatacggttcttgcttggcaggtcggagatgaaggtggaaagtccgcctaatttaccactcttttctaataagaatacgttgcatccaacctcggctgccgtgcaggctgcttccaggccggctgtaccgccgccgactacaactacgttgcagtttttattgactttcagtttcttgtagatatcgccctccggaacagccgggttgacggtacagcggatcgggcggttgacgccgattcggttgcccgcacagccgacgttacaggagatacatttacgtagaatctcctcctcgccgttctgcaccttgctgacccagttcggctctgcaatgagtccgcgtcccatgccgacaatatcgacatcgccgctctccaatactttctcaacgacctccggatcgcggtagttgcccgcattgataaccggtttaccaaatttatccttcacggctcttgccatgtaggaacgccagccatccggcaggaagttcgagtcaatctgatactgtaaggacgggttcagaccgcaggatacatcgtacatatctacgtactcatccagatattcgaggtactccagtgtgtcttccagcgtgttgccgcccggcacgcgctcttccgcagagatacggacgatgatcgggaaccacggacctacatttttccgcacctcttccagaaccatcttcgggaaacggagacgattctcgacggagccgccgaattcatcggttcttttgttgtaatacggggaaataaactgactcatcagataagaatgaccgcagtggatctcaatcgcatcaaatccgatcgcctgtacacgttttgccgcctcgccgtatttttttacggtcgtcaggatctcttcctttgtcatcggacgcggaatctcgccgcctgccttggtcgggatattggaggaggacaccgtctccataccggttctggcagaggatgcagaagcacccgcatggttgacctgaatcgctaccatcgcgccattcttatgaagattctcgactaactgatagtaacgcggcataaagctgtcgtgatcgatgcggatctggcttgtgccattggaaccaaccggatattcaatattggcattctccagaataatcagaccagttcctcccttggcacgcagggaataataattcatatggcggttgctcatctcaccgctcgtctcgccatagttagtacccatcggcgtcatggctacacggtttttgattgtcatgcgcttaatggtaatcggttcaaaaattttcgggtatttgctcttcatgatgaaattctccttctccattgcatgagaggcatccctgtgtttgtgacacttttatcataaccgttttgcttaaaaattaacaatatctttcaggtaaattttcaatacgtttttgctatcggtttcccgttccgcctgcagaccatcctgacgcgcctgctgtttcatatattcaataaagcgttccaccgccggaagccggtagcgttctttcatccagaacataaaaatctggtgataaatgtccaaattttcaatcgggtgaatgcagactccctgagaaagctccagaatgtccgtgcgcggcatcagtgcgatgccaaaactctcccgcaccagtgcgacgatcgaatattcgtccggacactccacaatgatgtccggctggatgttgtatttcgcatagagcgcgcgggtgcgcgtccccatccaggagtccttatcatatccaattaccggataccggttcagctccgcaaatggaattctctcccgttccgccagcggatgatccttcggtgtgatgataacaagcttctggttcgccaccgggaaaaattccatatcatccttttccagacagccgccaaagcctacatctaattcacccgtttttaccttttttgcaatcgccggtgtgtgattctgccagaaattaaacacaaccttttgattttccggctgttctaaaaagagcttgacccggtgcgggatatagtggccggccagcggaaacacgtaaccgatgtcgatctttcccccatccatcgaaatctcccgcattttcccgaccgcgatgtggcagtctgtgagaatccggtccgcgtactccaaaaacatcctccccgccttcgtcagggtcaccccgcgtccttctttttcaaagagcgtcacgcccagctcattttccagtgatgccattgaccggctcaaggatggctgtgatatatataattcctccgccgcctgatgataattttccagattcgctatcttctgaaaatataaaatctgattcaatgtcattcctaacgtcccccgtctttatgtatcttcgtattaactcttcgcaatatcagccgtaaatgcatcacaccaaacttccataatcgttactgttcacgcatacgtgcccagtaacggaatttgccgtggcttcgcatttaaatacggcaaattcctgctgccaccacgttttcttacggcactttcggttccaaaagtgcctacccgtgaacagtaacccataatcatatttataacacattaatgcttaaaatgcattggttttttgctataaaagtattagacttcggctataataattattagaataaaggcatcaaacgtgttatttttctaacactaaaacagaactttttatatcggcatctcctttgtgtttgtgacagaacatcagccatcatccgcccggtttccgaaacggcagcccgacaggcggatcttgaattaaggagaaaatcatgaacaagaaatatctgccaagtgcacttatcatgtacttaaactactttatccatggcgtcggctgttcgattctcggacaggcagtcatcaaggaagcgcttgccgcagcctggggcgttgaggcaatggcgatcaccgcgatttccgctgctttaggactcgggcgtctgattgcacttccatttgccggaccactttccgacaaactgggacgccgcatctcaaccgcgatcggcagcgcctcctacgcagtttacctgattggacttgctttcgcattcagcgccggacaaaacggcggctatcaaatcgcttatgtatgtgcaatcatcggaggtatctccaattcgttccttgataccggtatctatccggcggttgccgagattatcagcagcgctccgggtgtcgctaccatgggaatcaaatttttcattgcgatcgcgcagatgcttctgccgttcgtactcggtgttgctgtgacaaccaccgccaccggcatggtatcttacaatccgttatttatcggatgcggtattatttacgctgttttatttgtatttattttcctgttccctctgccagattctgagcagaaggcagagggcaaatccgagggactcatcgccagcttaaaacacacaaatttttcgtttgagtccatcgccatgatcgtgattggtttcacctgcaccggtaccttccagttatggttaaactgcgcgcagaacttcgcaaaagaaaatgcaggctgggcgaacccgtccatcatgcaaacctactattccgcaggtaccctgatggcgctcgttgtcacctccctgctgacccgtaaaatcaaggatgtacgtttcatcctcgtttacccggttatctgcctcgttactttggttgccgtactcatcggtcacagccagacccttatgattgcaggcgctttcatcatcggctgggcaggcgcgggcggtctgttacagattgtaacctccgtctgcaacatgctgttcccgaagatcaagggaaccgtaaccgcactggttatgattgcttcttccttatgtaattacacaattttgactgccgcttccaaaatggcaccatcccatgttatgataatgaatatcgtactgactgccatcggcgttctcttgggactctttgtcaatgcccgctacgcgaaaatggtgtctctggcagaaagcgacgaataaatatttattgataaaatgaaaggattctctgattatgaatactatcaaagttagaaatatcgaaatcggctccggcacaccgaagatcatcgttccgatcgtaggcgttaccaaacaggaaatcatcgacgaggcaaaaacgtttgattctattccggttgatgtggtagaatggcgtgcagactggttcgagggtgtctttgattttgagaaggtagaagacgtcttaaaggaactgcgtgccgttctcggcgagactccgattctgatgactttccgtacctccaaagagggcggcgagaaatccatcgagccggaagattacgcaaagctgaacatcaaggcagctcagaccggctatgtcgatttcattgacgtagagatctttaccggcgacgcgattgtaaccaagatcatagacggtgcacatgctgctggcgtgaaagtcatcgcttccaaccatgacttccacaagacgccggagaaatccgacatcatctaccgcctgcgtaagatgcaggatatgaatgcagatatcccgaagatcgcagttatgccgcagaacaagaaagatgttttaacgcttctctctgccaccgaggaaatgacttccctctatgcggaccgtccaatcattaccatgtcgatggctggcaccggcgttatcagccgtctctgcggcgaggtatttggttcttccatgaccttcggcgctgccaagaaggcatccgcaccgggtcagatgggcgtaaaggatctggagactgtactgggactgcttcacagtgcgatgtaatatctggcttatccagttattcggttactgttcacgctaacgtgcccagtaactgaatttgccgtggcttcgcatttaaatacggcaaattccagctgccaccacgctatcttacggcactttcggttccaaaagtgcctatattatacttttagccacctatttttttactcccggaaatccctgtgcctgcgggtacgtgggaattctccgcgaggcactcaagacctgctacctccatcgcaggtctattattgttatcaagcggcacatccgttttcaaacgtgcctgcataaacagcaacctattatccgtatttacaaggggattattcatgaaaaaaacacttcactggctggatgaaaacctggaagaatttctgctggttgtcatgctggctgcgatgacactcattatgggaatccagatattttcccgctacgcgcttgggcagtctctgtcctggtccgaggaggttacccgttttctctttatctggagcggttttttaagcgtcagctattgcagcaaaaagtgcctgtctatcaagatcgaacagttcgtcgctgcctttccacgcagaggtaaggctctttttaaggttgtcaaccacacctttgagctgatttttttcctttatatgatcccatttgcatactcttacatgatgtccgccattcacagcggacagttatcccccgcctgcgggattccgatgtactatattcaggcagcgccgtttgtttcctttcttctggtaacattccgcattctgcagcgctggatcatcgaatttaaggttgcccgcggcgaagatgtctacgatccggcccacccggagcgcaatacaccggaatcctttatccatgcaaatgcagatatgccggaaaaggaatccaatgaaatcgaatctctcatcgaggcaaatacaccatctggaaaggaggaacactgatgcctgctgctctcttatttgttatctttgtcgtgctgcttgtcatcgcaatcccggtatcgatcacgctcggtatcgcctcggttctcccttccgtttttgacccgtccttcacggtcggcgctaagtatctgatccgcgccatgttcggcggactggattcttttcccctgctcgccgtgccgatgttcgtcttatccggcatcatcatggcaaaaggcggtatttccaagaagctgtttgacgtattcgccttctttcttggcaattttaccgccggtatgccatgcgcggtcatcgtgacctgcctcttctacggcgctatctccggctctgccccggcaaccgttgcagccgtcggaagcatgacgatcccgattttaagcgccctcggctatgaccggactttctctaccgcgatcgtggcagtcgcaggcggtctgggcgttatcattccgccgagtatcccgtttatcatgtacggcatggcgtccggtgcctctgtcagcagtctgttcttagccggcgtcattccgggtctgatgattggtctgctcctgatgctgtatgccatctatcactgccggcgttacggcgaagatagagaaaaaatccacgctgaaatccatctgctgcgcgaaaaagggctgttccgggtgctgcgcgaaagctttttcgctctcttaagcccggtcatcatccttggctgtatctacagcggcatcgcctcccccacggaagcagcagttatctccgttttctatgccctgtttgtcagcctgttcctctaccggaccatgaaattccgggatatcccgccgatttttgtggaagcgatccgcacattcacaccgatcctctttattctggcagcttccacggcattttccagagtcctgaccctgatgcaggtgccgcaggcggtcagcaactttatcctggaacatttcaacagcccggtcatgatcctgcttgtcatcaatctgttcctgcttatcgtgggaatggtcatggatacaaccccggcgatcctgattctgaccccgatcctgctcccgatcgtgacagcgatcaacatggatccggtccagttcggtgtgatcatggttgtcaatctggcaatcggcttcgtaaccccgccgatcggcgtcaacctctttgtcgccagctccctgaccgacgtcccgatcatggcgatcgccaaaaaagcgatgccgatgattggcttgtttctggtggcgctgctgcttattacgtttataccggctttgtcgctgggattgttataatgctgaatggacgcttggaaatgttgaagctctgaaagatttcatataacgacctgcttcacgctttcaggctgtgaatggaatatttcacatatgaaatggatatttttaaatttgaaaggatctcccattatgatttatatttcaaacctagtgtcccgccgatgccggacttctttcgttactgttcacgcatacgtgcccagtaacggaatttgccgtggcttcgcatttaaatacggcaaattcctgctgccaccacgttttcttacggcactttcggttccaaaagtgcctacccgtgaacagttaccttctttccgctacgctgcggcgctcatctcctcctcacttcttttattcggcgcttcattcgcactgggtggatgcgcttcgaatcaggaggaacagcgctattcctggccactggcaacggccagcccggaggacacggtaacgcagctgtttgccgaaaaatttgcggaggaagtacatgacttaagcaacggcgcaatgcggattcaggtttacgccaactccacactcggcggtgaccgcgacctgctcgaaacgtgcgcggacggcgatatcccatttgtcgtgcagaacaccgcccctcaggtttctttcatgaaggatctcgccgtttttgaccttccatgcgtctttgattcgctggatgactgccgcaaaaagctggatgatccggatttttacaatctcatcagccaggtgtacaccgacggcggttaccacctgctcggcatggcagatcaaggattccgcatcatgagcacaaataaaccggtttactctctggcggatttcaaagggcagaaaatccgtaccatggaaaacagctatcatctcgcattctggaaagcaatcggcgccaatccgacgccaatgaccttcagcgaggtgtatatcggtctccagcagcacacgatcgacgcgcaggagaacccgtatgaggtcatcgtctccaaccgtctttacgaacagcaggattatgtggtcgagacgaaccacctgccacatctgatctccctgattgtcaatgacgatttcttccagaacctgactccggaagaacaggaaatcatgacgcaggcagccaaaaccgcgaccgagtatgccagagaacagtccgacgcgcgcatctttgaccgtatcgctacgatcgaagcgagcggcaccgcgattttaactctctcggatgaaacgcgcgatgccatccgggaggcggctggaagcgtatatgagagtatccgtgagaatattgatccggaaatttatgacgcatatatggagccataacctcatcttcttttaccatctgcaaaaaaagttcatacaaaattcaaaagcggatataccggccatctggtcagtacatccgccttttctcatgtttcaatcattccacgaaactttttatctgccttgcggacagcatcccgtttcacttcatcctggcactgcgcttcaattatttagcttcttctgcgtcagcctcttcatcggtctccggtacattgttgtgaaccgctgtgacggtagcaactactgcctccagatcggtcagaatatcaacgtctttatcttttgcgatcgaaaggtctttgacacgaattgtatcaccaatctccatctcaccaacatcaactttgactttctcaaccagtgcagccggtaatgcgcggtacgatacttctttcagtacctcctgcagaacgccagtttctaccttgtcgtggttctcgaagataatctcagcaacggaatgaaccttctcattgcttaccagcgcctggaaatctatttctacaacctgatttgccattgcatcatagtcaacttccttgatcaggacatcgtagacttcgccttctacatccagcataatctgtccgcccttggtctcgttcttcagcagacgatccacgtctttcttttccatcttaacaggaatggagccctgaatcttcttgccaaatacgttgcctgttacatagccttctcttctgagtctctttgccttaacatccatgcttcttttttcagcttttaaagtagtcatttgtcttttcctccaaaaatctgatctgcgccttccgcacgccctgtgtggaaaacacattgtgcttagcagccctcagccatggggttttgttaagtatctatctccttgttacggctcatattatagcagggttctctgaaaacgattcactaaaaataaaaatatttcggctttattttcagcatttttaaggttgaaatttagaatttgtatatttttctttctgtcttttttatacaagaagtatctccctaaatccgccacccggtttcagggcacacacacttttaaatccacacgccaccgccagctcctgcgcctgcttaaacccatatccgatcgtgtcggcactgtggctgtcggagttgatgaggatacgtccgccgcaggcacacagctcatttaacagagctgcggacgggtacggcgcactccggtagccgcgggacatggcgcctgtgttgatctcaaacggaatccccagagccgccagtttgtgcatcgccgtgatcgccggttccagataggcgtctttcgtctcgtcgaaatgtttatatccctcgttaaattttgtcaacaggtcaaaatgtccgataaaatcgcattttgtccggtcataaatctgcgcctctgtctcgaaatactcccgtgcaaatgcgtaccagtcaccatgccacagcgtttcaaccgcttttaccagtttctcttccgtatcatccacacaaacatactcgccatccttgatgagcgcatgggtcgagccgatcgcgtattctgctttctgcaccggtcccagtccatccagctcgatcccgatatagagattcatctttccccggtattcctcccggagttcttgaagttcttcggtatactggcgaagcttctcgtcgtccatcccgaatcccggctcaaacatcgaaaaatcagcatgtcctgaaacaccaaaatcggtcattcccatccggtatgccgcctccaccatctcccgcggtgtactctttccgtcgcagaacgtggtgtgggtgtgaaaatctgtatgaagcatcggtaatctcctttcttatttcactctgtcaaaacggttctgcctcttcacagctgcgggcaaatatccttgcagattcgtctccagcagaggatttttctggcgtattttccattctcttatctgagacttctctccgccatctgcatccgcttttcaaactgctcgtaaaagtccttctctccatcatacggaagcagataaaacagtttcataatcaacagattgcgccgtttttcgcgctcggctgccgcagcggcacggtttttcttctgtatctcctgttcctccggcgttccgatgcacggttctgccaaaaggttctgcgccgcctccgtttccgcccttcttatatcttttaagaaataatgccaccggctgatatacgcctcataccgctttaaatctggcgtatcgatccattttttcactttgactttcgtccggttttcctttttacactcatgaatctggagaaaatactggaaacttccattttcataaaagcgacccagtggaaacaggcggcagatgcccggccggtacgcatgaatctggcagcgccccgcctcatcaagaaatccgcaggcttcctccgccccactccggagcgccagatttggcagaatctgtccgtccacgacgttccactctacctttttttcctccagcagatgttccagtgtgtccccgcgcaaggcggtcagacggtacacatcatatggatccagcacgatcgaattacccattccgcggcagcacgccgaacagccccagcaatcatcgcatccagctttcaccatatcatcccggctgtacagctttccgtctgaaatctccgccatcgttacattacgttccatctctacttctctctttctgcctcaatccgatccagaatctcccacaaatgttccagatccgcctctctggtcgcccagctcgtcgcaaagcggacaacggtgtgatcctcgtcataccgctcccagaagctcacggaaacctctttttcaatctgctccatccggtcattttccagaatcacaaactgctggttggtcggagactcacggaaaaacgtataaccacgctgttttaatcccttctttaaagccaccgccatctctaccgcatggcgtcccaggcgctcatacagcccgtcagtaaacagcacatcaaactggattcccagcaggcgtccctttgccatcagcgcgccctgctgcttgatccgggtaataaaatgcgccgggacattcttcttctcaccaaatacaactgcctctccgcagaatgcgcccaccttcgtgccgccgatataaaatacatcacacagatgcgcgatctccgaaagactcaggtcatttccttctcccgccagaccatatccaagacgcgccccgtccagatagagcgggatttcatacgaacggcagatctccgaaagcgcctgcagctccttccggctgtataaggttccgtattccgtcggctgggaaatatacaccattcccggaaacaccatgtgattgtggtttccatccgcctcgaaattttgcagatattcctgcagatccgccggatcaatcttcccatccttttccggaagctgtaacaccttatgcccggtgtactcgatcgccccggcttcatgaatactcacgtgccctgtctgcgctgccactactccctcatacggtgcaagaatactgctgatcacaaccgcattcgtctgggtaccgcccaccagaaaataaacctccgcctccgggcatccggtcgcctcctgtatttttctggcagcactctggctgtaccggtccatgccatatcccggcagactctcccggttcgtctccgccagcttctgaagtatctcctcgcaggcgccctctgtataatcgcttgcaaatgaaagcatcgtagtatctcctcctgttctttcttcgagcaaacacaatcctgcgttctcgaaattgtttgtatttttatgtcctcaccagtgccagagaagcccccgcatcagcatcgccgtcaaatttgctgcactgtgaaataacacaggttcccacagacggttctttttttcatacaaccacgccagtataagtcccatgagcgccgcataaatcccctgcgcccagtttccatgcaccaacccgaaaaatgccgccgacccaagtgccgcccagaaaaatgggagcgccatacgcaggcgctcaaatataatgccgcgaaacagcagttcttcggaaagtggggcggcaatgcccatgagaaagaactgctgccacagggcgccggaaaataaagcggcggtgccctccgacgcaccttttcccagagctgccgcaagcatatccccctgaggcattttcaaacacagagacaccgcttcagctgcctgcccagtcatccgaaccttttgcactgcaatatgcagcactcccaggaaaatctcctttttttctaatgcccagaaaatcatgttaaacacagcactgaacgcagctgcccccagcaggattttccacacatccggcactttttcccagaaatatccacatttttcttcctttgtcgtctttatctgtggagagacctgctctttcatcccgtctgcctctgctatgcacctgttctctttctttttctggatcctccgccagtaaaatggataaatcacagcaaatgtaagaaacgacgacacggttcttcccacatttccctccagatgtcccagcgcctccacacatccgccgattaaatcgctgatgacgcacggaaaaaacatctgccagacgatacgccaatccgctgtctcctgccgttcttcgtccatttttctgcctcctgtcatccttttcctatctgcatctgtttccatgactttttcagactttctactccacgcctgccttcgcgcagatatcctgcagacagcacttgtcacagtacggcttcgtccgcgccgtacagacttcacgcccgtgatacaccaggcggtggcagaaatcgctgccctcctccggtggaatcagcttccagagtgccatttccacgcgcttcgggtccttgattccttccaccagccctatccggtttaccaggcggatgcagtgcgtatccgtgacgatcgccggttttccaaacacatcccccataatgaggttggcgctctttctgccgactcccggaagctttaacagagcgttaaaatcatccggcacatgcccgccgtactcgtcgcgcagcatcttcatacaggcgctgatgtcccgcgccttgctgtgtcccagaccgcacggcttcacaatcgcctcgatgtcttcccccggggcatccgccaatgccgccacatttggatatttttcaaacaatcccttgactaccacattgacacgcgcatcggtacactgcgccgccagacggacactgaccagcagcttccacgcctgattgtagtctagcgtacaacccgcatccggatattcttttttcaggcggtcaattacctctaatgcaagctcttcctttgtcatattcctgtctctcctatctgctatccttcacttttcaatttacagtctgtctttgtaacagctgacacaacactacaaccactgctgcattcttccagcctcatacgaatcaccgccgcttctgcaactttttattctcatacgaaccgtatatgcttactcttcttccgcgtccgcatccttcttccgttttccgccgcgccgtaccttggaaagtaccggcttttcttctttctgcttcacgcgcacatagatgatcgacagaatcttattgtgcggattgcgcgctgaccgaacctcaacggaatcaaaccgctcgataaactgctttaacttcgtgcatttataatttcgcgggtcaaatcccggcacacgctttggaagattgtctcccagctccgataaatccacccagccatcgtcgtccgcatgcgtgttgatgattgagatgatctctttctccatctcctgcatgttcggaatattgctgactgcattcggatcgctttctttctctgcttcttttctggaaccatccacatcactctccttgcgcgtctgcggcagggacagattctgcgacggattttcatcgtttaataaaatatccaggaatttaaatgtctcacacgccgagacaaatgcattcggcgtcttgcgctctcccatgccgatcaccgtcatgcctgactcacgcaggcgcagcaccagcttcgtaaaatcactgtccgaggtgacgatacagaagccatccacattgcccgaatataaaatatccatcgcatcgatgatcagcgccgaatcggaggcatttttcccctgcgtataattgtactggaaaaccggcgtgatcgcatagtcgcgcaggttcttcatccacgcccgcacgctcggcgtctgaaaatcgccgtaaaggcgcttgtatgtcgcacttccataattgctgacctcatctaaaatcagcttgatatacttgccggacacattttccgcatcgatcagtacggctatttttttgtcatccatctcctgtttcctttctcaaataccgctcaaaatattctctgccgctttcatcagggcgcactttcctttgaaataaaaaggcaccgaaactttcgcacggtcgcatgatcgtgactctgaaagcctccggtgccggaatttctcattttcacaccgccgaaacggtcgtgatcgacagccgatacagcttatctataagtgtatcacgttcatgagaaatcagcaaatattctttttattgttcaggcaaatggattctccgtcttataaagcattcccttcggctggttaaagccaatctccgggatggcaaaaataccgatgaaaccaaaggaatgcgtcgcgaccggaagcacctcgccctgtgcgatatacgcacgcaggataccctgaattttacacttctcttgtcgctatctttttagttaataaagctaccgtctccacatgcccgctcatcccgaacatatcacagcatctcacgcgctccaccgcgtatcctctttcattcagatacttcacatcgcgcgccaatgtggcggaatcgcagctgacatagactacccgctttggctgcatccggacgatcgtgtcgaggcagacgctgtcacagcctttgcgcggcggatcgacgacgatgacatcggcatagacctgatttttttcatactcccttggaagtacctcttcagcttttccgacgaaaaactcgacattttccatgccatttaatgccgcgttccggcgggcatcctcgatcgccggagggacgatctctacaccgtacactttcttcgctttctgcgccagaaacagggaaatggttccgattccgcagtacagatcccatacagtctccccaccggtcagccccgcgtattccagcgccgttccatagagtttttccgtctgcaccggattgacctgataaaaagaaagcggcgaaatctggtacgatacatttccgattttatctgtgatatagcccggtccgtataagtttacaagctccgcaccaagaatcacgtttgttttttcctgattgatgttgtaggaaatactggtcatgccagggacttcttttaagcgttccacaaaaatatccgcgtgcggcagcttctttccattgatgacgagacagaccatcagctcgccgtttgaaaatcccttccgaatcaatgcatggcgaatcagacccttgtgcgtctcctcgtcatatggcgcaatctggtattcttccatgattttcttgataatatccagaattaccgcattttcttcgacacccagcaggcagtcttccgcttctacaatatggtgggtgcgtcccgcgtaaaatccggcaatgattcttccatccttatcgcgtccaaacggaaactgtgccttgttgcggtagcgccacgggtgctccatccccaggatcggctccatggtgatagttttatccacaccttccccggcacttttccccgacacgttctctgctttcacccccgcatcggttgtctccatcctttcggatgtatttctttcagatacattctcaggcacactcacttcatctgcctgctccggcagccgcagattctccatcccgccgatccggcgcaggttattgtagaccttgcgctccttaaaatgaagctgcgcctcataactcatcatctgaagctggcagccgccgcactgtcttgcgaccgggcattccggcatcacgcggtctttggatgcttccagcacctccatcagacgggcaaagccgtaatttttcttcattttcatcgcccgcgcccggatccgatccccgatcacggcatcttttacaaaccagatatagccgtcctgctttccgatcccggctccatcttcgctcatatcttcgattgtcagttcaaattcatcatttttcctgatttccacgtttttttttactcctcattttctttatttcgcatccagataatgcgcccgctctccgccaatatatttcagcctcgttctcgcacacgtcacatgggcgccgccgatcgcacggatcgaggtccgcaccggaactgcaaccgggcgcaggtgcataccgatgaaagtgtctccgatgtcgatgcccgcgtgtgcctgaatccgctctacggctgtcggatgttcaaatcccgcataggctgccgttgcaaaggaaccgcctgcttttagctgcggcacgacgtttaccatctccagaccatatttttccgccgcttcttcttccacaatcagcgcccgattcagatgttcacagcactgtgccgccagataaagcccctgcgacttggtaactgcatacagctcctcaaacaccgcttttccgatctcggcgctggaataggaaccgatcttatgcgatgcaatctcgctggacgagcatccgaccaccaaaatctgtcccggcttcatatttgccgcactgagaagttcctctgcggcaatccgtacctcctggcgcagctcctctaactgtcctgccgtctctatttcttttgaaattcctgttgcactcatcctgctgcctcctgatttaatgccagaaaaagccgcggaccaaacaggctgagcccgccgcagcttttccaaaatttttatttacattcccttacttccggtaaaactcctgaatccgatccagcctcgccgtcatgccgcccagcagcatatccgccgccgcaaatgccgccatcgtctcaaccacgacaaccgctctcggcacaatgatcggatcatggcgtcccttgatgctgatactgatctcctcgccgctcttattgacggttctctgctctgcggcaatcgacggggtcggtttaaatgccgcacggaacacaacttcccttccatccgtcataccgcctaaaatgccacctgcatggttcgtcgccttgccgatgcttccatccggatccatgacaaatgcgtcgttgttctcgcttcctgccatctgcgccgcatggaaaccctctccgatctcgaagcctttaacagcaccgatcgagcagattgcctttgccaggttcgcattaaatttatcaaaaaccggttcaccaagccctgccggaagaccggcaatcacacattccacgataccgccagcagaatctttctccgccatcttcctttccagatactgctctgcctctgcggctgcgacagcatccggcatatacagcttattcttttcacattccgccagatcaaaccgatccggcgccacttccaccggtccgatcgctttcgtgtatgcttttacctgaatgttcaaggattccagcagctttgccgcgatagcgcctgctgccacgcgtccgatcgtctcacgtcccgaagaacgtccgccgccccggtaatcccggaaaccgtatttttcatcaaaggtataatccgcatgtccgggacggtaataactggcgatctcactgtaatccttcgaatgctgatcctggttccgcaccagcatcgagatcggcgtgcccgtcgtccgcccttcaaaaacgcctgacaggatctccaccgtatcgctctcgctgcgcttcgtcgtaaaacggctctgccccggtttgcggcggtccagataacgctgaacgtcttcctcacaaagcgcaagccccgccggacagccatctacgaccacgcccacgcctgcgccgtgggattcgccccacgttgtcattatcagtatttttccgtatgttgaccctgccattctcgctattaactccttctgccatttagtctgctttctttcctctcgtaggtacctttgtaatcacacagcagttcggctcattcaccgaaatactgcgtccgctcatcaccagcagtttctccttatattccacctggaagaaagaaatgctgttactgccgtggttgatcgacgccagatggtttccatccgggaaaatcgcgatatccttcgggtaatctccactgatcggcagacagcagagcagcttcaacagccccgtctgtgcatcgcgctcgtagacactgactgaattatcgcccgcattgctgcagaacagatgtgtctcgtcctcggacatccggatcgtgcacgctgcagtcagctggctggtgcgctccggtgcggtcgatggaatcgtctggatcttctcgatcttcggcacacgatcgcccgtttcatacgtgtatacatcaatcacatttttgatttcatacatcaaatacaagaattttccatccttgctgaacatgaaatgtctcggaccagattccaaatcacagcggatcgcgtccaccaatgaaagagttcccttctcgccatcaaacctgtaaatcttgacctggtcaattcccaaatcggctaccagcaggaatctgccatccggtgtgcgctccgcacagctcacatgcgggcggaacgtgcgctctgccacgcttccaagtcccttgtggtaaacgccgtcggtcacttccccgatagaaccgtccggtttcaggcggaccaccgtctccttgccgtcatgataaccggatacgaagataaacttgtcctccgcatcggtcgcaatatggcagccgcgcatcgccttgatatttgcgctgttcacacggctgagtgcgccattttccagaatccggaacgccacaacgccctcgtccgcgatggaatagagcatccgcccgtcatgtgaaacagttaaataggaagagttgtccacttccacctcgcaccggtagataaattttcccttttttacatccacatcatacacggtaattccctttgcctgaccgttgtatgagtaagaacccacatatgccatatacttatcctgcatgaaatgttcctcctttgatcccccagaaccgttataacggtttctatcaaattatctgcccctattttatcatcataccgccatttttgcatccttttttcacacaatttgagaacccccggattttcccgtttttttccttgacaccttccccacattctgtataatagatactcggaagcaagtttattatttctaaacaaaaagattaattttacattcattttagaatttctaaactttcatcttacttttgcatgtttctaaaaaacgccggacggatggttttcccacccggtttttataaaaaagaatgtgccctagcgcatcctcgcggagcgttttttgtttcataggacgcaatttcctatgaaaccaggaaaggaggttccctctgttgagtataggaggaaaattaaaggaactgcgaattttaaagggtctgacgcaggaagagctggctgaccgcgcagagctttcgaagggatttatctcccaggtagagcgcgatctgacctccccgtccatcgctactttgatggatattctccagtgtctcggcacaaccataggggagtttttcaacgaggctccggaagagcagattgtatttgaaaaaaacgactattttatcaaggaagatccggaactaaaaaatgatattcagtggatcatcccgaacgcccagaagaacacgatggaaccaatccgcctgacactcggtgccggcggctccacctatccggacagcccacatgagggtgaggaatttggctatgttctttccggcagcatcctgattcatctggggaaccggacgtacaaagccaaaaagggcgaatctttttactatacgagcgacaagacgcattaccttgaaagccgctccggcgcgacgatcctctgggtcagctcgccgccaagtttctaatactacacattattttactatttacggaggaaacgcatgagccagccattaatcgatttacagcatatctcgaaacgctttgacgacaccctggtcctggatgacttgagcctttcagtaaaggaaaattcctttgtaacgctcttaggtcccagcggctgcggcaagacgaccacgctccgcatcatcggcggatttgaatccccaaatacaggaaaagtaattttcggcggcgaagacatcaccaaacttccgccaaacaagcgccagctaaacaccgtattccagaaatacgcactgtttccgcatatgagcatcgcagataatatcgcatttgggctaaaaattaagaataaatcaaaagcatatattgatgacaaaattaagtacgctttaaagcttgtaaacctagacggctttgagcatcgcagcattgactctttgagcggcggtcagcagcagcgtatcgccattgcgcgtgcgattgtcaacgagccaaaggtcctgcttctcgatgagccgctcggtgccctagatttaaaactgcgacaggacatgcagtatgagctgatccgtctgaaaaatgagttaggcatcacttttatctatgttacccacgatcaggaagaggcattgacgatgtccgataccatcgttgtcatgaaccagggttatatccagcagatgggttccccggaacagatctacaacgagccggaaaacgcattcgttgccgacttcatcggcgagagcaacatcgtggacggtctgatgatccacgacgagctggttgaaatcttcggtgcgaaatttgcctgcgtcgataagggattcggaacaaaccaaccggtagacgttgtcatccgcccagaggacatcgacctcgtaaaaccagaggaaggcacgctgcagggcattgtcacccacctgattttcaagggcgtccactatgagatggaagtcaccacaccggacggctatgaatggctggttcacagcacggatatgttcccggtcggcgagaaggtcggcatccatgtagatccgtttgacatccagatcatgaacaagccggcgtcagaggacgaggaagctgtgggcgtcaatgaatagaaaggagtcggacttagcatgaaatcaaacgtgaaacggctcttcgccggtccttatattctctggatgatcggttttaccatcatcccgctcctgctgatcgtatactacggtctgacgaccaaaagcgggacatttacactggcaaatgtctgttccatcacgacaccggagcatatgaaggcgctgctcttatccctgggtctgtctctggctgcgaccgccatctgcctgcttttgtcctatccgctggctttggtgctgcgccgccgcggcattggggcaggcagcttcatggtattcgtcttcatccttccgatgtggatgaatttcctgctccgcaccctcgcgtggcagacgcttctggagaaaaatggcgtcatcaatggcattctttcctttctccatctgccaaatatcgccatcatcaatacaccgtgggcgatcattctgggtatggtatacaacttcctgcctttcatgattctaccaatttataatgtgctggaaaaaatcgacgataataccatcaacgccgccaaagacctgggggcaaacaatttccagacactcattcacatctggattccgctcagcatcccgggcatcatcagcggcattaccatggtatttgtcccggcgctgacgaccttcgttatttccagtctcttaggcggcagcaagatcctgcttatcggaaatgtcatcgagcaggagttcaccaagggaagcaactggcacttaggttccggtctctcgctggttctgatgattttcattttactgagtatggcgctcatcgccaaatacgataaagaaggggagggcaatgcgttctgatgaaacataaccgcttaaaacagtttttccaggacttttacctggcgctcatcctgctctttttatacatcccgatcgtgaccatgatcgttttgtcctttaacaacacaaaatcgagaaccgtctggggcggttttaccacccgctggtatacgcagatgttccaggattccgccatcatgaatgccttaaacaatacgctgctcatcgcgtttgcgtcggctctgatcgcgaccgtcatcggcacgatcgccgccatcggcatcaacagcatgaaacggattccgcgcaccatcgtcatgggaatcaacaacatcccgatgctgaactccgacatcgtaaccggtatctccctgatgctggcatttatcgcgttcggtatctctctcggatttaaaaccgtgctgatcgcgcacatcacatttaacattccatatgtgatattaagtgtcatgccgaaactcaagcagacgaaccggtacacctacgaagccgctctggatctcggcgccagcccgctgtatgctttcttcaaggtcgtatttccggacatcgtcccgggtatcctctccggctttttgatggcatttacgatgtccctcgatgattttatcattacgcactttacaagaggtgccggtatggataccttatccaccctgatctacagccaagtgcgccgaggcatccagccgacgatgtacgccctgtccacgctgattttcgtggcagtcctggtgctcctggtgatcaccaactttgccccggagaaaaaatccaccggcaatgcgactgtgattgacacagagaccatcaagcgccgcaaacgcaacaaccagatcaagaacggcgttctgggacttgcctgcacgctgattctgcttgtcgttggtgtcagcacctacagccgctacaccacgactcattcaaacgaactgtacgtctacaatgcaggcgaatatattgatccggacctgattgaggaatttgaacaggaaaccggaatcaaggttacctacgacgtatttgagacactggaagaaatgtatccggtcatcgaagccggcggcgtcaactacgatgtagtctgcccatccgactacatgattcagaaaatgaaggaaaatgacctgctcgccgaactcaactttgacaacattccaaatgtcaaaaacattgacccgcagtacatggaaatgtccaagcagttcgacccggaaaacaaatattccgtgccatacacctggggaaccgtcggtattctttataatacgaagctcatcgaagaaaaaggacttccggttccgaccaaatggtccgatctctggaatccggcttataaaggcgagatcctgatgcaggacagcgtccgcgatgccttcatggtagcgctcaaaaaagacggcttctctgccaactcgaccgacgaaaccgaactccagcaggcaaagcaggatctgattgaccaaaaatcgctcatacaggcttacgtcatcgatcaggtacgtgacaagatgatcggcggcgaggcagccatcggcgtcatctactccggcgagatcatgtacatccaggatgaggtagccgcacagaacctcccattctccctggaatatgtaatcccggaagagggaaccaacgtctggctcgattcctgggtagttccgaaaaatgcgaaaaataaggaaaacgcagaaaaatggatcaattttctctgccgcccggatgtcgcagtcaaaaactttgagtacattacctacgcgacgccaaacaaggcagccaaggaaatgctggacgaagaaatccagaacaacaaagccgtcttcccagatgcgaagcagctgaaaaactgcgaggtttaccggtatcttggggatgaggcggacgagctttataatagtttgtggaaagaagttaagtcggattaagggacttactgcgttattcaaacattctgttaaagatagaaaaaggcgatacctggctatgaaaaccaagtatcgccaatttttcttgtcgcactcctgtacggcagctaccctatgtcagtaatgttctcgtactgtcttattgggaacttcccttctgctggttcttttcttgatagaaatttcttctatctatccataaaattaaatatacatttatattgatttttcaattctaagcgctatactatctctaaaaaaggaggtcactcatgaaaattgcagtcccttatgaaaacggagaaatctgctcccacctggctcaggtgaaagaatttttaatttttgatgtagttgacgatgagattatttccaccaaaaccgtgaaacagacctatgcaaacgatcccggcgcgctggtcgagtttctgaaaaaagaaaatactgccgtcctcctctgcgacgcccttccgatcccaatgatgatcgccctgcgcgaaaccagcatccaggttctcggcggcgccaaaggcgctcctaaagaccgcgtcgaagacttcttaaacggaatgcttcactttgaccggagcggaaataacggaccatcctgcggcgtccacctgccggacaacaataaaaatggcactgactccgacgccgaatgcgacggaaatatcagtgcctgtgggacttggtgccactaattcctgtttcatctgagacgttgatgacgcacgtgtgggagagaatccaccttatttccactggaggcgatgcagatgcccctccgtattcatcttctcaaacccattctgccgcagcgcctcatacagaatgatcgccaccgagtttgacagattcagagagcgcgtctcaccccacatcgggatgcggacgcagcgctccgggtcttcgatcaggagttcttccgggatgccgcggctttccggtccgaacatgatatagcagtccggatcgtagtgaacgtccgtatacacctgcgtcgtcttcgtggtcgccatatacgggcgcgcgcccggattcttctccagaaaatctttaaaatcgctgtaaactgtcacatccagatgcggccagtaatcaagacccgctctttttaccattttatcattcaatttaaaaccgagaggctcgatcagatgaagccgcgtgttcgttgccacgcagcttcgtcctatatttcctgtattcatcggcatctccggttcatagagtacaatatttaacatttcttctctccatccagccgtgccacaaaccgcttgatgcgctcgatcgccttctgcagatcctccagcgaatacgcataggaaacacgcagatagccctcgccgcagtttccaaacgcggtgcccggcacaagcgccagcttctcttcctgtaacaggcggtttgcgaattcatccgaggtcatgccaaaccgtttgatgcacgggaacatataaaatgctccatacggctcgaaacagtccatgccgagcccccggaactctctcaaaagatagcggcggcgctcatcgtaggctttcttcatgcgggcaatgtcctcatcgccattccgcagggcgtcaaccgctgcatactggctggtggtcggcgcacacataatcgcaaactgatggattttcagcatctgttttaagataagcgctggagccgccgcatagccgagacgccacccggtcatcgcatatgccttggaaaatccgttgatcaacaccgtgcgatcacgcatcccggaaatctccgcgatggaaacgtgcttgccactgtaggtcagctcggaataaatttcatcactcagcacaaacagatccttctcctcaatcaccttcgcgatcgcctccagatcggtgcggttcatgatcgcgcccgttggattgttcgggaatggaagaatcagcacctttgttttcggtgtgattttctccagcagcttctccggcgtcagacggaactcatccttctcctccagctcgataatgaccggcgtaccgcccgccagcaccgtacacggcacataggaaacgtaactcggctgcggaatcagaacctcatcgcccggattgagcatcgcgcgcagggcgatatcaatcgcctcgctgccgccgactgttaccatcacttctgtattcggatcatactcaagacgctgacgacgtttcagataatggcagatctcctggcgcagttcctttaaaccagagttcgacgtatagaaggtacgtcctttttccagcgaataaatgccctcctcgcggatatgccacggtgtatcaaaatccggttcgcccacgcccagggagatcgcgcccttcatctcgctgacaacgtcaaaaaacttccggattccggacggcggaatatttacaatcgtatctgataatgggtttctcacggaacaatcaacatcctttcatcctgaggaccgtcgcagagaacggtaccatggtctttgtattttttaagaataaaatgggtcgcggtactcagcacagaatcgatcgtggaaagcttttctgccacaaactgtgcaactgcacgcatggttttcgcctcgatcataacggtaaaatcatagccgccggacatcaggtataccgaggtcacctcgctgtactgatagattctctcggcaatcttgtcaaagcccatctcgcgctgcggcgttacctttacttcgatcagtgcaatgaccttctcctcatctgtattatcccagttaatcagggtatggtaaccgcagatgatatgttcattttccatttcggcgatctccgccgcgaccgcagcttcattttccccgagtaaatccgccagctctttgacgctgatgcggctgtttttttcaatgaccgctaaaattctctctctcactttactacctcctgttaatgggattttggtaagtctttcattttatctatctcatccggttttggccggtcaagaaagctatgtacttcgccgctgtaaatctcgcgtccgatcgctgtgcgcgtccgaccgatgagcgccgccggaatgccctctctctccagattctggagcagtttcggaccgctagacgccgtcagcagaatgcagccctgggactgtaaacggtatggattgaggtcaaatacctcgcagacctccaccgtctcctggcggatcggaagtttcctaagatccatctcaaatccgagtccgaatccatcaaaaaaatgccacagcgctgccatgacgccgcccccgcccgccggataccacgcagatgcgccgagacgggtcagcactttccgctctttatgtgcagcaaatgcctccagaagcggagacggattccatttctcatagagattctggcattctctcacataccgtgcagaaaatcggttcaaaagcgccgcctcgccgctttttgccgccatcgaggtaccaagaagcgcggtgtaaccgaccgccagaagatcctgctcggctttcatctccccgtatgcctcgaaaatttcatcttttatgttcattctgattcctttcccagcttcacattcaagtacagtaattttctgcgtttaccacgccatgttaccacaaatctctgctctcataccatcactatatatgatccgatataagctatcactccatcggcggcgctgcttcctgcgccggaccggctggtccctgcggctgtgccggggtcggctcctgtgctgccggtgcttccgtcggtgccggaaccggattttccggctgtggcgtctcaggatgcggtgtctcaggctgcggtccagccggaaccgccggtgccgcagctgcaacggccggacctacacggtagatcgccttcgatgccatataggtatccgtctgcagcaaggttttctccgtctccacgccgtccacgtagacgtatttccagagccgtgactgcagcccatagtgcgccgactgttccttcaccctcgcacccggcttcaaagatgcgtccacctttgtgatcggctcgcccggatccttcttcgacagtgtctccgaaacgtatttgatcgtccggtttgccggccgtgtctcttttccatatatcgtaaatgaaatagtcccgccgttcactgccccttccatatagatcggggtatcgtatggatttttaaatttcagatccttataagtacccgcgatcgccgaatcctgcgatgccggaacgtaagtaacaatcatcgaatgattctggcgctgggtgatatccatctccgccagaagcgctgcattgtagagcgtcgtgcagatctggcaggcgccaccgccgaccgtatcgactacctgaccgttcgcataagaacctgccgatgcatagccattttccaccgtaaatggggtcagccatgtataagccgaaaattcttctcccggcatcagaaccgtgccgttgatcttcgccgcaccgttccgcagattcttggaacgcgacacatttcccgggttgaatccggtactgaatgttccaagtgcatcctgaatcgtagataatgcctctgtcgtgcgggtcggctctgcatttttgactgttgcatccaccgaaaccggttccgaaagaccgcccgcgagcgcctcattcagtgcttttgtcgtcgcatctatgtccacttcctgtcccgccgaagactggctgacctgaaagactccattttcatgcgtgatcacagcgtcctgcggcgctgtcgtaaattccgcgcaccgggtctgcacaaactcggcaaccttcgcttcatcgaccgctgtctcaatctgcagatccacgccggactgctctaattccttctgattcagataccggcgcagaagatttccgccggaaagtttctccacttcctcatcaatctcgttctggttgacccaggaaaatcccagctccgccgccgtcgtctgaacctcatgaccttctacccggatcgaaatggtctgattttccatctccccgatcgatttctcaatcgtctgatccgcctcttcccgtgtcatcccggaaagatcaaacccaccgacctgaaagcccgtgggaatcgtccccgctgacgcggtgcccgtaccggctataagcagtcccatcactgccgcaccgcatacgcctgccatccaatttctttttttcatcatctaccgaacctttacatcataagacctgccaaaatggttcccgctaccatcgctactactacgattataataacaaccgctgatacgatctggcgtgttttctgatttgaaaatttaaacatatctctcacctcttctgcattctgccatgctgcgcgataatctgatccgtaagtctcgaaatctcatttttcgaaagcgaatcaatctgcgcagataaatttattctatgatattttagtaattcccgcaagacttctttttgcttttttgacgcggactgttcgcgttttaccttgtaaatcaaaggctgcggtgcaaacacctccggcacttccagaaaatacctgtttttaagctcctgatacagatggtgcgccgccagcgcatccgaaagcgcccgatggctctcgcccggatccaccgtaaaataccggcacgcggctgccagattctttttttcctcctctggcataaaatggcggcagattttcaaggtatcaagccccgcatgctcaaatgtatacttccggttgaccgccgcccgcttgagaaagctgaaatcaaagataacatgatgccccagaagcggcagctccccgcagaatgccagaagttccggcaaaactgtatccagcaccggcgcatccttcaaatcatcgtcacagattcccgtcagctcccggatgcgcgcatccagctcccgctccgggttgacaaacgtcgaatacgtctgcaccacggttccatcttccacccgcgccgcgccaatctcgatgatccgctcggtcttgggatttaaccctgttgtctccaggtcaatcgctatataagaattgtttgttttttccattttatttatccatcgtaactgttcagtaccttcacagtcacgcgcagtaaatgcacagacctactgaacagtttactatccatctaatttaaaatatggctgtcctacatttcttctcgttcgcagatgttcagactgccgccatccacaatttctttttcctgtctctctctagaaaatcccatttctcactatatttcatcctgggaaatggaaaatgccgccgcattgccaaacagagcatcccggtttttgtaatcaaacagcacaaagcttccgtcttccatctgctctaaatgcgccattttcgccatctgcctggaatcgtatgcctcgtagccctttaaatagcggcgttccttcgcctctcgtatgaaaaactgcttcgtctcgttcttccactccgacggatccggggcaaaggatggacggctcttgacgttttcacggaggtagaggtcataaatgagaagatcctgataggaaatttctttgttcccccatttctgaataaacagatacaaaatctcataccgtgccagccggttatggctcactccattcagtccctcttcctcataaaatgccgccaggcggtcatacaaatcaaacgcatcgccccattcctgcgacaggcatttcatcgtgcggcggaactgcccgctgttgtaatagacctcgaccatctcttccacacccttgagacggatcacctcttcataggaaagccagttggttctaagcacctcatacggcggcttgctctggctgagcagaccgtatttctgcttcatttcttccatataggaacctttcagcaccttcagaaagccaagctgaagctgttccggctccattttgtatacatcattgaaggaacgatgaaagctctcgatatcctcatacggaagccccgcaatcaggtcgagatgctgatggatgttgccaaaggtgttgacctgcgccacacggcgcgccaccttgtccagatccatcgtcctccggatctccttcacaaccaccaggttcgtcgtctgcacaccgatttccaactgaatcagccccggacgcatctgtttcatcagcgccagctcgtcatcatccagaaggtccgatgaaatttcaaaatggaagttggtaattccattatcgtgatccagcaaatactgccagatcgccatcgaatggctctttttgcagttaaacgtccggtctacgaacttcacctgcggcaccttccggtcaaggaaaaactgcagctcccttgttaccagcgaaaggctgcggaaccgcacttttttgtcaatcgaagacagacagtaactacaggaaaatggacatccacggctgctctcatagtagataatgcggtgttccagcccgcttaaatctccgtaggaaaacggaatgtcgtccagattcatgagcggtgccgggcgatgaacctcgacggtatcgtccgaacagcgtaggacaatgccggggatctctgaaaaacaaacttccgtcccgcgctcacacgcctccaccagccgcgtaaaggtctcctcgccttcgccctgcatgatcagctcgacctccggcagctcatccatcaggtgaaccgcgtcatacgaagcctccggacctcccatccagatgcggacctgcggaagaacctttttcaaatcgtggatcagttccttcacgtaaacgatattccagatataacaggaaaatcccaccacatgcggttttctccggtaaatatcctgcagaatctgatccatctggtggttgatggtgtactcgccgagatcgatctggatttccgacacggttttcgttcgattcgcgccttctgctgcctccgaaaccatttccattccaacagccgcaccctgctcatccttctgtcccagccccagccgctccatcgcataccgtctcaggctgtaaattcccagatttgaatgtatatatttggcattaatcgccgccaataagtaccgcatcgtctcacaccttcaaaatatgatagccagccgccttattgagccggttcataatcgcccgtcctaaattgtcttccgaaaatccttccgaaaagatatattccgcgccgcgatcgtcgaaatcgcgcagaaccgcatacaggttgtgtgcaacagtctcctgacgcgcccgcgcaccgatgctttccagcatccccgccgggtaacggtctttcgtctcgtccgtgcagataattccaaccttgcgcccttctgccagcttttcgcctgccaggcggttgatcgtctccacaactgcctccgtctcgccctcgaccagtgtcagatcggctttcggtgcataatggcggtatttcattcccggtgctttcgggcgcacgtccgcgctgactggtcctaaaatcgccggatcaatgccgacttccccgaccgtttcacgcagcatctccacggtaatcgcacccggtcttaaaaccatcggcatttcctccgtaacatccacgatcgtcgattccagaccaattccaaccggaccgccgtcgatgatcgcatcgatctttccgtccatatcctgaagcacatgatccgcgcgcgtcgggcttgggcgtcccgatgtattcgcactcggagccgcgatcggcacgccggacagacggattaactctgccgcgatcggatcagacggcatccggattgccaccgtgtcaagcccgccggtcgttccatacggcacgatcgcgctcttaggaaataccatcgtcatcggtcccggccagtatgcctttgcaagctttttgccattttccggcatattcgataccagcggcgcgatctcctccagacaggacacatgcgcgatcagcgggttgtcagacgggcgtcccttcgccgcataaatcttcttcgctgccgcctcatccagcgcattcgcccccaatccgtacaccgtttccgtcggaaatgccaccagaccgcccgcgcggatgatcgctgccgccttctcaagcacctcccggtcatgcgccgtaaagtcctttggattttctatcttccacatctgggtatgaagttcttttttcgtttcgttttgcatattgactcttctttctactatctcacaatgaataaatctatcttccgtactaagctcgaaaatacctcgctaagtactcctagtatgcgcggcatgactcgtactaagctcgaaaatacctcgctaagtactcctagtatacacaagattcctcgccagttcaaggtttcagcgcccattcagatactccataatccccatatgcagcgtatacgccacgcggtcctggtattcttctgttttcagcagtgccgcctctttccagttagacaaaaatccgcactcgacgatgacaatcggacatttgacgtggagcaggagataatagctgtcattcggtttggcttttctgcggttctggtctcccagtgcatagtcgaagcgcttctgcagtatttccgccagccgtttccccttctctgacttccggtaataaaatacctgcgcaccggatacatcctcctggtggtagctgttctggtggatgctgacgaccagatccgcgccggattcctcgacgcgggcgcagcggtttttcatgtcggacattttccggcttccggctgacgtatcgtaaagtccccggtcatcctcccggctcatcacgacctccacatccgactgctccagataccatttcaggcgcttcgcgatcgccagattgatgtccttttccaggcttccgtccacactcacctttcccggatcaaaatccccatgtccggcgtccaggaacaccaccgtctttttcttcccaagcacagcgtccgcccccgctgacgccagccccgcataccgtgccgccagaaagacgccgcaaaataaaagaaggcagactgccaattccactgacagccgccttcgcatttgttttagaaacgggtgtgtttcaaaccattcgttcaagtgcacagctcctgatgcattcttataatatctatattcgccttgttcgcggcatatcccgctattttctaattccaatcccggctcctactgctgtgcctccgctacatccttaaacccaagtccaaaaatgcccgaggtttccttcacaatcacaaacgcattctcatccgtctccgcaataatgcgttttaaacgattgaactccgttttgcggacggtacataaaaccaccgtcgtgtcctcgccgctgtagccgcccttgcccggaagcagcgttaccgtacggtcaatttccttaatgacacgttctgcgattttctgcgggtatttcgtcacgatcgacgcctcgcttccggcatcatttccgtagatgatcatgtcgatgaccttcgtctgcgcgtacagggaaatcagtccgaacagtgccgcatcgacatttccaaagacgaagatcgaggtggagaggatgattccatcgatcatcatcagggcgcgcccgatcgagacatgcggatatttcttctggagcaggtagccgaccacatcgctgccgcccgtcgtcgaaccggacagaaagatgaacgccatgccgacgccgaccagaatgccgccgtagagacttcccataagctggtcgcccatataaaccggaaagaccggggcgatcacgtagtcaagcaccaccgaacagattccgcacgcaaacgccgtccgcagcgcaaaggcacggctcaaatgaaaccacgccaatattaaaagcggcacattgaccatcagtgtcagccgtccgaccggcaggttcgtcacatggtttaacatcagtgccacgccgaccgcaccgcccggcgcaatattcgccgtctcaataaagctgtgcgtgccgatactgtagataaatgcgcccagaatcagatataaaaaatcttttacagaatattttccaatgtatttctccatttctgcatttcctcctgttattctgtctgagcgttccatcctttccgggctgattctgctggttctgcttcccgcatcgtcctcaattttccgtatctatcctccatcgctcagatttctttttcctgtttttccttcgccttttcgccccgcagctggctcgcctttctctgcagcgtctgcctcggcacatccagaatccgcgctgcctcagatatatttccgtgcgccgcctccaacgcctgccaaatcagtttttcctcataggcagccaccgcctcacgaagcgacgagcagagttttggaacttcttccaggctttccggcgtctttttcctgtccgcctgcttttccagcagaagctttcccttgatgtctttatactggagcagggcgctcgtctcatccaccatgctcatgccgtaaacgatcacgtgttccagctcccggacattgcctggccagtcatattcttccagtttttttagcagatcctttgacacatactgaacctgcttgtggaacgtgccattgtgtttgtttacataaaacttgacaaaatgtccaatatccgccttccgttcccgcagcggcggaatccggatcgacatcatgctcagacgataataaatatcgcgccgaagctgtcctttctcgatcgcctcaagcggttccacattggtcgccgcaatgatcttcacattcgtgcgtttcgtctcactgccgcccaggctgcggaaactgccatcctgcagaacccgcagaagctttgactgcaaaaacagaggcatcgaattgatctcgtcgagaaacagtgttccgccgtcagccagctcaaagagtcccttattttccattgccccggtaaacgcgcccttggacgttccaaataagatactttcgagcaaggtatccggcaacgccgcacagttctgcgcgataaacggtttatccctccgttcactggcattgtggatcgactgtgcaaacacctcttttccggttcccgtttccccatagatcataaccggcagatcgcacgccgccaccaccggtatatagtctctggcatttttcattttttcatccaccgcgatgatatcttccatcgtaaaagatgcgccgctgtgttttttcagctttccagcgccgccgaccgggatctgttccgaagtcagttccacactctccggctcttcctcgccgtctgtcatctcctccatcgacaaatcgatcgcgcccaccacggcgcgcccgctcttgatcggaatcgaaagagagctgatatggatgccctcctgccccttggtctgaagcagttgattttccacgtaaaccggcagtccgacctccatcgcccggatcatgctgctgttcttagcgttcaggttttcaaatacatcgaaaaaattttgtcccaccagcgcctggtaagcttctctctctttccggtttgaaaatttactatttaactttgctgaaaacagaatctcgccatccaggttgatgatcgtgattccgtcaatatatccttttccatgaaataactgtcttaaaaactccatgcatttctcccctgtctgaaacaccgctgaccggaatcacgcgccaagtctcacggacgttcgacttgaatctgcgttcatccggcctgacaacggtgttatgtttacacctgttccaagtgtatcagaggaaacaggcaaagacaagtttatccgatctcctccacacctgggcgatccaacggaagtttcagccaccaccatttaaatacgatatttgcgatgatgcatgctgccatgattaccaaatagatgccgataaacttccaatggctgccatttaagagcatcatcggtcccatcgaccacgcaaacatctctgccggagttgtaaacggcgctgcaaatgcagtatcgttcagcgtcttggagcggttttccggatcaacgattcgaagaaggatgaagccgatcgcaaaaacgcccgttgaatagccaaatacgaagatcgcgcgctcaaaccagctgccgcggttcatcgccggaccaaagaacatcagagttgccactacgattacaataccgcagagcagaagaagtgccagcggagctgcatatttaacgataactgccagtttgatggaagcgattccgaaaaacaccagataatccgtcgcagtaccggagatacgtcccactacattttcatcaatataatcaccgacgccgacttttcggaaaacgaggaacatcacgatcgcggtcaaaaatgccatcaggtaattcggcagatccagaccgatcgctgcatagattcccttactgagtcccacaccgataccggatgcgatcagcatcactgccagatgccatgccagcggatccaggacgttggatgaaatagtttcctcgcccatcgacttgcgctcatttttgggcaccagaccacagcgcagatcatcggagatctgattgaagcctttcatatatttggtccagccctttttcgttcccagcttgatgaagaacagaccgccaaagatacccgataaaataccaacagttgcacaggtcatcgcgatatccattgcatccagatcacccagtctctcaaacgcggtaccaacagccgctgccgttccgtgtccgccggagaaaccagctgccagcagcagaccgaagccatagttaatgttcgggaataatttcgaaattactaaaatactaaacaacggtgccagtgagaactgaatcgcctgtgccagcactttataggaaaaataagaaccaatccggtcaatttccgctttaaaatctttcttattgaaagaaaatccattaattccgacacctgcgaaaatcaggataatcagaacacttgcataagaaccaatattttcagaaaacggcaggattcccagtccctgcgccccgagtgccagcgcgataaatccggcaatcatgcttggcggaatgaaaaatttctgtaccaacggcacttttgcacgtaaaagctgaccaaccgcgataaaaaacgatgcgatcgcaaagtccactaaaatgtctgtaacactcacagatacccctcctattcttctgtatcaaatgcgcctccagctatttcccatccggaagcgcttctattctcccctcaaatggcagagcgcttttcatccgtatccccatacgtttcacgaaaagcgttctgccggtatcctttatctgaaaaatcacttctctaatttgataaagttatccgaatggctcttggttgccgacggagccagatccagtttctgatctgcgatctctaagatgtcttccggacgaacccacggtctgccctggatggcacttgtctcctcatgggttaagtatcccttgtaggtggttaagctgcggcgcaggaaaccatcctttgcacatgcctgcgccacgccattgttgatgatgcttctgaagtgcggcagtacggatgctgcgtatgcgatcgaggtagactgggaaattgcacccggaatgttgcttacgcaataatgtacgacgccctcttcgatgtagcgcggattttcatgggtggtctcatggaacgtctcgattgcaccataatcgttgctgatatctacgataacggaacctttctccatcgagcggaccatctcgcggtcgatcatgtattctttggcatccttcggccatctaacacaattatacacgacatcgatctccggtaaaatctttttcagattataacggttggaaatctgggtattgacttcctcattgaactgttttccgatatcacgcagggttccgatattaatatccataaccgttacccacgcgcccagcgcatgaagaacagagattgctgcgcgtcctaccacgccgcctccaatgaccagcgccttaacgcccggagcaccgccgagaccgttgacgaatttgcccttgccgccgttgatggagagcagggattccagaccaaaaagtgcgcccgccttaccagctgcctcgcagttcggtgaaccgtaacggtgggaatcttctgcggtaaatgcaatacacttgctgtcgagaagtgcctgtacctcctccggatgtgctgccggatggatgcaggtaaatacgatctggttttcacggagcagcttgtactcgcacggttcaaactcttttacctttgcgacgaaatcgcaggttgcataaatttcttcctttgtatcaaccagcttcgcgccctctttcacatatgcctcatccgggaatccagaaccttcgcccgcgcccttctgaacgtaaacctcattgccgtcacctaccagcatgcttacctctgccggggttgcgatgacacggtactcgcctactttgatgtctttcaatacgccaactttcataatgtgttccctccatgtaatatatttttctttttgcttgatacttttgcttgatactcatatatacagcaagttccgtgccaacttttacgtttttcgattttatttaatatttttcttttttattttccaaaaaattcgaggttttccttgtaaatacaaggtttttgtcgaattaaaatttttatttatttttttgataaccttccaggaatgactcgttcttgtctcatttttttcataatgtaaaaaaatgactcatttgtgagcttttatgtgctcataaatgagtcattcaaattttatttttaagtcatatgccgatttttgagtctttcatttctagggtgctcattttggtttctgcgctttcgctgataaactttttatttttttcacccagtttgagtcctactgcccaacttccgccgctgccagctttcgcgactccgtcagcgtctttccctcgcgcagatgaaccgccacgcgctccagttccgccggatctgcataattcgaatggttcactgcattgtacaaactccgcagactttccctcatactgaatatcatccgaaataacgtgtccttgtgatcccgccttgctcttgcgtaagttccttttttcataaattctcctttctgtcaggagaatttcttctgctttgtaacactcccatcacctcacagtcagagcaaaacccatcgaaaatctcctgcttttcaattgttacttaattggataagcataagattttctcagattcataattagattggaatgtaagatatacttgaaatgtttacaaagaaaaatatatgcttgatatgataaatgtaacatatccgaacccatgatgcaaggtatatggtcctaaattgtccatccgttcaaaagatggatttgccggattcggtcattgcatccgcaaaaaaggaagcaggtgaacaaaccatttaagatcctctcacctgcttttcttataccttgatgttgtctttgaagtatttcttccaagaaatcttgaacgcttaatggggtctgaccccattaacttcattcactttttggctgtgtagctaaggataccgcaattaatgtaatcaaagcaatcgggaatgcaacaaaaattgtctgtaatccaaatggagaaccggttgcctcccagataatacttaatccacatccaataatcatagatgaaatgcctcccgcttttgtagcttttttccatacaagtgctccaacaactgccggtgtaattcctgctccataaatagtataggaccaatactgaattgcaagaatcgatgggaagaaagtcagaataatataagcgacaacacctgcaatcaaaatgaacgcacggctgactttaagctcttctttctctgttgcattcggattgattttgctatataaatcaatacagaagttagctgctgcagacaataggtatgaatcacctgtggtaatagtaaatgctgctgctgcagaaagtacaataccacctataatcgtaggaagaagcgttgctgcaccgatcaatgcctgccctgctgcaatactggttccaaaatactgacgtgaaatgaatgcatagcatgcaacaaccggcataataacaaagcaagcaagcatagtacccatcagaccaacacgagctgtttttacatccttcgctgcaacaattctctgataatagttctgatcggaacaagtcagaagaatcagcggaagatatccgccaacccatttaagaagcgtctgaccgccgaagaacgtaaggctttccggatcgttggcctgtgcagaagaaataacccaatcccagccacctactgtactaatcagaaccggtaagccaattgcaaggccacctaccatcaaaaatgcggacattgcatctgtcgtagcaactgtcttcaatccaccagaaagggctagtacaataacaagtgcacaacagattattgtacaataagtagttggaataccagttgtagcgtttaaaataaatccaagacctcgatactgataagaaacgatagaaaccatcgcaagtgctatgataaccgctgatattgttctagctttagaaccatatttcgtttcaagaagctgtgataccgtgtaacagttgctttcccggattttaggagtcagataacataaaacactcatactgataaccgggcaaatcgtaaaaaacaaaccactccacaatccataattaaaagctaggctgtttccaccaccggttactgtaccgccacccgtataggtagccaaaatcgtaccaactgctacaatctttccaaggcctcttcctgctaagaaaaaatcttcttttccttctttttttacagctgctttctttgcgaaataagctcccgttccaaccagagcaattaaataaacaataacaaccagaagcattttaggctgagcaattaattcatgcataatgtatcctcctttaatgtcaatatcattttccatattctatactaaaagaccttctttatataccgccgataaatgttctgtaaacgcatgtaaatctaccaatggattggcatccagaactacaatgtctgcaatttttccttcttctaaaacacctctgtctttcaccccaagttcctccgcagcagccaaagttgcacagcgaatcacctgagcagctgacattccattttcctgcattgcaactaattctttaaatatggatgggtgcgggccgaaattcggagaacctgcatcacttcccgcaacaatcttcgtaccgattttcatggctgctgaaaaagcctttttttgattttcctcaacagctgatgccttctctacgataacatctgcgatcattccttttcctcgagccagttctttatatacctgcagagtcggaacccacacctgcccattttctttcatcttatgaagaagttcttcatctaatgcacctccgtgctcaattgtatcaattccggcatcaatacattttgaaatagcatctcgtgaaagtgcatgtgctgcgaccttcatatttagacggtgtgcttcatatgtaatcgccttcaactcatccggtgaatacatacatggacctacatcttccaatccagctgcgcctccactcgccatgatcttaatccaatgaaggggtggaatgctcatctcgatattataacctttcaaacgtttaattttatcaatcaactgctcctttgtattcgcaatatagccaatcatcggacaatgtccataggaaccttgaattgcacttcccgccggaacaatatgacttcctttaatcagtccaatattcacagctcttgccagaggaatcgagcaatcatcattacagcccaaatcgcgtacagtcgttaccccgttctttaaggatttttccgccgaagaaacacctttggcaaaatttaaatagtttccgtcccgtacagtctcatacatggggtccttggctgttccttcccatacaagatgcacatgagcatccataatacctggaatcagatattttccactgcagtccaccttctttgcttcagtcggcgccttttcctgaactgatgcaatttgcttaccagtaatttttaaatctgccttgataaattttcctgttcttacatccagaattttaccattaaccaaatagaattcttccatacttccaactccttcctgatttttcaatcaatgttgaatataaatatccgtagctaaaatcaaaataatgtaataaaatgaggattaagaataattattttgatgaacagattataaaaaaaatataaactgattacttcgtatatctgatacaatatcaaaaaaacatcttgtgcagaatgcacaagtagaaaggagtcccttatgctatcattcctatcattcatgcaaaagctttctgcttatcacgctttaaaaaaagaaagcatcctctatccagattccccaatttttcacgttcaaaacaacctccctgtaagagaaacatttacagaagctaccgcatatattattcattctgatgattgccttcaaatccccaaagacaaccaaaatatactttggatcattttgccgaacggcacagatgacacagaaatccctgattggatcgaaaactatgttatgctggctgaacctaccgttcaaactgagcttacattccagctgcagcatatactaaaagtagagcgacgaattgaagaagctcattacaaactcagccaatgcctgataaaccgtaaagatgtgaataccatcctatctacaggtgcagaacttctcaaaaaccccttatttttatcggatacatccacccgtgttcttcactggtctgatctgaaagaactaaagaaagttgatgacgaactgattcaatgcatcatcaaacacaattttgtaacctccgatctattcgaaaaatacgactataaaactcttctgcccagtatcgaacaaaccgaacatgcctttattgaacattctaattaccagaagaagaaagaacgtctgattgtaaaaattgttattgaacaccgatattttggctggatcgtagtgattccacagaaacgtccctttgaagacggcgattgtcaaatactagatattttagcaaacgtcctatcgttagaattagagcgaaataaaataggctttgcactcagttatcgtgaaaatcttctatttgaacttatttccggacgcatccgcaatcaggaagaatttaatttacgggcaaaaggatttggctggattccgggagaacacttctataccatggctattggcttccgggatgcgtaccaatcggacaatcaagaacgttccatcactgcttacaaaaatcatcttggtatgatttatccaacctataaagcagtctgtatcggcaatatcttatatctgcttcttgaaaccaaagatctggaatcagttgccaataacttggataacttctttcaaacttatcatctggccgctggttgcagtcaccatttttcaaatatcattgaatttagtgcatctgtagaacaatccttagagattctacgaattggaatgaaacagaatccaaggcagaatatctatcgatttcaggaatacaatatgccttacctggtttccactttgaaaaaatatagtcagccgaactatttctgccttccagaaatactcagattacaggcctatgatcaagaattcggaaccgattatttagatacattacaaacctacctcttcttccgcaatgtaataactgcagcaaatcatcttcacattcacaggaacactatgaattacagaatccaaaaaatcattgaaattacggggttaaagcttaccgaaggcgaggatttgtataaaatatggcttagctgcctcattcttggtgttaatgggttctgcccccattaactttgaatcactttttctttaccatgcagcgtttcttaaagaatgaaataccatgcaaagaatctgaccaacgcccccactgtgtatcacacacagcgagggctttttttgcactccaggagttcattttatttccgtcataaactatacacttccaccataagccgtatcccgactttcagaccttcctgctccggcttcagcttcttccggtctccaccgggctttctgactttatatgctcttttctctcccataattattcgtgcagctccagcggcaatccgtccgggtcaaggcaaaatcaaaatataaaattgtgaactactcggtaactaagttaccagagcatctgaaatctggcgggataccgccttttttcagggtgcgtccatgacaccactactgcttacctttcggctatacagctacttttattatttctggattctttagtccggttacggacagttctttctgttttccggatacggaaagatatttacgcaggatattaaatgctcctactgcatccgcattatatcttactccatccgttatatacatgccccgctcttttctgtttgatgcttctgcatatctttttgatatttctggtgaaaacgggctgcactggctggtatagctttcttcccgttttgtcagtgatattccatacagttttagtttatattccaacatgatataaagtttattatacggcagtccgtg

SEQ ID NO: 11045 - DNA, 30757 bp, Unknown
  gut microbiota DNA sequence
ttttaaaagatcatataatagtggtaggaaaaaccctacattccctactgctatagtatgattggtactggtgggtctgtcctttccgtggtagaatatttacgttatcaagaaacacggtcctgaatcatggaggtgcaaagtatggaaccaatgtatttgtcaatccagccggaagagacaggggaacgcataagaagactgcttttggaacaagggtatacgattcgggaaatccagggagctttcgggtttgaaaatccgcaggccatttacaaatggctgtccggtaaatcgttacccagcatcgacaacttcattattttaagtagattattgcatactacgattgaagatatcctcgtcattgacggggatattcctcgtttatggggaattttaaaccgatggttgaatgacatccgttgccgtatgatttacaatcggatcagaaacaaatgatagcggagaggacggtgaaacatggaatcggaacataaatttatgttaaatgatattctgcgaaagaaacggaaaagtaagatgcgcaaaccggaatgtcttgtttttcttacttacggaccgattcacgtttcccccttgggatggataaaacgttggaaagaagatatcatctgcatctgtcagagattgcgttacggatactgctaccgtgatgcctgggcgattgaccagtggtttcttgttatcatccccaacatgctcaacgatctacgtatcaacggtcatggatatccgggatctttcacaggaaccgaagaagagaatgtgcggaaatggaaccggatcctggaacatatggaatttctatttcgggaggcaaacgaggaaacctgtcaccggaaaaatccatatgaagaagcatatgatcaggcaagagaagctttcacccggaaatacgggatgtttggtgaaaagctgaaaaccgaagaagaaaaagagcaggaaaaagataaaggttattactgtgtgcataccatgtccgatgtgccggaatacaaggaaatattggaccaatggtttgcagcggagaaggaactggcagcataccgagatcggtgtatgaaagaaggaatgaagctttttaccagatatctctgggatctgtgggactgagatcatttttatttatattgataagaacattgtgggaggcgaaaatcatgcagaaaattacatcggcttatgcaaataagatgctgagaagcctggaagaagacaaggcattctgggtaaacaaggaatcgacatccagtacttacgtggctgcggtcaacgaggaaccagtcgttccggaatatgattacatgactgttgcgaatacgattgatgagattgacaggaagatccttactatcaagcacacattgaatctgaccaatgccaccgcaaaagtgcaggtcggcgctcaggaaatgagcattgacggcatcctaatccggatggcgcagctcaacaagagaaagacggtgcttgacgatatgcgcaagagacttccaaaaacgcgagtctatggcaactccttcggttcttctggttcggcaccggagtataagtatatcaactacgatccggaactgatccggcaggaatatgaccgcatctccaatacgatcatggaaatgcagattgcactggatcgttataatcagacggtgctgtttgaggtggatatctaagtagaatttccgtacagggccttctaacaaaaaattacaagtggttacggttcattgtcatcgcttatcggtttttgttatcgggttatgtgttccggttcatggagacggctttggaaaagcatatcatgcagattttcaaatcaccctgtaaaaaacctgtgagggatcacggtgccaaggtacggttttcaggcacaacggctgcggaagcaattccgtagccatttttcatggtaagaaggatttcggtctgaaagagttcaaaacctaactcaaaacttactttttaaaatcgctccattttggaaatttcaaaaatagtgtactgaagtgggttacaaacacggaatggattgggtcacaagaattccaaaaccagaattatgataaagcgctttataatttcaggcaggaacgtctgagcgaaaatgtgactcaaaacgttatccgcagaaaccgctaattggaaatttgaattcgatgatgatatagttgggcagaaaaaatcgaaaggagatcagactatgggaagactttacaaaatcaacccgccgtgtcccaagtgccatgaggaacataattggtggcatattcagctgacggatgaggaacaggcgaagatggatgcgtatgtggcagccggtgagggaaaatcatccttggagttacttctgggcgagccgggaattgttgttacgtgaaagcttaagtgttgttgctacggtcacgtatttgaagtgaaacagtacattattcaagggtatatcagcatatgaagcataaaacagcttgtttctaatagtaaattccagttttgaagaactttgcaaaactaacgtccataaaaatcatgatattttgatttgccagaatttacttttgcaagtgattagctaaatcagaacttaaacttgcaaactggaagctcggattccaattcagctctcctagaaagatcccttcgatttttcgggggatctttttgtgacatagaaaacctcatcctatggtgaaaaaacaaaacaaaaaacagaaaaacaaagaaaaagaaagattagtacttgcttttcctataaaaggtgcttataatgtatgtaaataaatcagctgctagttagtagcaaaactaataaatacatataagaggagaagaagagatgagaaaaaaacttgcagtaatgatggctgctatggccgcaaccgcgatggtagggggctgtggtgcaaaggatgcagcaccgaccggcgcagagaccaaaccggctgagacttctgctgctcaggagacagaagcagctcaggaagaaaccaaagaggctgatgcccatgaggcagaatacctggcagagtttttcgatgtacagatcaaagaagatccggacagtgctgctttttccgctgacctgaaaaaggtagcaggagatgaggcaccggctgtcgagggggacatgacctggttttctgctgtgaaagctgctgtggctgctgctgattatgaagagcttgctcttagctatccggaagataagattaaagatcgtcttgaacaatatggggtaaagatggatgagacgaatgaatatgccagatacgttgctgctgctctggataccagcctcatcacttccgaaactgcgaaaaaagtcgttgcagaagatgcctttacagctgaggatgaaatcagtcttctgatggcaattgccaatgcaaatggagacgcaagaaactaccttggcatgtcaaatgatccagacatttacgcgaaactggaccaggcatggaattcctttatcttatttgatgacagcaaactggcagagatcggaaaagaagctgtacagaacaaggtaaccaccggatatggattaaaatctgctgcatacagtgcccgctttttaccggaactgaccttacagtacggtcattctgatatcaaacatgtacatcagctgatggggcttctgaacagcgagaatatcacagcaaaggttcagcttgagccgaagattagtatttaccagtatctgccggagtggggtccgatcccggaggctactccaacctacgaagtaaaagaatatgaagatcttgcactggtatatgcagtagaatatgaccttgagcttgagttcgacaatcttgaggatatgaatcgttttgacgaagtaatcaagacgtacgcaaagaaaaatgaaggaaatgaagaagcaaagggcctgatctatgcatcctggtggcagccgctttattcttcaaccagaacagatatgccggagactgattatcatcagatctatgattgcgtaatcacgaacgatacgtattccattcatccatttaccttaccggaagataaagatgaggttgttgaaaaactgacggaaatctccgacggcctggaagttgtaccggttgaacgcttctgcaataccgctttctataattacctggaaggtgaggactatcaataatatgcatgcaatcgaacgtgcagaatacatcttgtccatgctggagaagaataaagtagtcatggtgacggatctgagccgtgaaatgggagttacggaagaaacggttcgaaaggatctggaaaaactggaaaaacaggagaaattaaaccgtgttcacggaggtgcctacttaaacgaaggttttggcaatgaaactcccatctcggttcgcagcaaggtgatgcaggaagagaaaaagcttcttgcatctctctgcatgcaatggatccacgaaaagagttccatttttctggattgcagtaccacggctcttcatattgcaaagcaattagcggattttcccggcaagctgaccgtcatgaccaattctctggcagtggcaaaggagattgatgcgaatccgcagattcgtcttattttatttggcggtgagctgaatcgcgatcgggaagcgtttgaaggacagaccgtactggaacagatgaaaacctgctttatcaattatgcatttgtcagcagtgccggctgcagtctggaggcaggtattacagattccacccgtgaagaagcagatatccgtcgtcaggtattaaagcaggcgaaacataagatcctggtggtggacaatacgaagatcggacgcaacgaggtgtatgtgatcggagagttggagcagctcagtcaggtggttgtggatcattccatccgaaaaaccaatccggacctatgggaatggttccaggcacatcagatccctgtcctggaagggaaagcggaaagaaaatcaaaaaccaaaggagatgagcgataagattatgacagatttgaaggaaatgaaacaaaatgtgctgatgacagcgaaaaaggcctatgatgaaaagctgatggccggaacaagcggcaatatcagtgcttactttcgtgagaagcagtggatcgtaattactcccagctcctatgattacagtttgatggcggaagaggatatcgtagtgattgatctggatggcaatctgatcgaaggaagacacaagccatcttccgagtggaaaatgcatgctgagatttaccgtcacctgtcccatgctaatgcggtggtgcatacacattctccttatgcaagcagttttgcggtaaaccatcaggaaattccagttgtactgattgaaatgattcctttcttaaaagggaaactggaggtaagtccttatgcacagcagggaagtgcagaggttggtctgaatgcagttccaatcctggaacggaaaaatgcctgtctgatggccaatcacggtgtcgtggctatcggcggaacattaccggaagcatatacaaacagtgtttatgtggaggatgctgcaaagatctatcatcttgcactctgttcaggacatccggttgtgatcaaagaatacgaggaggtctgatatgacaaaggcgtatgaacgattattaaaatgctatcagtgctttaaagacaaaattaattttaagccggaggtggcactggtgctgggatccggactcggtgattatgcagataccattcgggtagaagctgttttggattatcatgatattgagggttttcctgtgtccacagtcagcggacataagggcagatttgtctttggatacgtaggagatgtcccggtcgtaatcatgcagggacgtgtccactactatgaaggatattccatggaggatgtagttcttcccacccgtctcatgaagatgatgggggcccgggtcttgtttctgaccaatgcttccggcagtgtgaattatgattacaaagccggtgattttatgatgatcaccgaccagatcagtaattttgtaccgtctcctctcatcggacccaatgaggagatgctgggagagcgtttcagcgatatgtctgagatttaccgtaaggacctttgtgagatcatccggggtgctgctgcagaccttcagattctgcttcaggagggaacctatatccagctgtccggtccgaattttgaaactccccatgaagtaaaaatgtgccggatacttggaggagatgcagtaggaatgagcaccgcatgcgaggccatagctgccaatcatatgggcatgaaggtctgcggtatttcctgcatttccaatctgggatgcggaatgactgatcagcctttgagtgcggaggaagtgaaggaaacagctgaccgtgttgcaccgttatttaaacagctgattacggaatccatagttcgaatcggtaaaatgatctgagtgatgaataaaaaacaaaggagatgataaagtggacaatcagtcagaagcaatcaaaaatgtgtacttgcatgaagacggcaaagctgtgatcatcattgatcagactaagcttccaacggttaccgaatacctgacccttggaacggcgaaggatctgtatgatgccatttttgaattgaaagtccggggagcaccggcaatcggaatttgtgcggcatttggaatgtatgttctggccggaacgattgaaaccggggattacgatgagtttttaaagaaattcagagagtataaggattatctgaactcttcccgtccaacggcagtgaacctgagctgggcattaaaccgcatggagcaggtagtgacaagccacagcgatgcttctgtaccagagattcttggatatctgaagaaagagtgcatggatattcaggaagaggacagccagatgtgcagagcgatttctgaatatggtttaagccttattaaggacggagacggaattctgacacattgcaatgccggacccttagccacctcccgctatggaactgccttaggacctctcttccttggaaaagagcagggcatgaatttccatgtatttgcagatgagacaaggccgcttcttcagggagcaagacttacctcatatgagttagatcaggcaggaatcgatgtaacattgatttgtgataacatggccagcattgtaatgaaaaacggctggatccaggcctgcttcgtaggctgtgatcgtatcgctgccaacggtgatgcggccaataagattggaaccagtggtgttgcaatccttgcaaaacattacggaattccgttctatgtattaggaccgagttcaaccatcgatcttgactgtgcaactggcgatgatatccagatcgaacttcgaagtccggaagagatcaaaagcaaattttatgaaaaaccgatggcaccggagggtgtcaaatgttataatccggcatttgatgtaaccgatcacacgctgatcgccggaattgtaacggaaaaaggaatctgcagaccaccgtatacggagagtcttgcaaatatgtttggcaaaaacaaaaaataggaggaaaagattgatgaaaaaattatttggtattgtagcaggtgtagcagtatccgcagcgttaatgacaggatgcggtggaaacaataatacagccgagacaaaggaaaatacggctgaaacagcagcagcttctgctgagaacgctgatggagatttaaagatcgccatcgtgaccagtccatccggtgtagatgacggctcctttaaccaggataactacaacggtatcctgaaatttatcgagtctcatccgggagcaaccgtaactccggttcgcgaggaaaccggtgatccggctgcagttattcaggcagttgctgatatcgttgcagactacaatgtgatcgtatgcccgggcttccaattctccggaatcggaaccatcgcaaccgataacccagatgtagattttatccttgtagatacgaatccgaccgattctgagggtaatgacatcgaatgtgataatatttatgcaatgactttcaaggagcaggaaggaggtttcttcgcgggaatggcagctgcactggagtctgaaagcaaaaaggtagctgtagtaaccggtattgcatacccaagcaatgtaaactatcagtacggttttgagagtggtgtcaattacgcaaatgagaaatatgataccggtgttgagatcgtagagatcccatcttacgcaggcgttgacgttaccaataaaaatgtaggtggaaactatgttggaagctttgcagatgaagcaaccggtaaagttgttggaaaagctctcatcgatgagggctgtgatattctgttcgtagctgcaggcggttctggaaatggtgtatttactgctgctaaagaagctggcaatgtaaaagtagtaggctgtgacgtagaccagtatgatgatggtgctaacggttctgataacattattttgacttctgtactgaaagttatgagcatgaacgtagagaaacaattaaatgctatcgcagacggaggtttccagggagcaaacgctctgttaggtgcagattctgattctgttggttatgtaacagaggaaggacgtcaaagcatgtctgaggataccgtgaagaagatggacgaagcatatgaacttgtaaaagatggaactatcgttccggcagcaaactttaacggaattgagccggaagatttcccaggattgaaataatacgttctgtaccagaaaatgaggaggcttaaatgtcggaatatatcattgaaatgaagcacatcacaaaacgtttcccaggtatcgtggcaaacgatgatgtgacgcttcaaattaaaaaaggtgagatcttcgcactgcttggcgaaaacggtgccggaaaatcaactttgatgagcatgatatttggtatgtatgaaccggatgaaggtgagatcttcatccggggtaagaaagaacagattcattcgccaagctacgcaacaaaactcaatattggtatggtccatcagcattttaagctggtacagaattacacgattacagaaaacattattctgggtttaaagaagaaagacaaactgtttggaatccttccctatgttgatttaaaaaaagcagatcaggagatcgaggcgctttctaagaagtacggcctggaagtcaatccgaccgatgtgatcgaaaatacaagtgtatcgacacagcagcgtgtcgagatcctgaaaatgctgtaccgggaagctgaaattctgatctttgatgagccgacagcagtgctgacgcctcaggagattgaatccttgctgacgatcatccgcaacctcagagatgatggaaaaaccatcatcctgatcacccataagctggaggaaatcaaaaaaattgcagatagatgtgcgattttaaacagaggaaagctcatcgatgttctggatgtcgccacgacctctacaaagcagatggccaatttgatggttggacgggaagtttcttttgaagtagagaaatcagagcctcattaccgggagactgtgttagaggtaaagaatctcactgtaaaaaatcaggatcattttgaagtagtaaaaaatgtatccttttctgtccacggcggagaagtatttgccattgccggagtatccggcaatggtcaaattgagattgcagatgcgattgcaggagttgagaaggcagcttcaggtagtattcttctgaatggagtcgatatcaccaattactccatccgcaaacgaaccctggaaggaatctcttatattccggaggatcggcagagctgcggcctggtcatggattttactctggaggaaaatctgggactgaaaaactacttccgagaaccattttcccataaaggtgtactggataaagcagaattttcccagtacggaaatgaactgattgaccggtatgacatccggagcagtcagggaaacaagaccattgtccgctccatgagcggcggtaatcagcagaaggccatcatcggaagagagattgaacttcagtctcctctgatgatctttgtgcagccaaccagaggtctggatatcggagccatcgaaaatatccataagcagattatccgacagagagatgcaggaaaggcaatcctgctgatttcgttagagctggatgagatcatgaattgtgcagataccatcggagtaatatataatggagaaatccagaaaatagcagctgcaaaaacgcttacatcaaatgaagtgggagaatttatgatgggggtgcaccaaaatgctgaaaattaaacacagattgaaaaagatgcttgtcagactcctgggaaatgaaaaataccagggtatcaccattcccatgtcggccattttcttaagccttctggctggagctgtgatcattctttcgcttggcaagaatcctctgtcggcctatggtaaccttcttcagggggctggattcctcccgaaaccgagttatgccggatataagaatatgctgaccgacttcaccagttatatgaatgcctggactccgatgctttttgcgtctctggcagtagcagtcggtatgtgtgccggactctttaatatcggtgtctccggtcagatgcttacctctggttttatcacaactctggtgatcggatatagttcccttccggcagcggtggctaagccatgcgtactgattgtcggagcagtcgttggtgcactcatcggtgcacttattggctggttaaaatacaaatttaatatcaatgaagtcgtatcttcgatcatgataaactatacggcccagtatgtgatcagctttttcatcaacacgtactatatcaatccggtttccaggcagtcccaggccgtctcgaaagcatcccgcctgactctgatggacacacccgtcggaaacttgaaaatggatattcccttaggaatccttcttgcagttctgactgcagtcctggtgaagttcgtgttagatcgcaccgtatttggctatgaactcaaatgcgtgggacttggaagaaaagcggccatgtatgcaggtgtcaatgttggcaaaagcatgatcatggcgatgatgttctccggtgcattaggaggcctggcaggagtgacgtactacctggggtattttggttcgattcagccccgcgtccttccaagcaccggttttgatgccatcgcagtggcacttcttgcaggaaaccatcccatcggcatcatattttcatctcttctgatcacagtgatcagcaagggcagtacctacatgaattcagcatccggtctggaatcagagatcgcatccgttatcaccggattgatcctgctgttttccgcctgcggtgtatatatccgttacaaagtgaatcgaatgaaacaagagttaaatgaagagacagaaagggggatcagctgatggaacgaatcctgattgatggtttatcctttgcgatcccgctgttcgtaatggcaatcggagggatctacagcgaaaagagcggcgtgacgaatctggctttggagggattgcagggaatgggggcatttataggcgcctttgtggccgttctggctgcaggctattttggaagcaattcccaggttccttattatctcgcaattgtatgtgccatggcaggtggaatgctgtattcgctcttatatggactgttatgtatccgtctgaaggcaaatcagatcattggcggagtcgtgatcaatatcctggctatgtcactgactgcattttttacaaaacttttaaaccgccttgtgttcggtgcagcttcggaaaaatttgttctgggtgtgtctgcacggtttacaattccgctgctctccggcatcccagtaattggagccgcatttaaagatgtctatccatttgagatcctgatccttctgatcgcagttgttgcctggtatgtgctgtataaaacgcgttatggcatgaatcttcgtgcctgtggagataatcctcacgcagtagacgcagcaggagagaatgttacccggatccgtctgattgcagtccttgtatccggtgctctgtccggtctggctggaatcagctttgcttattccatttcagcgaacttttcttccaacatctatgtgggatacggatatctggcgattgcagccatgatattcggaaactggaagatccttcctacacttggatcctgcctgctgtttggttttgcccgatccggaggctattatcttgtccagaagatgcagatgcccagcggttactcggatcttgccatgacgctgccttatatcgttacaatgctgcttttgattttcttctcaaaatacaatcgtgctcctcgtgcacttggagagatttacgacaaaggaaagaggtagaacatgaatattcgtttttataatgcccagattcttccgatgaatggaaatatggatatcatccacggagaggtatgggtcgaagggaacactattacatatgtaggtcctcataaggaatgcggcaatgtgtgggaccgtgagatcgatgcagaaaaaaatctcatcatgccgggctttaaaaatgcacatacgcacacagccatgacgtttcttcgatcctatgcggatgatatgccgctgcaggactggctgacaaagcagatcttcccgatggaagcaaaattacagccggatgatatctactggctctccaaactgggaatcatggaatacctgaccagcggtattacctcctgctttgatatgtatctgaatacagaaatgatggctaaagcatcggtagaatgtggattccggagtgtactcgtcagcggaatcaatgatttttcctcttcattggaggaagtggaggcagattttaatacctacaaccaatatgatgagctgatcaggtattgtctgggatttcatgcagaatacacttgttccgaagaactcttaaaaaagattgccgagctgtcacagcgctacaaggctcctgtatttgctcatatgtcagaaacagaacgggaagtggcagagtgtgtacagcgccatggaactacacctgcagcttatctggattccttgggcttatttgaacatgggggcggtggatatcattgcatttggtttaccgatgaggaaatagaactcttccgcaggaaaggactgacagcggtaaccaatcctggatccaacacaaaacttgcaagcggcatcgccaacactacggcatttttgaaacacggagtcaatatggccatcggcacagatggaccagccagcaacaactgcctggatatgttccgggaaatgtttttagtgacgggactgggaaaacttcatgatcgggatgcatctgcagtaccagcagaagaagttctgaaaatggcagtaaccggcggtgcaaaagcaatgggactgacagactgcgactgccttgcagaaggcaaaaaggcggatctgattatgatcgatctgaaccagccgaatatgcaacctatcaacaacccgatgaaaaacctggtatacagcggaagcaaacagaatgtgaagatgaccatgatcaacggcaagatcctctatgaagaccagaaattcttcattggggtggagccaaaggaagtttacaaaagggcaaatgagatcataacccgaatgagacaatcgtaggtaaaagcgttaaattccgttgacaacacattctttatttgatactatttatcaagtaaattcaatattccatgagggagtagttagcgcgaaagtgtggtttgtcaacattctgattatagcaactgtataatctggcaaatcttaaataatgagactcatgtatatcgatggacagtttttgtatgatgcatagctgtcagttgatatacatgagtttttcttttgtgcattgatgcaaaaaagagaggacatcataatcgacagtgagcggtgagggaacatgcattacatctaggaggaaatgaaaaatgatgctgttttttaaagtgttttttacagaatttatcgcagagatgggcgataaaacccagcttatgctgattgctctgacttcaaaatataagttgagagatattatactaggaactgcggcggcgattcttgttctgaatggtcttgccgttctggcgggcggacttgtcagtgaatttattcctgactggcttattaagatgattgcagcacttgcatttctgtatttcgccgcatcgactcttgccggtgatgatgacgaagaagaggaggagggcggtaaatcaaagattcaattcgcacccttagctgttttttgcacattttttgtggcagaactgggagataagactcagcttacagccatcacgttcggagccaatgaaggcatgaaatcagcctttgttgtatggattggatgctctctgggactttttgcagcggatattctcggaatgctggttggatatcttttaaagagcaaaactcccgatgggctgctgaatacactggcatttgttattttttccatatttggtgctttcacacttcatcagggactgaacatgatgaacgcaagagtctgtccgattccggtatggccggtatggattgctgcggctgttatttttactgccttatgtgcctggatctatataaaaagaaagaaggaaaataaatgcgatatttaaaaccacatttttatgataaatttgtctgtacagcaggagattgtccggatagctgctgtgccggatggcagatcatgattgatgaaacctctctggagcgatatggaaatgaaaagagcgagttcggaacgcgattacgcaattctattgactgggatgaagaatgtttttaccagaacaatcggcgctgtgcatttttaaatgaagaaaatctctgcgatctttataaagcactgggaccagattctctttgtgatacctgccggatgtacccgagacatacggaagaatacgagggacttcgggaattatctctttccctgtcctgtccggaggcggctagaatcattctttcctgtaaagaaccggtccgttttctggaagaagaggacgatttggaggacgattttgaagaattcgattttatgatgttttcccagttggaagatacaagagatgttctgttttcgattttacaggatcgatcccttcctctgacactccgaatgtcggcatccgaacagctgacagaacaatatcagatccgggtggaagagcagaaggaatatgaaattgatgaacttctgcgaaactgtgaagctcatcatcagagaaaaaaactccaggaatttgtatcagaaagtcttgctgaaaaaggcattgatgcagcatctctccatcggtgggcacgccagatagaagaattgcaggtactacgcggtctggaacgcctgcgtccggaatgggatgatgtgctggatggtgctgaaaagtggctgtatcagggaagtgaggaaacctatcataaaatttgcgaagaatttcataaggcatatggaagcttaggaagtcacaaagaagaatgggaaaatctgggcgagcagcttttaatgttttttgtctatacctatttttgcggggctgtctacgacgatatggtctgttccaagatggaactggcattgttctctgtccgctggatacaagaatttctgatggtccgatggcttgaaaatggaaagaaactttccatgaaggatgtggaagaaatctcctggagatatgcccgggaagtagaacattccgatgataacttaaatgcactggaagactggctttttgagcggtatgcaccggtttaatcaccgaaagaagcatattgcaaaaatgaatcatacgaacaaaaaagctctattctataaaattgagcgtaccgtatctccggacgtcaacgaatagcatagagcttttgagttaatttttgccacataatgcttctgtcattttcatgataataagcaaaaggtaagcgtcagtaaaccaaaaggttaccgcataaggcgcagcagaccgattactttgccaagaatctgtactttatccacaataatcggatccatggttgcattctccggctggagacgatagtgaccgttctccttgaagaaacgcttaacggtagctgaatcatcgatgagtgcaaccacgatctcgccattctctgcgacactggtctgttccacgataacacgatctccgtcatagatgcccacatcgatcatactattgccgcggactttcagcataaaagtttcgctgttcggaagcagttctgccggaatcgggaaatagttctccacattctcatcagccagaatcggcgcaccggctgctacagtaccgataaggggtacatttaccagttcacggcgggacaggttaaaggtgtcatcaacgatctcgatggctctcggtttcgtcggatcccggtgaatatatccgttcttctcaagctgttccagatgagagtggacagaagaggtagacttaagctgtaccttttcacaaatttcacgtaccgtcggcggataacctttctttaaaatgcatgctttaataaattccaagatctctttctgtttatctgtaatacgtccctgtgccatatagattcctcctgtcgatgaagtatataaaatgtttttaatatcggatatacagtgattctggcaggatacaagtcgaacgcccacctgatgggaccagcagctgaatcactgaaaggtctggcctatagtaagcccttattatattatatatagtaacatatgttcgggcaaaatgcaaactattgttcgtctttatcaatgttttcttttttaagctgttctcttgcctgctcaagcagcacttccagacgggcattttctttgtctgcctgacgaaggagttcctgcgtttcccgttcttttttgaatagtgcgcgctccatcgtaagctccgcctgggctttgcattgctgaagacccatatcagcatctgctttttgttttgataattcctgggtaagttctgtgagtttctgctgtagttctttattttcagtttcaagtgccagaatccgatcggatgcatgctgataggactctgactttacctcctgttccttctgagagtgagagagcgcaagtacggtatcatgaagttcctgtttgcattgtaaaagttcattcttaagcatttcttctgattcttttgaatgttcatttttcttcagctgattttgtgcctcttctagtttctccttcagcatctggttgatctgttcctggtcagctgcgctttttctgagcgattctaactgttcagtgagtgtctgttcctgcttggtcagcaaagcggactctgcatccatttttttcttttctgcttgaagttgttccacttttttctgtaactctgtgaggcgcagttcttttctctgaagttcagaagagaactcctcccgtgctctggcttctgcattctggttcaattccaagctatacagatatgcggaggtgatggacttaaccatggtttcaaactcctcaatctcgacacttctccccgggattgaggatttggcttgatttaactcaaacacctgcatcacatgatcaaagccctgggcctggttcattcctttttgttcgcaaaatgcacggaaagcatccgctgtatcggaatcgattcgaaagtttgcctgtttaatttctcccatattctatattctccaatctatttttttgtaactgtttatgcaactattcagtaggtctgcgcatttactgcgctgaccgtacgaaaacatgggtcagcaggcaaaaatcccattgccgtaggcaatttttaatggatttttgcgtgtgactgtgaaggtactgaacagttacctgtttgtttaataccctgacattcttgctgcgagatggtaacggttcatactcatgtagacagttacgcgagataatactctgcttatcaaactgatttcaaagaagtgctttgcaaagatcatgcgccaagtcttataacgttcgatttaaattgaaatttcaaattgcgtcatactttattttatatatatagattatcatgaaaccacaagggcgtcaatctgattctgtgatatgttatatatatgttatacatgattattgttatacatagattatgattttgatagtaaaaataggaatgaaactatcaactattcgtgaaaggatgctttcgcgaatagtttcatcgacttttgtggttatatttgccagaaatagcagcgcagttttgtgcaatatgtatgattccctataaaaatctatatacctaaagtatttagatttttatagggagcaggtgtctgctgcttacgagcagagccgcgttttcttacggcacttttgaaaccgaaaataccgtaagaaaaggtggtggcaacagaaatttgccgtatttaaatgcgaagacacggaaaatttcgttactgggcacgtatgcgtgaacagtagcaagctgcgaacaaatgtttgcttttttctttcgaaaccattgacaaacatttgttcgtatcgtataatgtagctatacagaacagatgttcctgacatttttataatattcaaatctcttctcattctttaagaacagatttgaatacaaaaagacgattccaacaaaacacgagaggagaagattgcaaatgtatacgttgaaaaaaggtgttatggttttagctgttgttttcatcatgctgctttcgggcttttttggacggagtctgatgtatgtgatggctgaggaagaagcagatactagaccggaaaagtactataccagtattcatctgaaagatggagatacgctctggagcattgctcagacatattgtgcagattcggaggagtcagttgaagagtatgtacgggagctgcgccagatgaacagtctttcggatgaccatattgacgcagggcattacctgaccattcgttattataaataaatcgttaccgttcacatacacgtacacacaaccgataacagagacagaatcaaatttatagaattttccatattcctgtccgtagtctgttcatttaatctattttctggtagaataaagtttagcaagcagtctatatctgattaaatgacaagcgacagaagaacaggaggaaataaggatatgagtattgtatatcacgaatcatcgaagatatttcatttatataaccagaccatcagctatatcatgatggttcttccaaacggacatatgggacagctgtattatgggaaaaagattcgtgacaaggaagatttctcataccttcttgaattagctcccagagacatggcatcttatctctatgaaaacgatcgcaccttttcacttggacatattaagctggagtacggtacttacggaagcggtgattaccgtcatccggcagtagagattctccagaatgatggaagtacctattcagattttcaatttactggatatcaggttacatccggaaagccaaaactgccaggacttcctgctacttatactgaacaggacggggaagctgaaactcttattattacgttaaaagatacccatactaatctggagctgcatcttttatatacaatatttgtcgaggacggtgtcattgcccgaagtgcttctatttccaatcagggagacatttctgtacaggttcagaccgcgatgagtctttgcctggatcttcctgaccacgattatgagtggatgcagttttctggggcatgggcgagagagcgcgcactccacacacgcaggcttgagtatggcattcaggcgattgacagcacccggggacattcttcccatgagcagaatccgttcattattttaaaacgcccttcggctgacgaatttcagggagaagccattggctgcagcttgatttacagcggtaattttctggctcaggcagaagtggagtcacatggaaccacccgtcttatgataggaattaatccgtttggctttagctgggagctgaaccctggtgaaaccttccagactccggaggcagtgcttgtttactcctctcagggacttaacgacatgagccagacttttcaccggctgtatcggcgccgactggcaagggggtactggcgtgatcgcgagcgcccaatcctgatcaataactgggaggcaacttacttcaattttaccgaagaaaaacttctacagctggcttccagagcgcagaaatgcggcatagagctgtttgttttagatgacggctggtttggtgccagaagcagctcaaaagccggactgggcgactgggaggcaaaccgtgaccgtttgccaaacggtctttccggactggcacagaagatagaagcgctcggtatgaagtttggtctctggatcgaaccggagatggtaaatgccgattccgatttattccgcacgcatcctgattggatcctccaggttccagggcgaacgccttgtcacggacgttaccagtatgtattggatttttcccggcaggagatccttgattacatctatgaaaagattgcatcgattctggaaggcgcctccatttcctatatcaagtgggatatgaaccgaagtctcagtgatgtatggagcagaggagtttccgccagacagcagggagaagtatttcaccgctatattctgggtgtttatcagatgtatgagcggctgacaacacgctttccggacattctgttcgaatcgtgcgccagcggcggagcgcgttttgatgcaggtatgctgtattacgcaccgcagggatggctcagtgataatacagatgcgattgaacgcctgcggattcaatacggtacttcctatggttacccgatcagctcgatgggatcccatgtatctgcttctccgaaccatcagcttcatcgtcagacaccgctttggacacgtgccaataccgcgttcttcggaactttcggctatgaactggatctggcacagctcggagaagatgagctatctgaattaaaaattcagaccgcctttatgaaacagcaccggtccctgattcagtatggtactttttacagactttccagtccgtttgaaaacaatatcactgcctggatggtagtcagtgaagaccgcacagaagccctggtcggctggtaccggacactgaatgtagccaatggtccgtttacgcggctgtatttacagggactggaagaatccgatctttacaatgtcacggaatatacagaaggacatgaaagtgccgtaagcacccactatggtgacgaactgatgaatttaggactgattaccagtgacgcctcttccggacagtatatggatggtagaagagagagctgcgactttgattctcgcctgttttatgtacaaaagcaggctgaataataaataagataaaagcattgaaaggggatgctcccgaatctggtttttaaagaagaatccctgtaactgttcagtaggtctgcgcatttactgcgcgtgactgtgaaggtactgaacagttacgaatcccttttaatttaagtccggcgtttccccgtataatcccgcttccggcgttcatttacgatatgattcagaatcccgccaccgataataataacggctgccatcatcagcacacgtttcgccccttcctgcggaagtgtgctcttagacgcaatcgacgtagtattgaattgaagggtatattcgatttcatgaggcgttcccatcgccagtgtatccgccctgactgtaagttcttttgtcagatccaaaacagggatcgtaaaatgagaatttgcgtccttggcactttcattctcgtattttctattatctaccaccatgtaatcataattggaactgctccatgtgatggatatgtatgccgttccatctgtcaccgtcagaagagcaggactctggatcgaagcctttccgcttcctccggtcattgttacctcgatggcatattcaccatccttcagggaaagcagcgttccagcacctgcctgcgctgtcaacgtccaccggctgctaaataagatacaaatgattcccaaaagaatgaaacctatttttttcatagacagaaaactccttaccctgtgtttataaattctttttcttatacagaaaccaggacgcagcaatcgaaaaacacgccagatacagaagcaggatcccaatcgttgtataagaaaatgcctcatgattggcgatgctgcgaagcgccgcactggtctgcgataacggcagatattcaatcacctggcgcagaccatccggcatactccgggctgaaaagaatgtattgcacagatatgccatcggcataatcacgtaattcgaaaagcgcggcacatcggcatggtttttggcataaaaagataccacaactccaattgtggaaaacacagatccgtttaaaaacattagaagaaacgaccagccgttaaaacagagccccgttccgatcggcaaaatcagaagaataatcacggctcccgcatataatccccggagacttccgccgatgatctgtcccgcgatgaactgccacagcggggtaggagagatgatgacctggtcaaatgctttttcgtacaatctctggacgtttaaattctgggcgatagcattgaaactgccgttcatggtcgtcagggcaaccactcccggaatcagaaagttcagatacgattgtccgtgcgacatggtctggattccaagaccaaacaccagaatatataaaagaggggcaatcatggcagccagcgtgattttataaaaatcccgccggaattctacccatttttcccataacacagtaagaatacccatttttaccggcattccagctgctgcccgattgtctccagaaatacatcttccaatgtcgtactgcgaagcgctgtttcctgttctgacgcggacaaatactgaattgcctcctcctttccatgaaaatagtgtgatttcagcccatctggtgaagtctcatcaaccgcataccgccccagcgtctctatcatatgccccggagcatctgtttcctccagacgtccaccgcacataaagccgacacggtcacaaagcgtttctgcttcctccatataatgcgttgtcagaagaatggtaagcttttgctgattcagctttttcagaagattccacatctgacggcgggcaaatgcatccatccctgcagtcggttcatccagaagaaggatttccggttccgttaaaagtgcccggcagaccatcagcttccgcttcatgcctccggaaagctttcggacggttctcttccgataatcgatcaacccgcagaattccagcaattcctctgaccgctcccgaatctttttgatcggcatataataaagatgtccctgatattccataatctcgttcatcgtcatatcctgacgcatcgagtattcctgcgtaacgacactgagtttttgtttcagctgatttttctgacgggtcagcagctctccgttgatccagatttcacccgaagtcggaagcaggagagtggagagcattccgatggtggtcgtttttccggcaccattcggtcccaaaagcccaaagaactcgcctgtctcaattttcaggttcagatcctcgaccgccagaaaatgatcgtatttttttgtcagatgctttaattcaatcatggtccccttccttcacgacaataatcgaataataacttgcccgttctggaatttcatcgattttatgataaatatgctcctctggcataccacaattttcgatcatgatacctgtcatatgcttttctttcagggtcgccttgacaagcggcatcttggaagctgctttcatcagaaccttggtacctggaagttccagcgccgcctcaatatcataagtggacggaataatatgaagctgttctgagcggtcaacaagactgtcctgaagcttggcgctgaccgcgcagaaggacggaatgccattgatgatttcagttgcataaccatgtgcttttacaatccgatggatataaatataggtactgtaaatcgtcggatctccgagcgtgaggcaggcaacatccttcccctgttccagctgctctataatctgattcgaggcagcctggtatgctgcatttaaaacagctttatcttttgtcatcggagtagtgaggtttaagcattccttttcatccagattttccacgatcccactggcaattttataggaaactgcattttcctttccatccgccggtaccgcaatcaccgggcacttctgaatcgtgtcaactgccagatacgtcatgagccgcggatcgcccggacctactcctacgccatataaggttccttttatcataaacatttcctttctgtgaaaactgtgagaaattcaagtgttcaacttttaaaatttttgtacgatgccttttttgcttttttaataaagtacgaaattagcctttttcaaaagtaaaaaattttgtactttatagttagtggttaataaatggcttagatacaaggattatagcataaagtacaaaaatttcaaaatgcactttatttcagaatgtactttatttcgaaacagaataaagtacattttcaaatcgctccattttggaaatttcataaatagtggaataaagtgggttacaagaattccaaaagcagttatccgcaaaaagggttaatgtcaatggaatgtattttggatatgttccccaaaatggaaaacaaatacagatgagcttacccgatggctttgactgttatcagtctacaccatcggtttcctcaagtccagctaacccctgaatagtaactgagaggtcattgtatagtatgaagttgtattctagacagaaaaattttttggatgtatactatagagttggatttactaaaaagcaaaagcaggaggaaataatactgtgcgcgatgtactgcgggaagaaaagaaatttctgctgaatcaggcagaagctttaaaactccggaattatctgtcaaatgtggttcataccgatttacataatggatccgatggttaccaggtacgttctttgtactttgattctttgtcaaatcgggattttcaggaaaaagaagatggtctggagttaagaaggaagtttcgtttgcgggtatatagtcctgatgcggattttgcactgtttgaaatgaagcagaagcagggaccatatcagcgaaagcgatcattaagattatccagaaaggaagcgcaggctctcattgagggtgattattccgtacttttaaacagtggcagtgagtttggacaggaatgttattcaattatggaaatgtgggcataccgtcctaaaacagttgtagaatatgacagatttgcatttatcgcgccagaaaactctattcgaataacctttgattccaaaatacgggctaatgaagtgaattttaatgtgtttgatagaaatctggtgttaaacagtgtaatgtctccttttgctgtagtgctggaagtaaaatacaatggctttttgttaagctatatcaagcatatgcttctgcccgttcagaaaagcgagctttccgtgagcaaatattgtatggcaagacaaattggctgtaactacaggttttaggaggaaaggaaatgaaagagacgatttataacctgcttgcccaacagggggatatgacctggcagcaaattataatgcatattctggtaagtgctgtcattggtctgtttatttttatttcatatgtgatttcacataagggaacgatttacagcaaaaaatttggagtaacactgatcgttctgacggttatgacaggaacagttatgactgtcataggaaacaatattgcattgtcgcttggtatggtcggtgcattatctattgtgcgttttcgaactgcaataaaagattccagagatactgtatatattttctggacgattattgtgggaatatgctgtggagttggagattatctggttgctgcagtaggcagttctgctatttttcttatttttcttatcatgggagcgattcgcagtgataaccatatgcttttgatcatccgtgcaaaaagaagccgctgtgaaaatatagaatctcaggtctttcgttattttgggactggtgtcgttcttcgggtaaaaaatacgacagaggaaaatgctgagtacatttatgaattatccagaaaaatactggagaaagttcagaaacagtatccggctttaacagatgatttctataaccttggacaaatcgaaagtgttaatattgtagctcaaagcgatgagatttataactgatatgaaatacaaaataataggatttatatgctgctttgcggttatcctgattgccgtttttgcgccattgtcttataaggactaccgaaaaacagagagaattcatcagcatgaacaggaaattccccaggaaccatgtacggatcctgcggatggcggtctgtgtacatatcttccgattgtcaaaattgatacagatgggatggaaatcccgggaagacccattaaggatgatggaaacaaccgcatttatacacgcgctacggatggggaaactacaattgctgctcagatggatataattgggaatgacagcaaagagtaccatcatgcaaatgaaacggcagatgtatcttctgaaatccgtatacgaatgagaggtaattcctcaagaaagtttgataagccaagctatgccatcagacttgtagataaaaaaggggaaaacaatccgctttccattatgggaatggatgcgcaccatgaatgggtattatacggtccctggctcgataaaacagccatacgaaattatatgttttacaatcttgccggagaaatgatgtcttatgcgccaaatgtaagattctgcgaagtaattcttaatggtgaatatgaaggtctatatgtaatgactgaaatgataaccggcggaaaagatggcgccaggctgggacttcgtgtaaatgccaagcgcagcgcattttccggatacctgcttcgcctggatcatcagcatgcgggcgaagaagctttaaacagctttacaacgtatacctacaaaacccccttcctgctgcagatagaatatcccggaagcaggaacagagatgccagactgacagaagaaatccggcaggatttttcaaattttgaaaaaactctgtattcatatgattatgacagggaaaaacatggctacacttctatgatagatgtagacagctttgtagattactttataatcaatgagctttccagtaatgcagatgccggaaactattccacttatatttataagggaaccgataatctgtatcgtatgtgtgtatgggattttaataatgcctgcaataactatttcgaggaggaacttccttatacaggatttttcctgaacaaccgattatggtttgaaatgcttatcaaagatgaggattttactgaacggatcatccagcgatatcattccttgcgaaaaggtctgttaagtgaggaatcactttatcgttatatcgatgaaacccttgattttatcgcaccagctcttgcaagaaacgatgcacgatggggaagtgtggaacagcaggcaaagggacttctggttccggtatcgagaaatcttgacagtagatctgccgctgaaggacagttaaaaggttacttgcgaaacagaggaaaatggctggatgaaaacattgagactctgcgtcagtattcagcatcctcccgtgtaaagcagtataatgaggttaatgattaaaatatgaaacgatttattatcagtatatctgccatcattctgcttgtatttattggatttatagctgtgttttatggcggattttatgtggactcaggccgggacaatcatataaacacatttgtccggactgagaataaagagatacttataaaggacaaagataagtggaaaccatttgaagtcagaggaattgacatgggaagcggtattccaggtgaatggtctacagattatgcgattaccaaagaaacctatctgcgctggtttcagctgatccaggaagcaggagcaaatacgctgagagtctattctgtccagaatccgtctttttataaagcgttctatgaatacaattcccaacatgaggagccgttatatttacttcagggaatctgggtaaatgattatatacagaactccctagtggatgcatatgccgactcctttgcaggaaagcttctggataattgcctggtcactgtagatgtgatccatggaaaacgacttatcatcaataatgatgcagatacaagtacaggactttatttacacgatatctcgaaatgggtgctgggatatattatcggaaatggatgggaagatacaaccgttgcatatacagatgagaaatatccggatatggaaccgtataaaggaacctatcttactgcttcaaaagatgcctctgcctttgaatccctgcttgcagaaacaggtgacaggatgctgtactatgaatcaacaagatatgatgagcagcgtctgatctccttttccagtggaaatgcaacagatccctttgattatcctaaagagattgcagaatatttccgaaaatgtgcccggatcgacgcagaacatataactgcaactgataaatttatatcaggtcagtttgccagctacagtgcatctccatatgatcaggattacctttcctgtatggaatacacaacatggaacagtttgtctgataaaaagatcgactttagtgactgtatcactcctgacggaaaacggaatacttatcgggcatatttaagacttttaaacgaacatcatacaatgccggttttggctgttgaatttggtgcagccacaggacgaggtgagattcaggagaatcaggtgaccagcagaggacttggatactattctgaaaaagaacagggaaagattctggtagattgttatgaagacattatggctgccggactttccggaggctgtgtctattcctggcaggatgaatggttcaagcatacctggaataccatgtatgctgtagatttaagccgtaatatttactgggaagatgctcagacaaatgaccagcattttggcttgctggcatttgactgtggggaaaaagaaagtgtttgttacgtggacggggatacttccgaatggacagataaggatatggtgatccaatatgaagacggctctttcatcagtgtgaagtatgatgcctccgatgtttatttatatctccataaaaagggctttgatctggaaaatgacacgctgtatgttccggttgatacgacccctaaaacaggcagtacccgtatggaaaattgtacagcagaatttgaaagacctacagattttgtactgatcttgaatggaaaagataatactcgtctgttggttcaggatcggtataatcccattcatgccaattatgaggaagatattacaggagaagattcttatattgatccaccggctcgggatagcgctgtattcgaaaatatctgcatggtattacgggatgttattggtcagtatcaggatgctgccacaccgttaagaacctttgaaagtggaaagctgtattatggtaatggaaatccatctgcatctgcttatgattccagggcagattttatctgtaacggagatgatgtggaaattagaatcccatggcagctgctgaatttttctgatccgtcccgaatgcaaattcatgatgattattatgacggaaattatggcattgaagcagtggggatcaaagagatgtttataggtcttggcagagaaggaaatactatcgagatgggacggcttaaactgaaaggatgggaaaatacagtatcttaccatgaaagattaaaagaagcataccaggttctgaagacatactggacaggaaaggaacacgaatgatagcacaatttgtgattgttttttattttattgtctgtgtggggattattctgtttaactgctttatagagatagtttcaagatatcgttcctgtgttctgaaaaggagggaacaacgatattgcgaagaatacagacagctgtttttagataatataacggaaaataaaaagcaggaaaaaaggctggttaaagagctccagtcaaccagtagacttctgacgttcagtgaagcattatataaagttgaaaaccgtatgccggaacaattccagcagggaatagcatctgtaagtcggctgatggaagaactgataccagtttataaaagaaaatcggatatggaaaaagcctgcttggcttatgtatttgccatatttcatatgacgaaattccaggctaaggaaattgttttcccatttctttttgacctgcttggaaataaaagtctctattgcagagagaatgctttgcgggcgttatacagttcagaagatatacacgcaattatgcaggcattggaattcctgaatgcaaatgagcagctgcttccgcataaaaaaatacttgcagatggacttctttcctttaataaaaaagaagaactgataccactcctttggaaaaaattgagtgaatttcatccaaggatgcaggtaaacctgttggattatattcgatatgcatcgtcaaactggaaggatgaaatgctgtc

SEQ ID NO: 11046 - DNA, 24983 bp, Unknown
  gut microbiota DNA sequence
aaaagaaacaaaagcttcatttatggagaaagcgggatattcagaaactgtgtgaacatcaggcacatcggaacggaattcgtgtgtccatggtcagtgcccggaacaccagcaggctggcctgtgacggaagcggagtggtagtaagaaacccggagaaccatagcctatgtacctttcgaacgggaaaacagtacaactgcgacctgtcagcatcctataatatcggagcgagatattttatacgagaattattaaaacccttgccggaaacgggaaggtcttcactggaggcaaaagtacctgcggtgaagcgcagaacctcatgtgtttatgcagatttaagaaagctttatgtagaagtaaacaatttaaaagcggcataaacgcaggcagatatacagcggactacctgtaatgtggaaaccagccgtatccggcatgggaaaagtgcgtatccgcacgaattctaagttactggcgtatccgccgatatttagtcttgccgtttaaaacggctgagaagcacgtgactttagccatgtgaggttcactgtgggatggtttagatttacggcatatttggtgtcggcggtcaagcgtcgcagaaaagattatttgctccagctttataaacgcagcagtatcgtactgaaatagttgatctcgccccgctcgttgttcagcactttccgggctttttgaaatagaatagaaaccaccacctttactgaaattgacaacagccgctccaaaccggagcggctgctatgcaaagttttgactgtaccaagtataacagatatggatttacggcgaaagggcaggactgtgccaatgtagagacaattttgtgccacccatgtttctttgaaacattatagcagtgattccaccagctgatggatgtcggtaaatggattgacagcaattccaaacggtttgctgctgtcattttgaagatggtattccacggctttccggatcaggctgagataatctgtttcacctccgctggtgcggcttcctaccacacgaatatcaatgtttgtctgacggttgcggtagtgttcaaaatacttaggctcagtttgagaaccctccgttacaatcagagtgacaggctttatttttctgcgtcgctgtccacgcttttcaatttttccacgtgccattttacagccctcccttgataaaggggatcgcaccataacggccaatcagatagcccttctccaccttagcatccttgcggatggaaaaatcgtaaagggagaacagatcggtagccgctgtttgctcgtctttttcggtaaaccaaatctgatctctcctcagtacatccaggttaagaagattggtgttgtgtgatgtgaaaatcaactgggctccatttggattgaactccacactgttaaaaagcgagaccagatgctttgtcagaagaggatgcagatgagcgtccatctcgtcagcgacaagaagggttccttcatccagcaccttttttacaacaccgatcagtttgaaataactgttggtgccatcagattcctctgccatgttcagcgcgtaggaagaagtatttccctctgtatcctgtaccgtgtgaatggcctcaatattggtaaagatatcattacgctgagaaggagcggattctgcatcacgcatctgaagggattgtatgccaaaatctgcaacacgcagcatagaggcgatcacatgccggtagtcatcctctttgagttgttctgcttcaaggccgtaggcgtctgcaacagaatgtttcgtgatgatctggcaggaagcaaaccattccagaactggaatcactttggaatagctccagtttgatgcgacagacagatagagcttgttggccgaagtgcgatccttgagagtgttttgttcatcgacatcaacggtaaagcgaaaatcttttgtgtcttttcgctcaaaaatgagtgcctgcctgccattgggatagtaatacagatattcttcgataacagctttgtctgttacagaaaagccatacgcatagcggatgccatttgtggtgaagatgacctcgaagctgctggggcgagagggtgtttcccggtcaaacttgaaaggcgaacgatcaatggttttgtggagctgctggttatgcgaagtcagcacataatttaccatgaaccaaaacgcattcaagacattggactttccagaagcattggcgccgtaaatcacagcagacttcaaatgctttttgtttccgtccacaatcaggtgctctggatgttcgttatccttactggcaagcagggataacacgacattatctttgatagagagaaagttctctacactaaattgaatcagcataaaacaacctcctaaatccttgttataatatattatatccacatttttgtgaaaaatcaacgcaaatgaaaaataaaaatctgtatagaggatttaatagaacagccgtgtggagaggatatgtggggatttcttctttcttaggaagaagaggatctttgatttcttcctcggaatttccgttactgggcacgtatgcgtgaacagtaacagtactcaattttggggattgcctataagcaggagaaaacggtataattgaggaaggcagttgggtataaggggtacaagtggtggagatgaaaaatattgtgaagacggaaagagggcggttgtctgggatatgggatgatgcggatgatcgatgcggtgcatcgccatttacataaatagatagaggaaatacgatggaactgaatttaagcgaaccgggacagagccgatatctgagagtatatgaatattacaaagaattgatcgtgtccggtcagatgaagccgggagcgaagctgccgtcgatccgcaaatgttccctgcagctgcagctttcgcggacgacggtggagacggcgtatatgctgctggcggcggatggctatatcatttcgcgtccgcagagcgggttttatgtaacggatgcggtgctggcggctgcaaaccgggaggaaatagagcacggtgtgccgcatcaggaggaacgcccggaaatccggtatgattttgcgtcttcaaatgtggatcgggagagcttccagtttgatttatggcggcgctatgtcaagagcgccctgcgccaggatgagcggctgctttcttatggcgaaccgcagggagagcgggaattccgggaggcgctctgcgcgtatctggggcgccaccgcaatgtgatctgtacgccggacagtatcgtagtaggggcgggtgtgcagagtctcttgcatattttgtgcccgatgctgcgggagcgggacagcgtatggttttttaatccgtcgttccggcagggacgccagatttttgaggattatgggttttggactggagatataagagagtattgggaaaaaactgagatgaggaccggatcctttaagatggatttgtgtggaacggaaaagtcagatgtatgtgcaaaagaaatgaaaacaatgccatttgaacagacatcagaggcaatgaaatccacggggaaaagtgtctgctatttaacgccttctcagatgacagtctggggcgaggtcatgccggtgggcgaccggatgaagcttttaaaggatgcggcgcgcgaggatatgctgattattgaggacgattacaacagtgagttccgctattataaccgcccgacaccgtccctgcaggggctttccggagggcggggcgtcgtgtatctggggacattttcaaggctgcttctgccatcgatccgcatgagctacatggtcctgccgccggatctgctgaaacggtatcaggagcgggggcgtttttataaccagacggcgtccaaggcagagcagattgccctatgccagtttatacgggacggacatctggaaagccagatccgaaagtccaagaaattgtacgcggcaaaggcaaagtgtctgtgtgatgcggtgcggcgcatttttggagaaaaagcgcgaacgcatctgggcgatgccggttttctggttctcatggagcttgacagcccgcttacatcggcggaaattgccgggcgtgcggcacaggcaggcgtcgccgtccgcccggtggagtcggtcgggagtcttttggaaaaacaggagcatcattttcaagagggatatccgaagctcctgttgtcctgtgcctcgatgggggcagagcggtatgaggaggcgctggaggtgctgaaagaggtagtgtataagaaagaaaaatagaagatagatatagaagttaaaatgtccgcataaaccacagccagtacccggaaccatccgggcagttgtgggtatgcggacattttatgcgacattcttatccgtttttctcctcatgcggcagccggttccggagcagccgtttttttaattcactccagtgaaatggaattagcgggtaaatataactttttccggcgattgtccggttaaagacaaggcagccgacggcaatgagtgttccggcgatgaagccccagagattgaggaaaaaggtcagaatcaggagcaggacgcgcatgaatttgagtgcgtagccgagttcgaagctcgtcatcgagtagttggcgatcgtgacgaacgccatatagagcatcgtctcgctgttgaaccagccggatttgaccgagtattctccaagcacgataccggcgatgacactgagcggtgtcgtcagcatgctgggggtgttgactgccgcgagccgcagaccatcgatggcaaattccaggatcagaagctgatagatcagcgctacatggatctcgtcggtgacacggataaaagcgagccattccgggatccagccgggattctgcataaaaagcagccacagcggtgtcagaaataaggtcaggaaaaagatgaccgtccgcgacaggcgcagataggtgccggtcagcggtggaaaatagtagtcgtcggcttcctcgatgatatcgaaaacagaggatggcagaatcattgcggatggcgaattgtccaccagaatgatgatatttccttccagaatcgaggcagcggaggaatccggacgctctgaaaaacgaaattttgggaacggattgaaccatttgtgcggataaatacattcggcaaggctttcctggttcatcgagagggcatcgacatgcactttttgaatccgggtgcggatgcggtttaaaagttcggtgtccacccggttttccatgtagcagatggcgatatcggtgtgcgaactttccccaatattcatgatttccatccgcagcttcggatcgcggatgcgccgccggatcagagccgtattgaacacaagcgtttcgacaaaaccatcgcgcgagccgcgcaataccttatccttttcaggttcgctgactccgcgggcgggataggtgcggcagtctattgtgagtgcctgtgcatacccgtcgatcagaagaaaaggaacaccggagagaagctggataatcagcgcgtccgaatccgtttccagcccgatttcgccgtaggcgaggtagagggcggcaaaatcgtttgcattgtcaggcatctgggcggtttcaatgctgctcatcgcctgcagcacttttaaaagcgtatcgtccttggtaaaaccatcaatacagtagaggcaggcatcgcgcccgccgatcatcaggttccgatctacgacatcaaaactgatgtccggtcggagctttttttgaaaaaaagtccggttattttcaatggatgaagaaatctgcatcgtgtaaatctcctatcagagaagccaatatcagtgaccgcgaagggactggaatgggacaaaatgtttacagatggagtatgtgcgaaaaggataaaaatatacgaaatgaagcaaacagaaaaaaattctcaaaatatgtttttttaaaattcatggcaagcgaggcaatatcagggaaaaaggaggaaaaatcgctgcaaaatgagacttaacatgtgctgaatggaaaaagaaatttgcatgttagttttagcaactaaaaaagcaatgctttattgagaataaaattcaattaaaaaatagataaaaattctcatttttaaatagatttaaataattgacagattttattagattagtttatactaacctcctcggctgtctgggttagggatgactaatccggtgcggagagtaagatattacaaaagattatatggaggaatatgtatgaaaggtaagggaagatcccggcaggcaattctggcagcggtgaccgtgttagcggcggcgcaggcaggtactgcttatgcttcaaccggaccggcatcggagtccggagtacagaccggcgcctggattcaggaaggacaggactggaaatatcagggaacggacggaacgctcaagactggatgggttaagaccgagaatggctggtattatctggatccgcagaccggacggatgatgactggatggatcaccgtcgatggacgccggtactatatgaacacaactgccgatggcgtggaaggacagatgcgccgcggctggtggaaggacaatgcaggaaaatggtatttcttcagcactgcatccgacggaacggaaggtatgaccgtgaccggatggcagtggattgatggaaaatgctattattttgataacttgagtgcagaaaactatggtcagatgcacaccgaaggtcggacgccggacggctacagcgtcaatgcggatggacagtgggtcaatgaaaatggagaggtccagacccgtgcggatagaggttacgcgagcagcccggcagcagacggcaacggaagcagcgtatcaggaggcggttcggggaattccggcagttccggcggcagccattcggggggctctggaagcaacagtaattctggaaataacagtaattccggaaataacagtaattctggaaataacggtaattccgggaatgacggaaatcagaatggcggaaatgccggagataacggaaacactgaaaatccagacaagccgcagatggtttcgctggtagatgagacgaagacaaagcttaccgaagtaaattccctgggctggtggcttccgatcgcatttgatgagggatacaatgcaggcaatacggtcgttaaggtcgatggaaaagatgtaaccaatcttttaactccgatcacagatgacggacgtatggcaaaactggcgcttcttggcacaccgggcaaagtaaccgtcagcagcaaagaagatgcggcaaaggaagagacggtggttctgagcaatgagagccaggaagatgctgtatatgaggaaaacgacggctatctgcctgagaagattctgacgcatgagccggttgcttactgggactattatctgaccaattacgatgaagacggaaatccccgcatttctccgaaaaaaactacttataacttgaatgaggaaaaacagactcatccgagctactcaccggatgcagttcttccaaaaaatggaaaagcagctgttaccattctgtttaactataatacaaatgaggaaaaagagtggtttgacggcatccgcaaactggaactggttgaatacaatgagcagaagaacacaatcaattcgagtctcgtatttgacagtgaaaagaatgtggcgcacggacagggacgcgttggacagctgactatccagacaggacagagcaatttctttaataatggacgttattatgtgcgggttgtatcgtcggcaggcggttccgcgctcgtcccgattcatgtcgtcaatgagacagtaccgacgctggagcttaaggaaacaccgcagtccggtaagaatctccattttgcagtcagcgatctggtatacgcaattgagacaccgatcgagcgtgtgacactggaagctccgaacggaacagtaagcgaccttaagatgatcgatgactggtatctctacagccaggatttatttgttctgtacaatgataatacagaccatctgccatacaagggcaattacaagatcactgtatatgcaaatggtttccggtcattctccaagagcttcaaggtgacaacgggcgcagagccggtaaaagagaaggaacagaccaatggccagaaaatggcggcatacggattcgacggtatcagcaccgcatcgactggttccagcggaagtggaagctccagcggcagcagctcaggaagctctgcaatctctgcaaacctgatttttgattcagatctgcttgtaaatgcacatctccttgaacagaccaagatggaaaatgatgcgtccaaggcagtgatggagtggtggtacaatgcgattccagatgcagtctttgatactggagatgatgatttcttcagatggacagactacgtaaataagagcgagaatcagaaatacgaagagaacagaatgctcccatttgcagattaccgtgaaaacggagtactggatccgaaccatccggcaacggcaaaagaggttcttgaagatggtctgctcggcgatatccagtacaatggaaacttctcccgtcaggatgcaccggcgattacagttgtacagaacaaagagggcgatccggtagtcctgaagacagaggatacaaagtatatcgaggcagttcagggtatcgttgtcaatggaaactggcaggcactcagcaaggataaatattccatcgacaaagaagctggcaccattaccattaatgcggatgtattcaaggctggtgaggagtacaagctgaccgttgatgcaacgggatataagagccagagtattgcatttacatataataaggtgctggagagtgatctggcgctgaaggttgattatgcggatgctaaaaatgcattttcagcaaagaagacagtagatggaaagaaaacatactactttgcagatgctgaatttaccgttgagggcagcgagggagatttcttgaagaacctgaaatctgttactctgctttccgatgaggaggatgctgttgagagaaatatctacacgaagggcgtgtccagcagcaacgatgtttactatgaagtatccggggatggcaagaagctgattctccatcaggttcagccgggaagctataagctgactcttcgttcgaattactacacagaggcgctgagatgtgaatttgtggttgagaaggaagaggaagaaattcaggaagagatggcagctccagaagtagtggagttcagcaaacataaagccagctggtcatttgatccagattttggacgtgcttcttttaaggcttcaaagggaacgagtgtaaaagattacctagctaagattacatccgtgaaggttggaaataaagagtatacaaaagcttacagccttagttcgtataaccctacatggaagatgatccatataacaatgtacaggattttgattgcatcgatttcactttagacggtttcagcaccgaagaaagcaccgatgtaacgatccaggcagaaggatacaaagagcttacctttacagttacaaaggatatgaagttagcgggtgacgaagagaaactgcttccagcaccggaactgacaggcagcactacggttgatgagggaaaaccgctggttctgactggtgatgaggagtatctgaaagcaattaagtctgtaaaagtaactggcaatgatgaggaggaagatgttgcgcttggatttgcagtaaatggtacaacattgacaattcagacaagcgcactggatagtggtctgaatgaggttgtgatcgaagcgaaaggttacgataatcagtcgatcatggttacagttgagagccagaaagcggatacagaaattaaggtttccagtgttgtaacagagagtaattggggaaataagtatttactgattcgcttcaatggagttgagggagaagagctaaaaaccttcttaaagaagattaattcggttgaggtaaatggaaaaccgtatagcaaggcattcagttctgcgtcccttggaagtggtgagtttgcaccgcatgcaacggatacatctcagagcaatgataattacgattgtttaaaggtttcagcgtccggactgagtgaagaagaggagaatgaaattcttatctatactgggaataacgaaacgattgagtgcaaacttgataaaagctggaaattaatcaagaaatcccaagtgcttctcgccgacgaagttctcccagatgagatcgtcgccacaccggagcaaacaccggaagagccgaagacgaatgacgaaaacaaggcagatgtaccggatggcgataagaagaacgagacagacgatgcgaacaaggcaccggaagtagacgaggacaagaaagaggattcggacgagtccaaggatacttcggatgagaagaaagacgaaacttcagataaaggcgatgctgacaaggatgattcgaaagatgaatccggcgaaactggtgacgattccaagaagaatgaaacggatgaatctaaggacaatgattccaagaaggatgagaccggtaacgtaaaagatgatatttctgataaggaagaatccgacggaggtaaaggcgatacttctgagaaagaagagtctgtttctgaagaagagtagttgtatttaaaggagtaaaaattgaaacagaagtggtggattttattaactctgctgctgtgtggctgcggtgcttcatcgcagccggatcaaacggggacggtccagaatgaccgtcctcgtttatctgcgtctatggaagagacggcagaaaatgtggcagcagtagaaaaaaacgaaaatttagagaaaaatccctcaaattcgaaccagaatccgggagaagggcagaattggacagtgtttgcgatggatactgtgatgcagtttgacgcctacggcggaagtgcaaatttgcaggaaaaagtgaaacggcgggtggaagagctggaaggggagctttcgacaacacaggaaaacagcgatatttttcatctgaaccaggagaaaacggcggaactttcagcggatacgcgttatctgatgcaggaggcgctggcactgggagtcgaaacagatggtgcactcgatatttcaatttacccggttgtgcaaagctggggatttacaacgggaaattaccgggtccccagtgagagcgagcgggaaagcctgcttaaatcggtcgattatcgtctggtcggtttagaagcagatacggcatcgatcgagccaggaatgatggtggatctaggcggtgtcggaaagggatttaccggagatgaggtggtaaagactatgaaggaggatggcgtgacgagcgcactgttcagtcttggaggcaatatccagacgatcggaacaaaaccggatggcgagaaatggtatgtcggcatcaaggatccagagagcgacggctatctgggcggagtcagggtgcaggatgaggcggtcattacctccggcggctatgagcgctatttcacggatgatgacggaacaatttactggcatatcatggatccgtccactggggcgccggcgcatagcgggctgatttctgtgacaatcatcggaccgtgcgggctgcgctgcgatgggctttcgaccgccctgtttgtcatgggacgggaaaaggcagcggcacattgggcggcgcatcaggactatgaggcagtcctagttgacgagagcggcacgatctggctgacgccgggcttaaaagaccgatttattccggtggatcaggggggagacgcgggagattcggatattgtgattctggaacagatctagtataatgagcagagaaaagtgcatgcgagtcagatttacaatttataacgaagaggtcgaaaataccgtgaatgatagattgaaaaagaagcttctttgctttgagcgcgctctctccacattggaaggatacgagggatggatgataggcacaactacacttcatctggactggcagcccaaacagggggagaatgagttttgccataccaaattaactccagaaatcatcaaaaaaggtcgctcggcaatccgggtccgcatagcggtagcggaggaggaaaaggaacgggaaaatgaggagatggaagtgctgctggtaaaaccgcgccagagcgtccttgtcccggaaaaagagaaaatgccgctcatgaaagcaattacggaactgggaagtgaggatgatgatacgctggcatttagccgcagccagatggaagaatatctccgggaggcggcagataccaatccgatccatcagggagaagcggcagttctgccggggtttcttgttatgaatgcctgcctgcttcgtctgtggaagaagggctggatgaagggacagaccgctctggaagtacgttttcttgccccacttcgtcctgatgaggaggtatatttgtcggattcggggcaggagggaagaaacgcggtgtatctgagaacgaagcaagagggaaaggaaattctttcgattacagaaaaatagggatgccgatgataaagtgggtgcagaggagctatggatgcatatgtaaaccatttataaaaacaaggttgacaatcatctgaaattccgatatactcttttctagcaaagattctctgtgtgtgattcataggaaaatgcattacacggcttagaattttatcactgaggaggtatatataatgagttcagagacaagtgcagtgaacgtacacggcgcatggagcgcgaagcggcttacacttttggcgatgatgctggctctgatcagtgtgtcttcgtatattgcgattccgcttccgttttcggatgcaaagatcacagcgcagacgatgattgtcaacctgatcggtctgctgattgcaccacaggataccattttagttatggcgagctggctgctgttaggcttatgcggcgtgccggtattcagcggcggaagcgcaggaccgggaaaactgcttggaccgagcggcggttactatatcggatttctggttgtagcgttcctgatttccctgttttgccggaaatggaaaaatgttgcattccagacagcgttcctgattgtagttggtattccggtgatttacgcattcggtgcaggctggatgaaacacgtgaccggacagccgtggggtgcagttatcgtgcagtcgataattccgtttattccgctggacatcgttaagtgtgtggcagcggtagcacttggaaaggcgctgaagcggacgggcttatttggaaattagatagaaaataaagatgggatgtggtagtgaacagaatcagccttttagtgcagaaatgcagccaggaggcatgaggagtccgttgccgcatccctttaattttaattaggaatagaagaaaaacaggagaaaagcatgaatcacgtatatattctgggcggtttgcgcagttacatcggggtgaaagatggaatgtaccgtcatatcccggcggaaaagctgggggcggaggtgctgcgggaggtggtttcgcgatttgagcttccaaccgatgcgatcgactatataataggaggaaatgcggtcgggggaggcggcaatatcacgcgtctggcggcactttcggcagggtttccagagcggattccggcggttactttggatctgcagtgcgggtcggcgctggaggcgatcagcgcggcagcagccaagattgagagcgggatggcggatctggtcattgccgggggaatggagagttcttcggtacagccgtaccgcatgatgtccccgaaccatccggagtatgacggtggaaaggtgtatacggttgcacagtttgtgccgggaaagcgcggcgagcaggttatgttagagggcgcggaggagactgcgatccgggaaaatgtctctaaggaagagatggacacctgggtgctccggagccataagagggcggcgcaggcgcgcaaagagggaatattggaggatataacggtttccatcgacggcagcagccgggatgagggaatccgtccgacaatgagccagcgtctgatcgaccgcctgccgtatctgcttccaaatggcacgaaaatcacggcggcaaatgcgtgcctgatgcacgatggcgcggcatttgtggtactttgttcggaacggtttttgcgggaacagggacggaaagcagaatgccgtttccggtttggtacagcgatcggggatgatccgatgatgagcccaaaatcagccgtcagcgctgctaaggcgatacttgcaaaaacggggcattcttatcaggagatcgatgcttttgaggtcaatgaagcgtttgccgttattgatgttctatttgaacgtgcatttccggggattgaagaccgttataatatctggggcggggcacttgcctatgggcatccatatggagtctccggcgcaatgattctgctgcatctgatgaaagcactggaacataaaaatgggcatttgggaatgtgctgcgtggcagccgccggagggatcggaagcagtattctggtggagaaagtaatgaagtagatgaagacagtgcttgaatgatataaaaagtaaatgtggtaaatttaaaagctcaaattggtaaaaagttctatataaaaataagtaaaagacaggaattaatcatgaaagaaatacagacacaacgtataaatacatatctggatgcgctccgggcatacccgccagagtgggaagccctgatcacggagaaagagcgctatacgttcggggagctcatcgaggcggcagaacgtgtaaggaaacatccgaaagagatagaagaaaaacagggaaaacgtcacatccactggatccaggaaccgacgatcgcgcatcagcttattcagtttctggcatatggagacggaaatacggttccggtgattgcaccgtccgatgtaaaaatttccgatgaattgcgtgacgtgacacctccggaaggggcatatatgggtgtgatgacgtcgggaacctccggtcgtcagaaagtattgttccgctcctttgaaagctggcacgatttttttaagcttcagaataaaattttcaaaatgggagagggaagcattacgtttatgcaggggagcctggcgtttacgggcaacctgaacctttatatggcgcagcttgcgtccggcggaagcgtcgttgcggcggattcctttgatccgcgcctctggaagcggatgatcgaggcagaacaggcgacctgcgtctatctgattcctgtcaagctgcgggcgctgcggcgtatctatgagcgggaacaggcggtcaattaccggattatttcttttgtcagcggctcccagagtatgggcggtgcggaggcagtgcagtttaaaaaggcatttcccgaagcggagattacattgtattatggcgccagcgagctgaactatattacctatatccatggaagtgagatgaaagaagatacgacgctggttggccgtgcatttccagaggtggatgtctggattgaaaacgaccattttcatgtaaaaacgcggtatggaatccttggaattggaaatgacgcggtgattggggattgcggtcacacagatgcagagggactcttctattttgatgggcgggatgatgatatctgcaacataaatgggagaaaagtgtcatccctccgggtcgaagaagcggtgcggacatttccgggagtggcagagacggcagtgaaggcagtccatgagcatgggcgcgattatctgaaagtgtggattgtgtgggagaaagaagctgaaagggaagaaattgccggaagtgacagcgaaaaaagtggttgtatcaatatggcaattcgggaatttttggcagaaagactggcagattatgagattccacgcgaatttgtatttctaaaggagtttccaaagactgaaagtggaaagattcgtaaaaaagaactgtgaaaaatgctttttcttgtcaaaaaagaaaattgcttattgtgcaaaatgacaaaagcgacgttgacaaaattggaaaagggtggtatattcccgtctttgacagtaatgtttggaaaaacaccgcagaaaggcttattctatatagcttttccggcggtgctttttcgttttgtgataaatttatagtctgtttcaatccgggcctgttcttttgcccaagccataacgtcatctcttgtaggatcgtgttcaaccagcaattcttttaaggtgccaagttttcgaatagtcctgaaagtagattttccattggcatcaatgtaggattgctttttatttagatatagtttatattgttatataaagagttatatcattcatgttattaggaacagggagaaagaaaatgttaaatagtagtgccgcagtgccgctgtatgtccaattaaaagaaaaaattgaacaaaaaataagtgatggtgaatataaaccaggagaaaagctgcaaacggaaggtgaaatggcaaaatcgtttggagtcagtattattacagttcgaaaagcagtcagcgaattggtggaaaaaggacttgtagaaaaaaaacagggaaaaggaacatttgtctgccagcgcaaagtaactaaggatatgaaaaaattgcagagtttttcggaaatgtgtgctcatatgggaatgaaggccggaggacgtatgcttgaaaacaggctggaaccggcgagtgaaaagatagcccggcttttgaatgtggaaaaaggcagccaggttatctatatatccagagtccgctatgcggatggtatgccgatggcgattgagcgtaactattttccgcttaaatatgcatttcttctggaagaacgatttgatgacaattcattgtttacatttttgaaggaacactctcatacagcagtggcaatttcagaaaaatggattgaactttgcaaggcgacagcagcggaagcagagcttttgcagatggcgaaaggaacttcgatgctttttatcaaaagtgtggcatatacggctgagaaggaacccatttatgtagggcatcaggtgtttaatggagaaaaatgctcattttatgtctgtgaatctacaataggaatcgagtaaattaattgaaaagaaaaggctgattcaggttaggaagcaagaaaaatttgcgctaacaggagtcagccttttctttttatcaggaacatggaaacggagatgatagaaattccattaccgggcacgtatgcgtgaacagtacctagaaaaaagtgatgtaaaaaaatgcagaaatcacttgacaaaatacatacataagtataatatgatatcataacattatataatgatatataatcaatccaaaggagatgaaaaaatgcgggtcattggaattggggacaatgtgtgcgacaaatatgaacatctcaggcttatgttcccgggaggtcaggctgcaaactttgcggtttatgcagggatgctgggggcagagtcagcttatatgggagtgttcgggcgggatgaggttgcagaacatgtgatagcaacactcgatgagctgcaggtagaacacagtcggtgccgtcagtatgaaggagaaaatggttatgcgagggttacgctggtagacggagaccgtgtctttctcggaagcaacaaaggcggcgtattaaaagaaaatccgttaaatctggacgtggaagatctggagtatattaaaacatttgatcatgtgcacacgaccaataatagctattttgatgaacagcttcctaaactggcagaacagggaatctctgtatcgtatgatttttcgggtcagtgggtcgatgaagaacgagtaaaaaaggttgctccgtatattacgtatgcgtttctttcatgtggttccgtttcgagagaggatgcggaagaaatttgtaagaagatgtttcgtgctggatgcccaatggtaattgcaacaagaggaagctatggagcagttctatttgatggaacgcagttttatgagcagccgccgcatctggttgaagcagtagatacgctgggagcaggggattcatttgcaacggcatttctgctttcgtttctggagagccggaaaaagtatggcatacagatgaaagaaagcatttatgaaaaagagataaggaaagcactggaagcaggggcagagttttcttcgaaaacctgtatggttcagggggcttttggacatggaaagtcattttgacaaataattgatacaaaaaaagaaaaggagatcagaaagatggaaaaatcagtaaaagaaattgtagcagagatcaaagaaaagatggacaaactgggtggattaaagcatgtgtattttgtagcttgcggcggatctaaggcagctattttcccagggctgtaccttcttcagagtgaggcaaaaacttttagcgctactacatataccagcaatgaatttgttcatgcaacaccaaaagaactggatgagcggtgcgtcgcagttatttgttcattaaaggcaacgcctgagaccgtggaggcagtaaaaacagccaatgctgcaggtgcagtgacaatcgctatgacaggaaatatgcagacaggtatggcaaaagttggacagtatattgtgacatattcaaatggagatgatcaggtatatagtgattctaaccaggcgaacgcccttcggattggttttgagctgttaaaacagtttgaaaactgggagaattatgacaaggcgatggaagcataccgttacattgatgaaattatagaagaaggcaagaaaaatgttttggcggatgcaaaagcctgggcagaaaaatataaagatgaacctgtattttacgtgctggcatctggttcaaactatggagttgcatattccatgtgctgctgtcatttcatggagatgcagtggaagcatgctgtgtgcctgcatacgggtgagtacttccatggtccatttgaaacaacggataagaagcttccgatgatccttctgatgagtgagggaagaacccgcgcattggatgaacgctgcttaaaattcctgcgcacttatgcggaaaattatattgtaattgattttgaaaaattaaatggcggtaaaatcgataagagcgtcgtagaattctttaatccggttgttatgattccgattgagagatactatgtttcccagatggcggaagtgcgtggtcattctatggatgaaagacgttatatgtggaaagtggaatactaaagatcctccaattaaatattttcttagacagacagcgaggcctgaccgtatggagcagacttcgctgttttgtccatacggacaagttaatttagagtgagcatagtgtaagtaaaaaatcagaacgtttggcatcaaagaattgctgaaaaagataacagacaagtgaaaaaaattgtgaaaattgatatggatgtgtgtgatgaaaaagaaaacgtaataaaaatatgataggaagagaggctgaccccctaaaaaaaatatgtaaaatgacaaattagcattgacaatataatgatatatgatgtattataatgacatgatataaaaaaatcgcttgaaacctgcaggaacaagaagaatttgaaaagaaggtaggaggaaatgtcatgaaagcagatgtgtttgagtatgaaggggaaggtattcagtgtgtatatgacaataaaaaatgggtcgtatgtattaaaaactggaagcctaataatgatattgagaagattcagtatctggaagtgcatcacgcaaccgatgagcagtttattctggttcagggaaaagcagttcttttgacggcgtcccgcgagaatgatgcatttaagattgatgtaattccgatggagccaaataaagtttacaatgttttgcagggaacatggtttaatacgatcacacagaaggatacaaagctgatatatgtgcaggatgcggggacgacaacagaaaacagcgaatactgtgatatgacagaagtggaattgagtatggttagggaaaaagcaaaaaaagcattgcagtagcatcataaaaaagaaatgaggaggacaaaagatggagtttaatgcgtattccatgttggtggatttcatgtgggcaggtattttcctgtttgtggcgaaaatgctgagggaaaaaatcaagattctgcagagcctgtttgttccggtcagtctgctggctggatttatcgggcttgcgttaggacagaatggttttggaattatcagtttttcttcacagtttggttcttatgcaggtctgctgattattgcagtatttgtatcaattgggctgaggggctttaatttttcagctggtggctggaaaacaaattttgatcggattggcagctactactgcttccgcaatattggctgggcgtttcagtatgcaatgccgattatttttgcaatggtagtcctgaaaatagttgctcctgatttaaatccggcatttggaatgttgattcctgcaggctttcagggaggtcatggtacagcagcagcacttggcgcgacactcggcacacttggatgggaagatgcaacggatctggcgatgacaagtgcaacggtgggtattttaaccggtatttttggtggaattattttgatcaaacttggaacaaaaagaaactataccaagtttgtaaaagatttcagccagcttcctaacgatatgcgcacgggactcattgaagaaggaaaacgcccggtattaggcgaagaaaccgtttcaccgatggcaattgatccgctggcatggcatcttcttctgattctgattccaaccggtattggatatcttttaacaaatgtaattcagggagcaaccggacttggcgttccgagcttctctgtcggcttcctggtagcaattgtatttcattttgtattaaaaggaataaaagccgataaatatgtagataaccgcatcatttcccgtatgggaagctgtgcaactgatttccttgtatttttcggtgtggcatcaattaagattccggttgttattgagtacgcagttccgtttggcctgctgatgttatttggaattgtctgggttgtattccactttacagtgattgcgccgagactcttaaaacaggagtggtttgagagaggcatctatgtatatggttactcgaccggtgtaacagcaatcggcatggcgcttttaagaattgtagatccggagaacaagagctgtacactggatgatgcagcaattgtaacaccgattgagtcaattattgaaatttttgcattagcggcagttccggttgcctgtgttcagggaaactggattgcagctgtaacaccaattttgatttacctggcagcgctttgcattgtcccggttgtattcaaatggtggcataaacatccaggtaaagcatgggatgaaagtgagtcttagggaaagacaaaagatgtaaatataatctataaataagcgggcactgtgaaatctgatagagcgaagttttttgcagtgcctttgtgtatagagaggaggaacaactggatgataaagataaggcgggaacagattgcaggaatgaatatgcactataaatacagaactttggattatttctttaaaacgcagcaggctctcggaataaaaaatatagagttttggtgtgcaagaccgcatttcctgctagatgattatgggtttgaggatgcggctgaattaaaaaagaatgcagcagattatggattgacaatcggagctttttcaccggagtgtacgatttataattatgcactttgctgtcatgacgagacggcaagaaagcattcaatcggatattttgaaaatggaatccgtgcagcggcagaagctggtgcgaaagtgatggtattcaattgctgcggcggtgcaagaaatgaagatccgagacgtatttttgaacgtgcggttcaaaccttgcgtcggctttcaaaaactgctgcggaagagggggttattcttgcagtggaaacagtacggccagaagacgcaacggttattaatatgcttccagaactaaaaaaacttttggagtcggttaatgagccgcagatacaggctgccctgaatttgacgagtgctggagtggcaggagagtcgatgaaagactggtttgaagcatttggagacaaaatataccatatccgttttgtggatggacgtccgcagggatgccttgcatggggagatggtttgagaccgttagaggatcaattgatttgtctggatcagtacaaatataaaggattgctaagcctggcactgaatgatgcacgctacctggaggatccggctgcagccgatcggcagaatatgcgtgaattggaaccgtttataatggattaatggagtaattgtatgaggaggaagcgaaaatgaaaatagttgattttgataaactttcggtattgaatcttcattattgccaatatacgttggattatttcctggattgtatgcaggaactgggaatcaaaaatgtagaattgctgggaggacatcaaggactttggctggatccaaaggaatatcaggatccagagccagtccgtaaaaaattacaggaacacggtttgaagtgtccggtatttacaccacagaattgccggtttggttaccaatttggtgtaaaagaaccagaactgagagaaaaaacatttggattttttgcaaatgggatacgtctgggggctgcgctgggggcagagaagatagaagcaaattccggatggggttactgggatgaagcggaggaggatggattgaaacgggcagctgagatgcatcagagactttgtgaggtcgcagaggaaaatggcgtgacaattgtggcagagtctttacggccgcaggaatcaagaattgggtatagtttgcggcaaatgaaacagttatttgatttagtcgatcatccgcgctttaaagttatgattgatttgacagcaatgtcggtttctggtgaaacgattcagcagtggtttgatgtttttggaaaggaaaacattgtacattcacattttcaggattgtgatccctatgggcattacatctggggtgaagggaagagaaacttaagaaaagatttagaggacatggtaaaaaatggatatgagggatattttacgcaggaactgacagcaccggcgtattacctggatccatttcgttatgacaaaagaaatgtgcagaatttgagaatgtacatggaatagaggagagaaagaatatgtggacagatgaattatttcatgtaaaaaaaccgatcattgcactgttgcatttgcgggcgctgccgggggatcctctgtatgaaaaagatgcaacgatgggagaggtaattaaaaatgcagccagagagcttcaggcgctccaggagggaggagtagatggaattttgattgccaatgaattcagccttccgtatgaaaaaaaggtttcctacgtaactgtggcagcgatgggacggattgtgggagaattaaaaaaagagataaaagttccatttggtgtcaatattgtttctaatccattggcgacgatcgatttggcagcggcagtagaggcagattttgtaagaagtacatttacgggtgcctatataggtgaaaatggaattacagatacgaatattccagaagtcttgcgtagaaaaaaagcacttggactagataaaatgaaattgctatataaggtaaatccagagtcggatgtatatctagcagagagaagtctggaaaaaataacaaaatccatgatttttcattgctttccagatggtctgtgtgtttctggaagtagtgctggtcaggaaacggattcaagtttggtacgcagggtcaaggcagtttctggatttgttcctgttttctgtaatacagggtgtacgaaggaaaatgtggttgaaaaacttagtgaatgtgatggcgcttgtgtagggactgcttttaagaaagatggtaaatttgagaactttgttgaaaaacagagagtcatggagtttatggatgtagttaaggcgtatcgctgtacaatgaaagaaggcgtatagacgttgcattattttttaggaattgacgttggtacatattcaagtaaaggagttctaacagatgagtctggaaaggtggtaagtcgggcagttactcatcacggaatggaaaatccagaacctggttattatgagcaggacgcggataaggtatggtggaatgatttttgcattttgtcaaaaatgctcttacagcagagtggtgtagaaccagaaaaaattgcttgtgtagggggaagcacattgggagcagattgccttccagttgataaggatgggcatcctttacgaaaagcaattttatatggtattgatgcacgttgcgtggaagaaatggagtatctctcacagtattatggcacagaaaaagtaaaaaaactatttggacgtccaatttgcagtggagatgtgtctgctaaaattttatggataaaaaatcatgaaccagaggtatatagacgcacacacaagtttttgacaggttcttcttatctaacatttaaactaactggaaaatatgtaatagatacatttttggggatggcttcatttcgtccgctgtattatccggatgggagcatcccgtttcccttaattaaagatattgttgggtaaaaaagaaaggtcagtcgattttgccgatgaagcggtagtagatttctacttcctgctcacgacttccgtcctcgcccttgacagcttcgtggacggttattttttcaattagagtgttcagaagttcggcggtcagctccacagggttgacatactgtttcattagggcaatccacttttcagcatccgctgcggtctgtacggcggcttccatcgtttcgtgaagctgtcttatttttgtttcaagttccttttg

SEQ ID NO: 11047 - DNA, 2452 bp, Unknown
  gut microbiota DNA sequence
agttttctgacttattacttctatgtaatgaattataaaaagctttcatttattatttttttgccttgcaaaaataaaaagcacgattaataaaataaccgggaacaatagcccaactcccatacctgcacgaatattgtctcctgcactttgtgtaacacgtccaacaatccccggacctatgcttccacccaggtcccccgccatagcaagcaaagcaaacatagccgttccacctgccggaaatctttctgatgaaatactgattgtgccgggccacataatcccaacagaaaagccacagataatacatccaatcaaacctgatatcggattcaacgatacagaaacaagcaggtagcatatcacacataaaattccagatccgatcataaatttcatcagatccattttatcaccatattttccgaaaattatacgactgatccccattgtaacagcaaacatgcagggaccggccaggtcaccaactgtctttgacagccccagagcagcttccgcataagcagatgcccattgtgccatagccagttctgatgcaccggagcaaatcatcaagcatatggaaagccagaaaagaggttttcgaaacagttcttttattcccattccttccccctcatctaccaaatgctcgatcggacaggttgcaaaattatagatatttatggccggaacaagcgcccataagacagccagccatttccagctgtccatgccaaacaccgcaaaaaacagtgtagagatcacaatcgttcccactgctccccaacaataaaaagagtgaagcagactcatcgttgcctctttgttatcaaatggacacgcctccacgatcgggctgcaaagcacttcaatcagaccacttccgactgcatatacaatcacactcaggataattccaacaagcggttccggcaaaagctccggcaaaaaagccagaccaaccaatcctgctgcggaacatacctcagaagtaacaatacagatgcgataccctattttgtccacaaactttgcacaaaacaggtctaccaacaactgtgtaaggaaaaagcaggtagaaatcaacgcgatttttccaagtgcaatctgataatcattatgaaatttcaaaaataacaatggggcaaaattagctgcaattgcctgtgtaataaatcccatataacaggctatttttgttttccggtaatttggcatggtcatcactcctcgttttttattgaattatataacataacatctttattttcattgatttatttccgaaatttattgtataatatcgtaaagtatgtttcaaagagtggggtttctatgaatataaatacaacctataccaaaatcattacaggtgaagatttgatggagacagctcagcacggaagcactctctatcctttccagttttactatgaagatctgtccgtttttgatttcaactgtatcgaatggcactggcatactgaattggagtttatttatattgaatccggaaccgttactttgtggattggagaagaccaatttcatttaaccgaaggaaatggcatattcattaatacaaaggtactccatcgcctttattctccctcaaaagccctcattcccaattttgtatttatgccttcttttattgccccttgcgacagcctgatttatcagaaatatattctgccgatcatttcttcctcattgccatttctcgtatttcataaaaaagtatgctggcaagcaaaggttttatctatcatgcggcaaattatttctgcacaggattccgttttatccaaagaactccttaccagttctctccttcagaatctctggctggaaatatttgaaaacacagacatttcatatcaggaagaacacaaggatcattcaaccgcttctcaagcccggttacagctcatgctgcaatttatccatctaaattactcacggagtatctcattggatgacattgcagaacaggcaatggtcagtaaaagtaccgctttgaatctgtttcggaaatatttacatataacgccggttaactatctcattaactaccgtttaaaacaggccggtcagttgctttcaaaaaccgagaaaaaagtcagtctcatttcttctgagacaggttttcataacgttgactatttttgcagattattcaaaaaacgctaccaattaaccccaacggaataccggaaacagaaaagccgctgattgggacggcgctgcatttccggctgccatccgcgggattctggtcaatgccttgccgaaactcatgcatccgacacacagcttggagatttgaatatcctctgcaccaaaaatgtcgatttccatatttatatttgagattctgataagcattacagcggcttttgaaaaatctgtattgatttttctgagcgaggtgttataatctgta

SEQ ID NO: 11048 - DNA, 1681 bp, Unknown
  gut microbiota DNA sequence
ccaagaccgccacggtgccgtcggatttgtggcgcaccacaaattgataccttctgccccaatgggtgcgagaataccaagccgatcctgctgacgctggacgaatacgaggtcattcgtctggttgacttggagcagcaaacccacgaacagtgtgccgcgcaaatggacatttcacgctctaccgtgcaggagatttacgaagtcgcacggcgcaagatcgcagcgtgtcttgtccacgggaaaccgctgcacatcaccgggggaaactaccgcatctgcggaggacaggaggcagcccactgcggccgttggtgccggatgcagagagccaacacagaaaaatccaacaaaaaatgcaaaggagattccattatgaaaattgcagttacctatgaaaacggtcaaatttttcagcatttcggccataccgaacagttcaagctttatgaagctgcagacggcaaaatcactcatgcggaagttgttgataccaacggcagcggtcacggcgcactggcaggcttcctgatgcagaacggcgtggacactttgatttgcgggggcatcggcggcggtgcccaggcagctctggccgaagcgggcatcaagctctacggcggtgtcagtggggacgctgacgcagcagtgagcgcattgctgagcggaaatctgggctacgatcccaatgttcactgtgaccaccatgaccatgagcacggcgaggctggtcacacctgtggtaagcacggctgcggtaagcatagctgccattgatatggaacgcacactgacacaacttccgttctggtcatccttgaccgaacacgaaatggaaacgcttttctgatgtgatgtgggcgatgcagcagatcatgttcaagggattggatcggcggctggcagagtttctccttgccgaagcggaacgtactgactccgacacgatacacatgacccatgagcagatcgcccagcacatcagctcggcgcgggaggcggtggcgcgaatgctcaaaagcttctcggaggacgggctcgtggaactaagacgaggtgcgatcacgctgcgggataagaacagactaaatcgtttgaaatagatgtgactttgtcacagaatgaaatcataattctaatataatgaaagcagaaaaccgaaaggagaatcgatcatgaaagaaacgaaatacgcaggtactcaaaccgaaaaaaacctgatggctgcctttgccggtgagtccgaggcacgcaacaagtacacctattttgcatccaaggccaagaaggaaggctatgagcagatcgcggcgttgttccttaaaaccgctgacaacgaaaaggaacatgctaagctgtggttcaaagaactgaacggcattggcgatacctctgaaaatcttctctctgccgctgagggcgagaactacgagtggacggatatgtacgacggctttgccaaaaccgccgatgaagaaggctttcatgaactggcgcagcggttccgtctggtcgccgccattgaaaagcaccacgaggagcgctaccgcgccctgctacacaatctggagatggcagaggtctttgctaggagcgaagtcaaggtgtgggagtgccgcaactgcggtcatatcgtgatcggtgagaaggcgcccgagatctgccctgcctgcaaccatcc

SEQ ID NO: 11049 - DNA, 6546 bp, Unknown
  gut microbiota DNA sequence
agggcggtgcggaaagagggaaagtcaggaaaaatgaaagaagtaaaagaaataggaagttaatggtaaatctatcttaaatcataagaatttcgagggagaatcagccccggccaaaagtgcgattttggacgggacttcgacaattacgataaatatatcttatgttcggaggatcgaaaatggcagcctgggcaggaagcgcagatattttgcgtgcttcgtctgtcaagactgccataaaaaatacgggtataaagtgtgtcaacaatccttattccgcttttttaactgataaaacggttccgctgaatgcatccacttcactgacggttcccgtatacgttacggtaactttatccccatcttttacatcagaaagcccgtccggtttctgatcctgctcgaagctgaattcataatcggttccgtcggcggtgatcgtaaacataaagtctttgatgtcgctgatcgtaccagtcattgtggactgttttgcatcggcagttccttcggatggaagaacggcgtctttggcgtcttcttttaaatcatccatcgggctgctttcgtccatgccattcgagctggactcggaggaggcggactgggacgattcattagcagtcggttcattcacgtttttggaagagcaggcggttgcgagcgagaggatcgcagccgcgcccaggatagcaaaatatgtttttttcatagtacattaccaacctttcttttgacttagtttgctcacagatgtatgatgcaggacagatgatgattcctgagcgcaacattcatcttttcgcatagaatgtccatttcgacattgtgctatacatcttaagccataaatgtgaacgaattgtgaggagaaacttacgaaatgtaaagaaaatggacaaatatggaacgaaaaacagtcgattttcgaacgttcttatggtataatgtgaccacttaatgaggtattttttaaaattcaggaggaaacatacatgaaaaatccagttgttaccattgagatggaaaatggtgatatcatgaaggcagagctctacccagagattgcgccgaacacagtcaacaactttatcagcctgatcaagaagggcttttatgatggtctgatcttccaccgtgtcatcaagggctttatgattcagggcggatgcccgaatggaaacggtatgggcggtccagggtataccatcaagggtgagttcagccagaatgggtttacgaacaatttcaagcacaccaagggcgttctctctatggcgcgtgcgatggacccgaactccgcaggttcccagttcttcatcatgcatgagacttccccgcatctggatggtcagtatgcatccttcgggaaggtagttgaaggtctggatatcgtggacaagattgccggtgtccgcaccgactggggcgatcgtccgctgaaggagcagaagatcaaaaagatgaccgttgacacctttggcgaggagtacccggagccggaaaaaggaaaagaaagataatctatgacaatcgaacgagaagtaaccattgcgggacagacatacccggtgattctctccgatgaaaacgaagctcttcaggctgcgaaagcagccgggagagctattgttggcttatggagggaaaatgaggaaaaacagccgaccgactattcattttgcctttaccttattacagaccctgaagacgccgatgaaacattcctggaacgcgtcgtccgccgccatctggctctcccgtggttcatcgcggaaaccgaccgcctcatcattcgtgaattttcccaggacgatccgttggaaccggcatccgctgaggatgccgacggaactttttctgattggaacaaacgcgaggaataccggaaacaccagtaccgctttgccgagtgcggtttgtgggcgctggaacgccgcgcggatggtgtgctggttggaaaggcggggctgacggacggagagctgggatatcatatttatgaaccgttccgccgtcagggctatgcgctggaagcctgccgggcgattgtgaaatacgggtttgaaacgttggagctggataagatccggcttcgcacgaagcgttccaacacggcttcacggatattggcggaaaaaatgggattcattcaggtaccttcatcttgcaaggattctattgtattttgtatgcaaaaaggatataatagcttgtatacaaaataatgaaaaaatacaatctagtgtgattacactaagggaacgatgggaggaatgaccgatgatcaggcatctggagctgaaagcatatggaaagatcaatctcggtctggatgtagtccgccggagagaagacggctaccacgaagtgcggatgatcatgcagacggtgcgcgtgtacgacgcgatcgaactgaaccggacggaggaagagggaatccgtctttcaacgaacctttattatctgccggacaatgaaaataacttaggttaccgcgcggcgaaacttctgatggatgagtttggaatccgagacggtgtggagatcaagatgaagaaatttatcccggtggcagccgggatggcaggcggcagcagcgatgcggccgcaatcctgtttggtgtcaacaagatgttcggactggggctttcgaaacaggagctgatggagcgcggcgtccgtctgggggcggatgtgccgtactgtatcatgcggggaacggctctttcggagggaatcggggagatcctgacaccgcttccgccgatgccgcagtgccgcgtgctgattgccaaaccggcggtcagcgtttcaacgaagcatgtgtacgagagcttaaacctgccgtctctgggtgcagaggcgcatccggatattgatgcgatgcgggcggcgatcgagaaaaaagacctctccggcgtcgtttcacagcttggaaacgtgctggaaacggtgacgatcccggaaaatccggtgattcagacactcaaagataagatgatggagatgggcgcggacggctctctgatgagcggaagcggtccaaccgtatttggcttgtttacgaaccagacggcggcgcaggcggcgtatgaggaactccgctatggcagcagccaggatctggcgaaacaggtatacctgactagtttttacaacaggaaggggcacgcagatggggaacaattttgaggttaaaatgaatgaatatctcccactcagggatgtggtattcaacacactccgccaggcaatcttaaagggagagctggcaccgggcgagcgcctgatggagattcagctggcacagaagctgggcgtcagccgcaccccgatccgtgaggcgatccgcaagctggagctggaaggactcgttctgatgattccgcggcgcggcgcggaggtggcgcggatttcggaaaaaagcctgaaagatgtgctggaagtgcgccgttcgctggaggaactggcgattgagctggcgtgccagcgcatgacggaagaagatatgcaggcattggaagaagcacagaaagcatttaaagcggcgattgatcagggcgatgcgatgaagatcgcggagacggacgaggcatatcatgacgtgatctaccattcgacccgcaacaagcgtctggtgcagattttgaacaacctgcgtgagcagatgtaccggttccgtctggaatacatcaaggacgaggataaacggcagattctgcagttagagcatgaaaaaatattggcggcactgcgtctgcgccatatggcggaggcaaaggcggtagccagggggcacatagataaccaggaaattacggtacttaagaatttaaaggagcggaaggaagtatgacatttaaagaattgtacctgtccggtcagattccatttgaggaaatcgatcgctacatttcccgctggaatcggtcggatgatgagcggacactggcaaaatatctcggtctcaacgccgatgaggaggatgtctggatcgatgacagcgacgaggcgctgaaagagatgctggataaaagagaaagggtagccggtacgccggttacccttggaaagacggatattatcatcaataaaaatggatttggcgcgctgccaatccagcgtatttcttttgatgatgcaaaggtactgcttcgcaaggcgtatgacgcgggcgtccgtttctttgatacggcacgcttctatacggatagcgaggagaagatcggttatgcattgagcgatgtgcgcgagcatatctatattgcgaccaagacagcggcaacgacggcggaaggcttctggaaggatctggagacgagtttacataacttaaaaacagactacgtggacatttaccagttccacaatccggcagtctgtccgaagccgggagacggaagcggtctttatgaggcgatgctcgaagcaaaagagcaggggaaaatccgtttcatcggcatcacgaaccaccgcatgagcattgcggaggaggcgatcgagtcggggctttacgataccttgcagttcccatttaattatctttccaccgagcgggagatcgcgttggcgaaggcctgtgcggagcacaaaatgggatttatcgcaatgaagggtctgtcgggcggtctgctgaccaattcggctgcgatctatgcctatatggcacagtttgagaatgtactgccgatctggggtgtacagaaggaaagcgagctggacgaatttttaagctacatcggcaatccaccggaactgacggacgagctgaaagctgttattgaaaaagaccagaaagagctggcaggtgaattctgccggggctgcggctactgtatgccgtgtccggcaggaatcgagatcaacaactgtgcgcgtatgtccctgcttctgcgccgttctccgtcagcgagatacctctccccggagggacaggcgaagatgaagaagatagaggactgcctgcattgcggacactgcaagtcgatgtgcccgtatggtctggatacgccgaagcttttggaggagaattataaggattataaagaggttcttgcagggaagagactgtaaagagaggataaatgcaagaggcatttttccgttactgggcacgtatgcgtgaacagtaactagaaatgtggtgaaatagaccagggaggcggaaacaatggatataaatcagaaacagaaagaacgtctggagcagcagtttgcatttatccgggagatagataaggagaaatttatcggtcgccagacgtatctgacagacggcgagcggaaggaaaatgacgcggagcacgcatggcatatggcgatcatgacggtgcttctggcggagtattccaatgagccgatcgatgtgctgaaaacggttaccatgcttctgattcacgatctggtcgagatcgacgccggcgacacatatgcctatgatgaggaggcgaagaaaacccagcgggagagagaattaaagggtgcagagcgcattttcggaatgctgccgccggatcagggcgaaaaactgcgcgctctctgggatgaatttgaagccggggagacgccggaagcacggtttgcgcatacgatggacaacatccagccgacgatgctcaatgatgcttccaagggaaaggcgtgggcgacgcgcggcgtgcacctgagccagattcttggaagaaataagaataccgccaagggctcggagacgctgtggaactattcctatgagaatttcatcactccgagcctccgggaaggaaagataaaaaacgacacgttacccgaagagtaatcgaattgtcggaggaagcatgagctttatccggcagactgctgtcagcggaaacggcgtgcgtggctgttatttttgagttcgaagaagattctgtcggttcggtggttattttggaagctgaagctgttccagaacattccgagtgattggagcaagtcatcgggtcagctttagaggaaatcagagcagtatctttcttgtttacatcaaaaatgatatgcttcttttgcgacagccagttcatatcgttatcaaaaatcagagcgtcagagacggaatcggcgctctgattttttgagttttcttccggcatgacacctccggacagggcgggcggcggatagagaacaccccaccagttgtcgatcacatgagtctgcaggatcggcggggcgatcgcgtacgccaggacttccggctgaatctggtttctggtaaaactaagaagaggcaggcagaaaagcagaaataagagcatggaacataaggcgagatgcgggagtgttccaccgtatagatgggaaggtttacaggaaccggtggaaaaatggcggcatttattggtgacaggtggatgaatcctggatgtgggtgacggacaattttcaggatggaacgaaatcatttgatttatcataatggctctccttttactgaacgaaatgttactgttcacaggtaggcacttttggaaccgaaagtgccgtaagaaaacgtggtggcagcaggaatttgccgta

SEQ ID NO: 11050 - DNA, 78274 bp, Unknown
  gut microbiota DNA sequence
cgaaatcgaatcttcttgtcgcaagtattgacagttatggtataatttaaactatattttggaatagcattccggcgcgtggtgaagcagaagcttcccacacccggcagaaaggcggatattatgaaaaagagtgtacttgtggtatttggcggacagtcttcggaacatattgtttcatgtatgtcggcaatcaatgtcattaaaaatatagatacagagcgctatgatgtaaccctgatcggcattaccgaagagggaaaatggctgctggttgactcggtcgagcagatcgaggatgagagttggagaaagaacacgacgaccgcgatcctttccccggatgcaacggagaaatccgtgatcgtcctgaaagatggtaaggcggaaatgatccgcattgatgtggtattcccggttctgcatggactctggggagaggacggcaccattcagggcatctttgagctggcaaaaatcccgtatgtcggatgcggtgtgctggcgtccagcgtttcgatggataaagtgtatacaaaacagattgttgaccacacaggcgtgcgccaggcggcatatgagctggtcatccgcaaagaacttgaaaagatggatgaggttgtggcacgcatcgagaaccggttctcatatccggtatttatcaagccgtccaatgcaggttcttccagaggtgtcagcaaggcgtcggatcgcgaagagctgattgcaggcttaaaggaggcggcgcaccatgaccgcaagattctggttgaggagacgatcgtcggccgtgagatcgaatgtgcggtctttggaaatggcacagaaccggtcatcgcttccggtgttggcgagattctggcagcagccgatttctatgattttgatgcgaaatattacaacgcagagtccagaaccgtggtaaatccagagcttccgggcgatgcgaccgagcgtgtgcgtcaggcggcgagacgtattttcaaggcggtagatggctatggtctgtcgcgcgtcgatttctttgtgacgaaggacggcgaggttatcttcaatgagatcaataccatgccgggctttaccgcgatcagtatgtacccgatgctctttgaggcggccggaatcccgaagccggagatggtgacaaagctgattgaacacggactgaaacgctacgaagcctagaaataaataaaaatgtttcagaatcctgaaacagtgtgaatgaatctgcttttggacgttatatgattcgatatacacagatgttcgggaaagaatggagacatgaccataagaattttaccgaaaggaaggtaaacatggatagaaatgccccgatcggagtttttgattcaggcatcggcggtctgacggtagcccgtgagatcatgcgtcagatgccgcaggagcgcatcgtatactttggagatacggcgcgcgttccatatggaagcaaatcgcaggagacggtgctgcgctattcccgccagatcatccgttttctgaaaacacagggagtcaaggcgatcgtgattgcctgcaacacggcctcggcgtgtgcactggagacggtcaaacaggaattggatatcccgatcatcggggttatctacgcgggcgcgcgcacggccgccgaggcaacccataatggaaagattggcgtgattggaaccgaggcgaccatccggagcggtatttataccagagaaatgcagaagctgcgcccggatattgaggtcattggaaaaccgtgtccgctctttgtgccgctggtggaggaaggactcttccatgattcggtaacagacgagattgcctcccggtatctttcttcgctgaaagaaaaatacattgatacgctggttatgggatgtacgcattatccgctgctgcgttcgacgctgcaccggctgatgggtgacgaggtgactttggtaaatccggcatatgagacggcagttgaacttaaaactctgctgcgggacatggatctgacacgcagttcggaggatctggaacgtttttcggaggaaaacagccgccgcgctgctgccggggagccgattcttgaccagtatcagttctttgtcagcgaccgggcggagaatttcacgcgttttgccaaggcgattctgccaaaagaggtaaaagacacgaaaaagattaacattgaggagtattaaaatatgacgaaagatgtgcttgtatccgtgcgcggtgcccatattgcggacggggagacgaataacctggaggttatcatggcaggcagctattatttcaaaaatggcaagcattatatcatctatgatgagatactggagggcgaggaaggaagcatccgcaataccatcaaagccaatgcggacagcgtcgatatgatcaagggaggcgatgcgcgggcgcatatgatttttcaggagaaccgtccgaatgtcagctgttatgtgactccatacggtcagatgatcgtgggtgtcacgaccgaccgcatcaagatcaatgaaggtccggatcatctgaaaatccagattgattatacgctggaactcaactatgagcagaccagccagagccatattgaaattgatgtgaaatcgaaggcgacggcgaaattgaacctgaaagagcagtaaatataaaagaatatagaaacaaagaaataaaatcgatgaatcaaaaatcccggaaacgtgcaatcagttacatttccgggattttaagatccattatttatttttcttggacttggaagcttctttctttgctgcctcttctgtatttttcttgaaacggtcaaagaattttttcttcttcggcagcggcgggatacctccgcgcacgctcttgatctctgtgatataaagaccgctgatgacaacctttgcctcggtgcggagcggtaactgaaggaataccttctcatccgcgatcatggtcacaaccttcggtccgatcttagcctttacgatcgggagcttcgcccacttcatataccatggagtctggtcaataaccatcttcgggagaccggaatctccgattttcagtttctttttgtcaatcgccagaatcgaaactgtctgtttcgaagcgtcgatcatagtctgctgctctgcctgacgtttctgcatccgggaacccagaatatacagtacgacaagaaggatagccagaatgacgataataactagcagtacattccaaaatgacatatatatatacctccgttgtagatagcggcgggacgcaaatccaatcccatttcgcagaaataacgaaaatagccgcgcaattactatgtattatagcattggagaggggaaatggcaagaaaaatagacgggtaactatggcttattccaaatccatcaaaaaaccacttgacacccatcaaatcccatgctaagatggagaatgcactattgtggaaaactgtgttttccgggtattcgtatgcccaaatgacagtgcagctccgtcggcatgaaacaaggctggttcggagatggaaaaatgcaaaccatagagatagaaagaaaacaggggtgaaacatcgaatggagaaaagcaggatgcgtccggtaaaaaccggtaaaggtgtaaggatgaccttctcaagacaaaaagaagttctggaaatgccgaatttgattgagattcagaaaaactcgtatcagtggttcctggatgagggactgaaagaagtgtttgctgatatctccccgatcacggatttcgcaggtcacttgagtctggaatttgtggattttacactgtgtaaaaacgatatcaaatatacgatcgaagagtgcaaagagcgcgatgcgacctatgcagctcctctgaaggtaaaggtaagactttgcaataaagataaagatgagatcaatgaacatgagattttcatgggtgatcttccacttatgaccgacaccggctccttcgttatcaacggagcggagcgagttatcgtcagccagcttgttcgttcccctggtatttattatggaatcgcgcacgataagatcggtacagagttatacagctgcaccgttatcccgaaccggggtgcctggctggagtatgagacagattccaacgacattttctacgtgcgtgtagaccggaccagaaaagttcctgttactgttctgatccgtgctcttggttacggtactaacgccgagatcattgacctgttcggcgatgagctgaaactggagaagagcttcgagaaggatccgtccaacaactaccaggatggtcttctggaattatataagaagattcgtccgggtgagccgctttccgtagacagcgcagagagcctgttaaacagcatgttcttcgatccgcgccgctacgatctggcaaaggtgggtcgttataaattcaataaaaagcttcactttaagaaccgtatcgtaggtcacgttctggctgaggatgtggttgatacaactaccggagagattctggcggagcagggaacaaaggtcaccaaggaacttgctactgacatccagaacgcaggcgttccgtttgtatggattcagggtgagaagaagaatcacaaggttctttctaacatgatggtagatctgggcgcttatgtgaatttcgatccggaagaagtaggcgtcacagagttagtattctatccggttctccagggtattctggaagaaaatgccggcgcttctgatgaggagttaaaagagattatccgcagagatatccatgacctgattccgaagcacattacgaaggaagatatcatcgcttccatcaactacaacatgcatctggaaggtggcatcggcaatccagatgatatcgatcatctgggcaaccgtcgtatccgtgcggtcggcgagctgcttcagaaccagtaccgtatcggtctgtcccgtatggagcgtgtggtacgtgagcgtatgacaacacaggacatggaaggtgtttctgcccagtccctgatcaatatcaagccggttacagcagcagtcaaggagttcttcggaagttcccagctgtcccagttcatggatcagaacaacccgctgtccgagctgacccataagagacgtctttccgccctgggtcctggcggtctgtcaagggaccgtgccggattcgaggtacgagatgtacactacacacactatggccgtatgtgcccgatcgagacacctgagggaccgaacatcggtctgatcaactccctggcatcttacgcacgtgtcaatgagtacggtttcatcgaagctccgtaccgtgtagtagataaaaccgatccgtccaacccggttgttacggatgaggttgtatacctgacagcagacgaggaagataacttcgttgttgcacaggcaaacgagcagttagacgaagaaggacacttcgtccacaataacgtatctggtcgtttccgtgaggagacctccgagttccagaagaagaaaatcgacctgatggacgtatccccgaagatggtattctccgtagctacttccatgattccgttcctgcagaacgacgatgcgaaccgtgctctgatgggatcgaacatgcagcgtcaggcggtaccgcttctgaccaccgagagagccgttgtcgataccggtatttccgcgaaggcagctgttgactccggtgtgtgtgtcgttgcaaagaatgccggtgtggttgagcgctccgcttccaacgagatcatcatcaagagagattccgatggaaaccgcgatgtataccatctgacaaaattcaagagaagtaaccagtccaactgctacaatcagaaaccgattgtatacaagaatgaccatgtcgaagctggcgaggttatcgcagatggtccgtccacctgcaacggtgagatcggtctgggcaaaaacccgctgatcggcttcatgacctgggaaggctacaactacgaggatgccgttcttctgtctgagcgtctggttcaggaggatgtatatacctccgtccatatcgaggaatacgaggcagaagcacgtgataccaagctgggaccggaagagatcacaagagatgttccgggtgtcggcgaggatgcactgaaagatctggacgagcgcggtatcatccgcatcggtgcagaggttcgtgccggtgatatcctggtaggtaaggttactccgaagggagagaccgagctgaccgcagaagagcgcctgttacgtgcgatcttcggtgagaaggcaagagaggttcgtgatacctccctgaaagtaccgcatggtgcatacggtatcatcattgatgcgaaggtatttacaagagagaacggcgacgagctggctccgggtgtaaataagaccgttcgtatctacattgcacagaagagaaagatttccgtcggcgataagatggctggtcgtcatggtaacaagggtgtcgtttcccgtgtgcttccggttgaggatatgccgttccttccgaatggccgtccgctcgacatcgtactgaacccactgggcgtaccgtcccgtatgaatatcggacaggtcctggagattcatttaagccttgctgccaaagcacttggttttgatgtatccaccccgattttcgacggtgcagacgagaaagatattcagaacactctggagatggcaaatgactatgtcaacacctcctgggaagagttcgaagcaaaatataaagatattgtagatccggaagttatggagtatctgggtacccatctggagcacagaaaactctggaagggcgttccgatcggacgcgatggtaaagtccgcctgagagatggacgtaccggcgaatacttcgacagcccggttacaatcggacacatgcattacctgaaactgcatcatctggttgatgataagattcatgcacgctccacaggtccttactccctcgttacacagcagccgctgggtggtaaagctcagttcggtggccagcgtttcggagagatggaggtttgggcactggaggcgtatggcgcatcctatacgctgcaggagatcctgaccgtgaagtccgatgatgtggtaggtcgtgtgaagacatacgaggcaatcatcaagggcgagaatattccggagccgggtattccggagtccttcaaggtactcttaaaagagcttcagtccctgggtctggatgtcagagttctggcagaagacggttccgagatcgagctcaaggagaacatcgacgaaggcgataccgatcttcgttccgtcatcgagggtgacagcaagcgttactctcagaatgagtccttcggcaactacggttaccaggagcaggaatttaaagatggtgagctgaccgatgtagagcatgatgagtatacagcagaggcagacggctatacagacgatgactatgcagacgtttccgatgataatggatctgacgacgaagaataatcgataggagggagtaccgctcatgccagagacaaatgaaacatatcaaccattgacatttgacgcaatcaagatcggtttggcatcccctgaaaagattctggagtggtctcacggcgaggttaaaaagccggagaccatcaactacagaacattaaagccggagaaagacggcctgttctgtgagagaatctttggaccgagcaaggactgggagtgccactgtggtaaatataaaaaaatcagatataaaggtgttatctgtgaccgctgcggcgttgaggttacaaaagccagcgtccgccgtgagcgcatgggtcatatcgagcttgcagctccggtttcccacatctggtatttcaagggaattccgagccgcatgggtctgattctggacatttctccgagaactctggagaaggttctgtacttcgcttcctatatcgtgctggatccgggacagaccggactgcagatgaagcaggttctgtctgagaaggagtaccgtgacgagatcgaaaaatacggttacggttctttccgtgtcggcatgggtgccgaggcgattcaggagcttttaaaggcgatcgacctggagaaggattctgaggatctgagaaaccagttacaggatgcaaccggacagaagcgtgcccgtatcatcaagcgtctggaagtcgtagaggcattcagaaattccggcaacaaaccggagtggatgatcatgaccgttgtcccggttatcccgccggatatccgtccgatggtacagctggatggcggacgtttcgcaacttccgacttaaacgacctgtaccgccgtattatcaaccgtaacaaccgtctggcaagacttctggagctcggcgcaccggatatcatcgtgcgcaacgagaaacgtatgcttcaggaggcagttgacgccctgatcgacaatggccgccgcggtcgtccggttaccggtcctggcaaccgtgccctcaagtccctttccgatatgttaaagggtaaacagggacgtttccgtcagaacctgctgggtaaacgagttgactattccggacgttctgttatcgtcgtaggaccggagttaaagatttaccagtgcggtctgccgaaagagatggcgatcgagctgtttaaaccgttcgttatgaaagagctggtttccaacggaaccgctcataacattaaaaatgcaaagaagatggtagagcgccttcagccggaggtttgggacgttctcgaggatgtaatcaaagagcatccggttatgttaaaccgtgctcctacactgcatcgtctgggtattcaggcattcgagccgattctggtagaaggtaaggcaatcaagctgcatccgcttgtttgtaccgcattcaacgccgatttcgatggcgaccagatggcggtacatcttccgctttccgtggaggcacaggcagagtgccgtttcctgctgctttctccgaataacctgttaaaaccgtccgatggtggtccggtagccgttccttctcaggatatggtacttggtatttactatctgacccaggaacgtccgggcgccaagggcgagggcatggcattcaagagcatcaacgaggcgattcttgcatacgagaacaaggttgttaccctgcattcccgtgtcaaagtaagagtaacccgcacgatgccggatggcacaacgaagactggtatcatcgagtctaccgttggacgtttcatcttcaacgagatcatcccgcaggatctgggcttcgtagaccgttcccagaaagagaacgagctgaaactggaagttgacttccacgtaggcaagaagcagttaaagcagattctggagaaggttatcaatgtccatggtgcaacccagacagcgatcaccctggatgatattaaggcgattggctacaagttctctacacgtgcagccatgaccgtatcgatttccgatatgaccgtaccggcaagcaagccgaagctgattgctgacgcgcaggcaacggttgaccatatcgcaaagaacttccgccgtggtcttatcacagaggaagagcgttacaaagaagttatcgagacctggaaggcaaccgatgatcagctgactcacgacctgctgacaggacttgacaaatataacaacatcttcatgatggctgactccggtgcgcgaggatcggataagcagattaaacagcttgctggtatgcgaggactgatggcagatacgaccggtcatacgattgaacttcctatcaagtccaacttccgtgagggtctggacgtactggagtacttcatctccgcacacggagctcgaaaaggtatgtccgatacggctctgcgtactgccgactctggttacctgaccagacgtctggtagacgtatcccaggatctgatcgtccgcgaggaggactgctgctgggataagccggagattccgtatatggagatcaaggcattcatggatggtcaggagaccatcgagacattgcaggagcgtatcacaggacgtttcatcgctgagacaatcacagacccggatacaggtgaagtggtgattgagaagaatcatatgtgtacgccgaagcgtgcagcggctgttatggcagcattgaagaaacagggcagagattccatcaagatccgtaccgtcctgacctgtaaatcccatatcggtgtgtgtgcgaagtgctacggtgccaacatggcaaccggtcagccggtccaggtcggtgaggcagtcggcatcatcgcggcacagtctatcggtgagcctggtacacagctgaccatgcgtacgttccactcgggcggcgttgccggtggcgatatcacacagggtcttccgcgtgtcgaggagcttttcgaggcacgtaagccgaagggacttgctatcatcgctgagttcggcggtgtggcaaccatcaaagataccaagaagaaacgtgagatcattatcacggataatgagacgggcaattccaagacatacctgattccttacggctcccgtatcaagattcaggacggcgcggttctggaggctggtgacgagctgaccgaaggtagcgtgaacccgcacgatattctgaagatcaagggcgttcgcgccgtacaggattacatgatccaggaagtacagcgtgtataccgcttacagggtgtagaaatcaacgataagcatatcgagatgatcgtacaccagatgttaaagaagattaagattgaggaaagtggagattccgacgtactgccgggcgtatccatggatgtactcgatttcaacgagatgaacgaggcgctggaagccgagggcaaagagccggcgatcggacgtcaggttatgctgggtatcaccaaggcatctctggcaaccgactccttcttatccgctgcatccttccaggagacaaccaaggttctgaccgaggctgccatcaacggaaaggtagataagctgattggtctgaaggagaacgttctgattggtaagctgattccggctggtaccggtatgaagcgttaccgctccatcaagctgaacacagatgttgaggaagaggatgatatcgatctggcagaggacgacttcaacgagccggctgaactggacgaggcagacaagattgtactcaacgaggatgagctgagtgaagaataattaaaaatgaaaaacggaatcgttttttggagatcgccgcagagatgcggcggtctttttttgtgccaatgatgcgcactcgcgcgaagctgtaggttgtcgcaagcgaccgcgcgagacgcccgaatgtgccaaggcacattcgttcctgccatatcatagacagaaaaccgtaagaaatagaagcgcgggattggttgaatcgaaggggaaaatccgttatacttataaaggaaatgtttaaaatccaaagtaatgtgattaaattgtataaatttaaagaacaaatttaacgattttagactttcaaaacagaaacaattattttaaaaatagagacattggaaggagattatatagatgaagagacacaattggctcaaaaaacacacactgggactggcggcggctctgctgatgacagccggtatgtcgcagatcgcgctggcaggtgactcggtgtatgtcaatacgtcttccctgcgctaccggacatcggcgcagatcaaggacaataatatcgcgggcaatctgtcctacggtcagaagctggagcgcgtgggaaccagcgggcagtggacgatgattcttttgaatggaaagaagtattacgtttcatccgcctatgtgacaagcaaaaaaccggcatctgcaggtgctgtccagacaaccagccagacagcagcgggagcgcagacatccggcggcacggcgatcgcactttcttctaattataaatacgcaaattattcaaagatcaacagcggaactgcgaccctgtaccgctcgactgcttccaacaagaaaaataaagtggtctgtgtcaatgccggacatggaacaaacggtggcggaagcgtcaagacccagtgtcatccggatggaagtgcgaaagtaaccggcggcacaaccggagccggtgctacctcagcagtggcagtttccagcggtatgacctttgcagatggaacagcagagagcaaggtaacacttgctatggcaaaggtgcttaagacaaaacttctgaatgcaggctatgatgtactgatgatccgtgaatcagatgatgtacagctggataatatagctcgtacggtcattgcgaataacaacgcggactgtcatatagccttgcactgggattcaaccagcagcaacaagggtgcctttttcatgagcgttccaagcaatgcaacctaccgtgcgatggagccggttgcctctcattggaagcagcacaaccaactgggcgagtcgctgatcagcggcttaaagagcgcgggtgtgaagatttattctaaaggcagcatggagatggatttgacccagacttcctattcaacgattccgagtgtggatattgagctgggagataaggcgtccgatcattcgggtgcgacgcttgagactctggcgaacggactgctggctggcgtgaatatattcttcggacagtaaaaactgaaaggaggaaagcgtatgggattggtggcgtttattatggcatatgcattatttgcgtttatcttttatattctgcaggtaattgcatactggaagatctttacaaaagccggggaagaaggatggaaatccatcattccgatttacaatggctatgtacagtaccggctgacctgggatgtgcagtatttctgggtggcactcggactggcggtcggcggaggtattttaaattccttcggcggaatcgtgggagttatcggttcgcttgcgcttctgggaacagcactcatgaatgtggtggcactctataagctggcgtgtgcctatggtcacgggataggatttacgattggtttatttttcctgaatccgctttttatgctgattcttggttttggtgattcggagtacatgggaccgcaggagtagcggaaatgaagttccgggatatttaagatattttccagaaaaaaagagtcagatgagacaatagagggttttgcactgtacctgtctacagcgcaaaacccttgttactgctcacaggtaggcacttttggaaccgaaagtgccgtaagaaaacgtggtggcagcaggaatttgccgtatttaaatgcgaagccacggcaaattccgttactgggcacgtatgcgtgaacagtaacaaaccctttattttacgggaaaaatttgcattttataccttgacagtgcaactcaaactagctataataagtaagcgtgcaaaattcaaggaatttctgcgcggaaatacaagcttaaaaaagcaaccacagacaatatcacaggaggtgaaaaggatgcctacatttaaccagttagtaagaaagggaagacagacatctgaaaagaaatcaacagctccggctctgcagaagggatacaactctttacagaagaaagctatcaacgtttctgcaccgcagaagagaggcgtgtgtacagccgttaagactgcaacacctaaaaagcctaactctgctcttagaaaaatcgccagagttcgtctttccaacggtatcgaagtaacaagctacatcccgggtgagggacacaacttacaggagcacagcgttgttctgattcgtggtggtcgtgtaaaagacttaccaggtaccagataccacatcatcagaggtactcttgatactgcaggcgtagccaacagaaaacaggcgcgttccaaatacggcgctaagagaccgaaagacaagaaataattttaattaggtagaagttctattagatttagaatgaatgtgccggactttgatattgatcctgtaggttgcagggaatcatagaaccgcgcacgagacgcaggttgaacttagagagaacctgccgagtaggaagagaggaagcaccatgctcaatgtcgcgctgaaagacgcgctcgtttcgcaggtgcgctttcacactaagctcgtgaggaacctcgctaagtgttcaatgcgagtacctaagatctaatgaatggctcccgcggctccccgccggagcagatattaaggagggaagtaacgtgccacgtaaaggacatactcagaaaagagacgtattagcggatccgctgtacaacaacaaggttgttactaaattaatcaacaacatcatgctggacggcaaaaagggcgttgctcagaagatcgtatacggcgcgtttgatcgtgtcgctgcagaatccggtaaggaagctgtagaggttttcgaagaggcaatgaacaacatcatgccggttctggaagttaaggcaaaacgtatcggtggtgctacctatcaggtaccgatcgaggttaagccggaaagaagacaggctcttgcacttcgctggatcactctgtactcccgtaagagaggcgagaagactcaggaagagagactggcaaaagagattctggatgcagctaacaacactggtgcatctgtgaagaagaaagaagatatgcataagatggcagaggctaacaaggcatttgctcattacagattctaataggaggaaaaagctttggctggaagagaatatccgttagagagaaccagaaatattggtattatggctcatatcgatgctggtaagactaccactactgagcgtattctgtattatactggtgttaactataagatcggtgatactcatgaaggtactgctaccatggactggatggctcaggagcaggagagaggtattaccatcacttctgcagcgacaacctgtcactggactctgcaggaaaactgcaaaccgaaaccaggcgctctggagcatcgtatcaacatcatcgatactccaggacacgttgacttcacggttgaggttgagcgttccctgcgtgtactggacggtgctgtaggtgtattctgtgctaagggtggtgtagagccgcagtctgagaacgtatggcgtcaggctgatacctacaatgtaccgcgtatggcattcatcaacaagatggatatcctgggtgcaaacttctatggctgtgtagagcagatcaagaccagacttggtaagaatgctatctgtttacagcttccgatcggcaaggaagatgatttcaagggaattatcgacctgttcgagatgaaagcatacatctacaatgatgataagggtgaggacattagcatccttgatatcccggaggatatgaaggatgacgctgagctttaccacaccgagctggtagagaagatctgcgagctggacgacgatctgatgatggcttaccttgagggtgaagagccgtctgtagatgagttaaagaaagtattaagaaaagcaacctgcgagtgtcaggcaatcccggtatgctgtggtactgcatacagaaataagggtgttcagaagctcctggatgcaatcatcgagttcatgccgtctccgcttgacatcccgccgatcaagggtgttgacctggatggcaacgagactgtaagacattcttccgacgaagagccgttctccgctcttgtattcaagatcatgaccgacccgttcgtaggtaagctggcttacttccgtgtgtactcaggtgttatgaactccggttcatatgtactgaatgcaacaaaggacaaaaaagagcgtgttggacgtatccttcagatgcatgccaacaagcgtcacgagctggaaaaggtttactccggtgatatcgcagcagcgatcggattcaagttctccaccacaggtgatactatctgtgatgagcagcatccggtaatcctggagtccatggagttcccggagccggttatcgacatcgctatcgagccgaagaccaaagctggtcaggacaagatgggcgaggctcttgcaaaactggcagaggaggatccgaccttccgtgcttatacaaacaaagagactggtcagacaatcatcgctggtatgggcgagctccatctggagattatcgtagaccgtctgcttcgtgagttccacgttgaagctaacgtaggtgctccgcaggtagcttacaaagagaccttcacaaaggctgtagatgtagacagcaagtatgcaaaacagtctggtggtcgtggtcagtacggtcactgtaaggtacacttcactccgatggatccgaacggcgaagagaccttcaagtttgagtccagcgttgtcggcggtgctatcccgaaagagtacatcccggctgtaggcgaaggtatcgaagaggctgctaaggcaggtatcctcggcggattcccggtactcggcgttcacgctgacgtatacgatggttcctaccatgaggtcgactcttctgagatggctttccatatcgcaggttccatggcattcaaggatgctatgcgtaaaggtaacccggtactgcttgagccgatcatgaaggttgaggtaaccatgccggaagagtatatgggtgatatcatcggtgatatcaattctcgtcgtggtcgtatcgagggtatggaagacatcggcggcggcaagctggttaaggcttatgttccgctggcagagatgttcggttattctaccgaccttcgttccagaactcagggacgtggtaactactccatgttctttgagaaatatgagcaggttccgaagagcgttcaggagaaagttcttgctggaaaagctgagaaataattaaaaatgtaactatattgccttttccgggcagataactgcccggaaaagcaatattaggcttgaaaaaacggctctaatcgaatataattagagtcagcctaacataaattgagatacccgtattgggtgtaaattaaggaggacgtcttaaaatggcaaaagcaaagtttgaaagaactaaaccgcattgtaacattggtactatcggacacgtagaccatggtaaaacaaccctgacagcagctatcacaaaagttctggctgcaagagtagctggtaacacagctgagaacttcgaggatatcgataaagctccggaagagagagagcgtggtattactatctctactgcacacgttgagtatcagacagagaagagacattacgcacacgttgactgcccaggacatgctgactacgttaagaacatgatcactggtgctgctcagatggatggcgctattctggttgtagctgctaccgatggtgttatggctcagacaagagagcacatcctgctttcccgtcaggtaggcgtaccgtacatcgtagtattcatgaacaagtgcgatatggtagacgatccggagctgcttgagctggttgagatggagatcagagacctgctgaacgagtacgagttcccgggcgatgacacaccgatcatccagggttctgctctgaaggctcttgaagatccgaacggcgagtggggcgacaagatcatggagctcatggacgctgtagattcctacattccggatccggtacgtgctactgataagccgttcctgatgccaatcgaggacgtattcaccatcacaggtcgtggtactgttgctaccggccgtgttgagcgtggtactctgaaactgaacgatgaggttgagatcgttggtattcacgaggagactcgtaagactgttgtaactggtatcgagatgttccgtaagctgcttgatcaggctgaggctggtgataacatcggtgctctgcttcgtggtgttcagagaactgacatccagcgtggtcagtgtctggttaaaccgggctctgtaaaatgccataagaaatttactgctcaggtttacgttctgacaaaagacgagggtggtcgtcatactccgttcttcaacaactatcgtccgcagttctacttcagaaccactgacgtaacaggcgtttgtgagttaccggctggtaccgagatgtgtatgccgggcgacaacgtagagatgactgtagagctgattcatccggtagctatggagcagggtcttcgtttcgctatccgtgagggcggccgtacagtaggatctggtagagttgctactatcatcgagtaatcaatgaattaaacaaaggtgcttcttgtatgcgcagcaggcaagaagatgtaccgtatatatattataaagtcgcttccaggaagcgcattgtgtccagacgtaagagataccccggaaccgtaaggtttccggggtttttctgttgtttcataggaaattgcgttctatgaaacaacaaacgctccgcgaggatgcgtactcgcgcgaagcagaaacatgtcgcaagcgaccgcgcgagacgcccgaatgtgtcaaggtacattctttttcacagaatttcagccttttacgcattgtcggttgccagaagtccggcggcacgcaggttggcaagaagttcattgaagcgttcaacgacatcttcagcacttgttgcatctgcgacgggagcagcggcggtaacggtggcggcgggaccggtaggacctgtagcgccggtaggacccgttgcgccggtagctcctgtagcgccgacagctcctgcagcgccggtaggacctgtagcgccagtcggacccgcagcgccggtagctcctgtagcgccagttgggccggtagcgccgtcagccccggtcggcccagtcggacccgcagccccgtcagcgccagccggcccagtcggacccgtagcgcccgcagccccgtcagcgccagccggcccagccggacccgcagcgccggtagcgccggtcggtccagtcggaccaacagccccggtagtgccggtcggcccagctggacccgcaggaccggtagcgccggtcggcccggtcggcccagtcggcccagccggacccgtagcgccgtccagtccatcgagtccggcagcaccagtgggaccgacaggtccgatcggtccggggcagccgcgtggtcctatgggaccgggacgacagcagttgtagggttcaaaagaaccgggacagccgcgatcgcgtccgcagcgcccatagccgttattttcatagtcactatcatcaaaatagtagggaaaattacatgaatgacgaaacataaaaaactcctttccagatttaggacatccatcctgatgtagtatatgtgtgcgatgaaagagatgtgcattagcagaaaggggcggggaaattgagggttgggaactgtggaatattataagtgtggaagacggtaagaatgaatgtagaaagtgtggatgccgctggatggaacgactcccagtccgctgctcagaccactgcagaggtcggagcgaatgtcacaagataggtaatccgtttgttttatggtttgaggatatggtttgaaagtattcttcatttgtcaaaaccgccggagaatccgggcggattttttttgtttccttatgataatacagtgccttatcatagtttcccatccgatcatagcagacgcatagctggattaaaggaatgaaatcatagtaatcggcttcgataaaggcatttggatgatattctggtcggtctttgagggcaagctggtaccagaaaacagcctgggaaatttctccgagggaaagtttcaaccgtccgatctcacagcaggttttagcacgtgggcggtcgtagagaaaactctggaacagagaaagctggctggcagccgtatttctgagcatttcatggcagcgcgccagaagcagacaggcgtccgccttattttcataccacccgtccggttcgtttaggaaatgttccagaaccgggcgggctttttcgtattgtttgtggtcgatgagttcgcgggcgtagtagtattgatggcgcggatcgagcagttcgccgtctgcaagcattgtttcatagattttcaggttccggtcagaatgggtgagagcggaagcaggcttccggtgttcgatctgaataggagaatagagaattctgccgcgtggcgcgatggcttcgtggacgcgtcctttccagcgaaaatgccggtccgttcgcagaatccgttcgcgatcgtaggtaaatgcaggtgtgccgtccggctggaatccagcgatgtatttcatcatgacaacgtcgggctgcggggatttgcttaaagtttctttcaactttaaaatcgctgtaattgattctgcgggaacgacatcgtcggcgtcgagccacatccagtattcggttgtgaccttttcacagatgaaattgcgcgcggcggcgaaatcatcgttccacgggtagtgataaatatgtttggtgtattgccgggcgatttctacagttcgatcggtggaaccggtgtcggcgacgaggatttcatccgcaaattgtatggcagatgctaaaacacgcgtcaaaacggcttcttcatttttgacgatcatacataggctgaggcggatcatgggatctccaaaatcaatatcaaattgatattaatatatgaaagaagttttttgatgtgtacagacattatatatataattatataaggataaacaggagaaaagtaacgttctattattttgcgggtacttttgtaactgttcacaggtaggaattttctgaactgaaaattccgtacgatacagtttcggcagcagattttgccgatttggaatgcgtagcatcggcaaaatcccgttgctgggcacacgtgtgtgaacagtaacgtacttttctcctgaaatgatggctgcaattcacgctgcgctatttaacagcacttgaaaaaaatattatagagcttcgaaaaaagcatcggtcaatttctgtatattcagatacgggttctcataatcaaaactacgcatccgtcccttggcagccagaacaccgagctggatcggctcagcgatatccgaattgagccgatcatcgagcataccgctgatgaaaccgccggcaaaggaatcaccggcgccggtatcgttgtttaactggtactggtagagctttttgtggcggactgtgcggatctgacatacgccgtccttaaaatggatcagctcatggcggtcatcgtgcttgacaatgagggtgcgggtgggatccgggttgatcgcagaaaaatactcacagaggttcgcgtagagcggacgggcgctgcgggcattgaagccgaggtttttcttttcggatttatttaagaaaacataatcggcatatgcgatcagtggctgtaagcgctcacggcgcagcgatgtatactcaaaaccaggatccatgctgactttcatggcaggatttaaatgttttgcctggatgaccgattgcatgattgcctcgaattggtcgaaatcagacagggatgacaggtggatccagcgggcctgcgcgaggtactccgccagtgtggttcccgtccgggcttcctgttcatggatgcggtctaagagagtgttgttggcacacggcgcgatcttgatgcaattgcgcgtgtgattataaaggcggacaatcgatttggcaatcgctttggaatatggatcgtcgaagcgctcgcgcgtggtaaacagccagtcacggttatccaggtgcgccagctcggcgtcaatgtcatttgtcttgccgaagcgcagatcgaatggactgggcgtgccgcacacgccgacgtaagcgacctgcaggttagggagaatatgctttgccactttcagggtgatgaaagcagaaccgccgatctgggttgtgtattccttgccttttatcgccagctcctgaatatcgttttccacatcggaaatcgggttgcttaagttctcgtcgcctccaccggcggatgtctccaccagatcaagcccggtgcagtgaaacatatagtcataattgatagcgccaatgcaaataatatctaaacctgccatgagattctacctcttttgtccgtgtattttttagtatttaaaatgaagagcggtgcgggatttttgctttttcagcaggatctcgcaccagcaccatttacagaatataacacggtttttcgtttgtcaaataaaatgtaaaattaatgtaaaaaagacgcggaaaagtgccgaaaaccctttatttataagaaaaaatggcatttttttattagagaaaatagtaactgttcagtaggtctgcgcatttactgcgcgtgactgtgaaggtattgaacagttacagaaaattaaagaaaaaaatgggtagaaagagtggaaaatgagaatgggaaaataggggagaaggagaaaaagagagtggaaaagtgcggatggacagagagtgtaatattcagtataatttgatggaatagagatagaacggacaggggatgaaaggaggaaagtgcgataaaagaccgaatcaatgaaaagcagaatgagaaatcagagaaaatgcaaagagcggttttaacccgcctccatctcagcacgttctcccttaaatatttagcgcttctggcgatgacagcagaccacatcgcggtaatctgcagaccggttccgggattccgggcatttgggaatctggcgtttccattgttcgcttttttattagtagaaggattttttcacacgcgagatcgcaggcgctatgaacggcggctacttttggcggcggctgtgtcggaaattccgtatgatctggcattttccggacggtggatggatgcacagcaccagaatgtctgcctgaccttttttctggcgctggttgcgatggagctgttagagcggtatggaaacgatatctgggagaagctggtgctgacggcagtgttctgtacgctgacagaagcggcgggagcagacggcggcgcatgggggatgggactggtgctggcattttatttttgtgtaataggaaattcaggcactaacgtgccaaagcacattctttttcatgagaaaacggcgggggtgtttatgaagatgattgccgccgtcctcatcggcgcgttcgcgtggcaggaacccctctgggtactggcgctcacggctgtctgtttcatgttatatgacggctccagaggtcggagcagatttcgttccttcttttatgtctattatccggcgcatcttttgacgctgtattttgtgggaaaatggctgggatgacttttatcctatgggaatttttgacaattttcgggcgtaaaacacgccctttttttatttccaggtcaggcaaaaaaacttgacaataaagttagcatgtgctaaccttatgtatgggttaggaggaactaatgaaaattagtctcatctaatgaaaattagctttctctaacaactgttagcaggcactaatgaaaattaatgtacgcgaatcaattagattaccggcagatgaaaacagccgtttccgccaagtgagacatcatgacgggcagaaggtggaaaaacagaggaaggagaatcgtatgcagggagcaatgccgatttcgatggcaaccgtaggaaccgcctatacgatcaaaaagatcagcggaaacacagaggttcgttctcatttaaaatccatggggtttaacgagggaaccgaagtaaaagtgataacccagctggacggagacgtgattattcacgtaaaggagtccagagtggctataaataaggatcaggcaagacacattctggtctaagacaagggaatggggatattccggagcaggttgtatggtagaaaagcagacggaattccgagtaaaaaattggaatggttaggaggaacagagaatgacgcttaaagatgcacaggttggatctaccgtcaaagttgtcaagattcatggcgaaggcgcatacaaacgccgcatcatggatatgggcatcacgaagggaagcgagatttttattcgaaaagtagctccgctgggcgacccggtagaggttacgattcgtggatatgagctttcacttcgtaaagccgatgctgagtgcgtagatgttcagacagtttaataagtttgattaaaaaagcaggaggatgaaaaatggcaattcatattgctttggcgggtaacccgaactgcggtaaaacaaccatgtttaacgcactgacgggtgcaaaccagtatgtaggtaactggccgggtgttacagttgagaagaaaaccggtaaattaaaagatgcttcgggagaagaggtaaatgtaacggaccttccgggagtttattccctttctccgtatacactggaggaagttgtaacccgtgattttatcttaaaagagaatccggatgtcatcgtagacttagtcgatgcaaccaacattgagcgtaacctgtatctgaccacacagctgatcgagacaggtattccggttgttattgctttaaatatgtgcgatcttctgaagaagaacggcatcaacattgatgtaaaggcactgtccaagaaacttggctgcccgatcattgagacttccgcgctgaagaaaacaggtctgaaggaagtcattgcagaggcaatcaaagttgcaaaggatcatgcagcaggcactgtaagcgctattttcgagggcagcgtagaggataaagtaagcgcaatcgaggcagagcttccgtccagcattccggaagcagagaagagatggtacgcaatcaaagttctcgagaatgacagcaaggttgtagagcagcttggtcttagtgcagacaaccgtttctcacgttacaccaaggagctggagaaagagtttgatgatgacgctgagtccgttatcactgaccagagatatgtatacatccagaaggttatcgaggagaccgtaaagaaaccggctcagaagatgagtctttcggataagatcgatagcatcgtaaccaaccgtttacttggtattccgatctttgttcttgttatgtgggcggtttactatgtatccgttactacggttggtacattcgtaacagactggaccaatgatacatttgttggcgcaattcagggctgggctggcgatgcactggcagcagcaggcgcttctgacctgattgtaagccttgtagtggatggtatcatcggcggtgttggtgccgttcttggtttcgttccgcagatggctatcctgttcctcttcctttccattctggaagattgtggttacatggtacgtatcgcattcgttatggaccgtgtattccgtcacttcggattgtccggtaagagcttcatcccgctgctgatttcttctggctgcggcgttcctggtatcatggcgtccaagaccatcgagcaggacaacgacagacgtcttaccatcatgacagcaaccttcgttccgtgtggtgcgaagctgccggttatcgctctgatgggcggcgttatggctggttatatgagcggcgacatggatctggctactatgatggctccgatcatgtactttgtaggtatcgctgcggttcttgtatccgcgatcatgttaaagaagaccaaaccgttctccggcaaaccagctccgttcgttatggagcttccggcgtaccacattccgtccgctaagaccgttctccttcatgtttgggagcgtctgaagggattcatcatcaaggctggtacaatcctgttcctggcttgcgttgttatgtggttcctgtcctccttcggatttgtagacggtggatttggtctggtagaagaatctgctgattctatcctggctatgctgggcggcgctatcgcaatcctgttccgtccgcttggtttcggcgagtggcagccggttgcagcttccatcactggtttcacagcaaaagaggctatcgtttccaccatgggcgttctggcaaatgtatccgaggatctgtctgaggagaccgatgtcgtagcagcagcaatccagacatggttcccgacaaccatcgcagcctttacattcctgctgttcaacctgcttgactctccgtgtctggcagctatcgcaacgatggcacagcagctccagtccagaaaatggttctggttcgctatcctgtatcagaatctcttcgcttacgctgtatccctgattgtatatcagttaggtggtctggtacttggcgcagttgcattcaacgtatggactatcgtggcagcagtccttcttgtactcatgctgttcatgctgtttcgtccggatccatacaaggatcagaagagctacacaagaagctctgtagaggcagcttcataagttagtttctaaatgaaaaataaaacaggttctgccgtccggccggtggttttgcgtttccgctgaccgggcatcggcaggtgcctgtaatcataagtgataaaattaatcctttataaggctgcctcggatagcaggatgaaagtctgctgtttggaggcagttttattcgatttcaaaaaagaaaaggagaaagcatagatgggggattcatctggatccatgttttatggtgtgattggttttctggtagtttattttgtaggatattttatctgtcgtgtgtatgataaaataaaaaagatactccgaagccattcatcgaaaagtcagagaagagaggacgataacgtatgagaccgattgatattggaattttaattgtagtagcgattttgcttttgctggcattacgttcggcgatccgtcattacacgggaaagggcggcggatgctgcggatgctccggtggaagctgcggttcctgcggcagcgatgggaatgctggtgcgcgcggcgaagatctttccaagaaagcggttacagcgggtaccccgtccaagatcatgcggatcgagggtatgcactgtgcaaactgcaagaaatccgttgaaaaagccctgaccgcccagaacggcgtcatccgtgcagatgcggacgtagacagaggcattgcccgcgtgttctatgagaatggcgtggacgatgcgaagctgcaggaagcggttgaaaaagagggatttgtggttaagaatattgagacggttgtctaagagaaaaagtgtgatcctgttctggtgttactgttcacgcaaacgtgcccagtaacggaatttgccgtggcttcgcatttaaatacggcaaattcctgctgccaccacgttttcttacggcactttcggttccaaaagtgcctacccgtgtacagtaacgttctggtttcagatgtgctggataggtttattttgtatcgcaaaataaaaagacttgtggtatacttggaaaaaatgataaaacttatacagagaggcagaacgtatgatcaagattataaaagaagcacaggttcgaagcgaggaagataatcggaatctgcgagagaccgtggcggggattattggtgaggtccgggggcgcggagacgcggctctgagggagtacaatgagaagtttgacggatgtacccgtgaatcgctgcgggtcagccgggaggagattgatgcggcttataaggagctgggcgagcaggagctggcggatctgaaagcggcgcatcacaatattgaggcatttgcgaacgcgcagaggcagacagtgaaaccccttgacaatttcagcccggagccgggagtctttttaggacaccgcatcattccggtggagtcctgctgctgttatgtgccgggcggcaattatccactgtattcgacggcactgatgttagcgactccggcgaaggcagcgggagtaaaacgtatcaccgcctgcgctccggtagtgcgtggaacgggtcatatcaatgccaggacgctggtagcgatggatctggctggcgtggatgagatctatgcactgggcggtgcacaggcgatcgcggcattttcctatggaacggggagtatcaagccggtggatattattgtaggaccgggtaaccgcttcgtaacagaggcgaaacgtcagtgctacgggcaggtcggcatcgacttcgtagccgggccgagcgaggtcctggtaatcgccgacggaaaagcgagtgcgaaggtggtggcggccgatctgctggcacagtctgagcatgatgtcaatgcgaaaggcattcttctgacaacggatgaggcatttggaaagagcgtgattgaggcggtagaggaagagctgaagattctggatacggcaaagattgcgagacagtcctgggatacgtttggagagatcggcgtggtagacagcctggacgaggcggttcagtatgcgaatgagtacgcaccggagcatctggagctcaacgtggaagacccggatgcactgattccgaagttggttaattacggttctctgtttatcggtcagaatacggcagaggtatttggtgattatgcttccggaaccaaccacacacttccgactcttcgggcggcacgttataccggcggtgtctgggttggtacattcttaaagacctgtacccatcagagcatgaccccggaggcatccgcgcgtatcgcaccgcttgtatcgcgtatggcgcatggagaaggattatctggacatgcagcggctgcggatgcaagaaaatagggaaaatagaaaatatatagaataaaacccctcggatgctgcagcatctgggggttttgtgtttcaaagcataccgcctgctattcttgtcttttattccggataaaccagtctctccggaccaattccatctaagacttcgcgcagaaagcggtcagccagccagtttgccatcggcaggttcatatcgaggtagttgccgcaatcttttgcacaagcacccggaacctcgtctttgtagtcgcgcatgaaagtaaagagccccttcatcagcggaacgatctcctcggatgtcaggtcgcctgcgagaagcaggtagaagccggtgcggcagcccatcggtccgaagtagaggacgcggtctttccactcctcgttatttcgcagccaggtggcagccaggtgctcaatggtgtgaacctcggcagtattcatgaccggctcatagtttggacgtgtcatgcggatatcaaaggtggtgatgacctgatcgcccacgcggtccttgcgggatacatagacgccagggagcagtttcagatggtcgatagtaaaactggtaattttatccataaaaaaatacctcctaaatcaaaaatgcctgtccttattatataaagaaacaggcataagaacaagcacttatttttttgcagtcttaaaaacgcggaagccagctactacatttaaagcaagaaacgcaggaatacagatagactcaatagagggatagatatcctggataccgctgatatcctgagtcatcatgcgaagattgatgtcatgaagggaaagcagcagaaagagtgcaaagcaggcataactgccaagcgtaaggatggatgccatagttttacctgtaaaaaaagcaagaatggcaagtaaaaagcttagtgggaataaaactaaaagaaagagactcataaatcaatacctcctgttaagtaatagagacagtatacaggatggaatagacaaccgtgttacttattccttaataaatccttacatatgtatacttgatgtttgcataataaataaaaatgaaaaacaataggcaggaatgcataaaaatgcataaatgacgtataaaacataaaaaaatgtataaaaaatctcttgacgcatagaactttcctatgctataatctttcagaatatgaacaagggcgttcatgggcttaggctcatggacgcctttgttgcagaatcagacaatttataaaatatgtctctaatgatgtaaaaaacgcatctgaggaaaaacagatttgctcaaatgtgaggctattgagaatgaaaaagtaaactgcctgcatgaagctattcacaggcggggtacgagagagaaaggaatggtgaccagatggagaaaccggtatatcttctgttggaaaacggcgactattttgagggaaaaagctttggcgctcctttacgtgaagtgaccggagaagtcgtatttacaaccggtatgacaggataccttgagacgatcacagatcccagctattttggacagattgtcgttcagacatttccgttaatcggaaactacggagtgattccgcaggacttcgagaatgaagaggtatatttatcagcctatatcgtaaaagagtggtgtcaggaaccttccaacttcagatgcagtggggatcttgacaccttttttaaagaaagaaacatcccgggcgtctatggaatcgatacgagaaagctggcaaaaaccattcgtgaatccggttcgatgaacggctggctgaccgaggtgaagccgccgtatgacgcgaaaaagctggaggaagtgaaaaacttccacattacaaaggcggttgaaaccgttacaccaaagaaatgtgagatcaaaccggcggatgagaaagaagagttccagattgtgctctgggatttcggcgcaaaggaaaatatcatccgcgagatgaccaggcgcggatgccgcgtggctgaccttccggcaggtacgacggcggaggagattcttaagatgaatccggacggaatcatgctttccaacggtccaggcaacccagaggacaacccggagatcatcgaggagatccgaaagattacgaaggctggaaaaccgatgttcggcatctgcctgggacaccagctgctggcgattgccaagggcgcgaagactggaaagatgaaattcggtcacagaggtgcgaaccagccggtcaaggatctgacgaccggacgcgtctacatcagcagccagaaccacggctatgaggtactgcgcgatacgctgccggagggcgcggaggagacatttatcaatgtcaacgacggcacctgcgagggcatcacctaccacgatatgccggcatttaccgtccagttccatccagaggcttgtgcaggtccgaaggatacggaagagctgtttgggcgtttcattcagatgatgagagattataagaaaaaggagggcgcgtcatgccgttaaataaatccctgaaaaaagttatggtaatcggttccggccctatcgtcatcggtcaggcggcagagtttgactatgcaggaacgcaggcgtgccgggctttaaaagaggaaggtctggaggtcgttttagtaaactccaacccggcaaccatcatgacggacagcgccatcgcggatcacgtatacatcgagccgctgaccctggaatttgtcaagagaatcattgaaaaagagaagcctgacagcattctgtccaccctgggcggacagaccggactgacactgtccatggagcttgccaaagaaggtttcttaaagagccacaatgtaacgcttctcggcgcgtccccggagaccatcgataaggcggaggaccgccagtgctttaaagacacgatggaagctatcggtgagccggtcattccgtccaaggttgtcaccaccatcgaggatgcgcttgattttgccgaggttatttcttacccggttatcgtgcgtccggcctttaccctgggcggtaccggcggcggtattgcggcaaataaagaagagctttacaacatcgcggaggcgggtatccgcctgtcaccgatcaatcagattctggttgagaaatgtatttccggatggaaggagatcgagtttgaggtaatgcgcgatgccatcggcaacgagattacggtctgctcgatggaaaactttgacccggtcggcgtccacaccggcgactccattgttatcgcaccggctgtgacgctggcggataaggaataccagatgcttcgttccgcagcgctgaatattatccaggcgatgggcatcgagggcggctgcaactgccagtttgcgctgaatccggagagctttgaatatgccgttatcgaggtaaacccgcgtgtatcccgttcgtccgcccttgcttcgaaagcaaccggatatccgattgcccgcgtggcaaccaagattgcgatcggttatcatctggacgagatcccgaacgaggtaaccggcgagacgatggcatgcttcgagccggcccttgactatgtaacggttaaattcccgaaatggccatttgataaattcgtttacggacgccggaagctgggtacccagatgaaggcaaccggcgaggttatggcgatcggccgcaactttgagcaggcgctcatgaaggcagtccgcggcgcggagatctcccagaacagcctgaacatgaagaaactggcgccgatgagtgtggaagagctgagagaaaaaattctggcgcaggatgacgagcgtctgtttgcaatctatgagagcttcaagcgcggcgtgaccgttgccgagattcatgagctgaccaagatcgacgagtggttcttaaataaactgatgcatatcctgtccctggaatgccggatgcagtctgagactctgagcgatgcgctttatatggaagccaaacagaacggattcccggatgcagtcatcaaggagatgaccgggctttcggaaatcaagcatgttccggcatgctaccgcatggttgatacctgcagcgctgagtttacggcaagcaccccttacttctacagcaccttcggcgaggaagatgaggcagaagaatttattaaagagaatgcaagcggaaaaccggttgttatggtatttggttccggtccgatccgtatcggtcagggtatcgagttcgatttcgcttctgttcactgcgtatggtcgttaaagagagccggttatgaggttgtcatcgtaaataacaacccggagaccgtttccaccgacttcaacgtagcagaccgtctgtattttgagccgctgacaccggaggatgtgctggatatcatccggatcgagaagccgatcggcgcagttgtggcctttggcggacagacagcgatccgtctgacgaaatgccttgtagagaacaatattccggttctcggcactccggcagacagcatcgatatggcggaggatcgcggacgtttcgcagccctgctgaaaaaattaaatatgaaacaggcagcgggtcagaccgtttacactgaggatgaggcaatccaggcggcaaatcatctggggtatccggttctgatgcgtccgagctatgtattaggcggacaaaacatgattatcgcgtacaacgacgccgatattcatgagtatatgaagattattctctcacacaagattgagaatgcgatcctgattgataaatacctgatgggtaccgagctggaggttgacgcgatctgcgacggcgagaccgttttgattccgggtatcatggagcacatcgagcgtgcgggtgtccattccggagactccatcgcggtatatccggcctttatgctgaccgagagccagaaagaccgtctggtggactattccatccgtctggcgctttccatgaatacgaagggactcatcaacatccagtacgttctgcatgaggatacgatctatatcatcgaggtcaacccgcgttcatcccgtaccgtgccgtacatcagcaaggtaaccggagtgccgatggtcgatctggcaacccgcatcatgatgggcgaaaagctggctgacatgggctatgagacaggtttgtatccgtgctctccgtactacgcagtcaaggttccggtattctcctttgagaagttgtccaacgtagatacacagctcggaccggaaatgaaatcgaccggcgaggtactgggtatcgcccggacgatggaggaagcgctgttcaagggtctggtagcagccggatatacgatgaagcgcgagggcggcgtcttaatcagtgtccgcgataccgataagagcgacctgcgcgagctggtcaaagagtacgtggcgatgggattccacatctacgcgacctccggtactgcaagccggttaaacagcgtcggcatttcttcaacgttagtcaagaagccgaaggaagccaaagagggcgaggagacgaccatttccctgctggaagaaggaaagatcagctatgtgatttccacttccaagacgggacgccagccgggacgcgacagtgtccgcctgagaagaaaggcagtcgagcttggtattccgtgcctgacatcgcttgataccgcggctgtcctggcgctgacactggaaagcaagtacaacgaggacaacgttgaactggtagatatcgcgcacattgcacatggtgcagcggctagaaaagagctgagccagatggaaaaaccggaagaaatccagattccgggttatgtgcttcaggagcatgagaacgactaaaaagaacgatggtctgcatggattctgcgttttgagggttgcggaatccgtgcaggctgaaatcttttgcgaaggcaaaatttgacagaatcatatatgacggaaaaagtggattaatattttaaagaaaggaagaggaggaaaagcagatggcaaaatttatttttgtgacaggcggtgttgtatcaggattggggaagggtattacagcagcgtctctgggccgtcttttgaaggcacggggatttaaggtagcagcgcagaagctggatccgtatatcaacgtcgatccaggaaccatgagcccgtatcagcacggcgaagtattcgtaacaaacgacggtgcggagacggatctggatctgggacattatgagcgttttatagatgaagatttaaaccggtattccaacctgacgaccggtaaggtctactggaatgtgttaaataaagagcgccgcggcgaatatctgggcgagacggtacaggtaattccacatatcacaaatgagataaaatcatttatctattccgtgcaggaaaagaccgatgcggacatcgttatcacagagatcggcggaacaaccggcgatattgagtcacagccgttcctggaagccatccgccaggtgtcctgcgaggcgggacgcagcaactgcctcttcatccatgtaaccctgattccatatctggaatcttcaggcgagcataaatcaaaaccgacgcagcattcggttaaacagctgcagtcttttggtatcatgccggatatcatcgtagcgcgctgtgaccgtccggtggacgatccatccattttccgcaagatcgcactgttctgtaacgtcaaagaggactgcgtcatcgagaacctgacccttccggttctctacgaggcgccgatcatgctggaagaagcaggacttgccaagatcgtgcttcgcgaactgggcatcgagaaagcgccgcaagagtgcgatctgactgagtggaaacatatgttggaccgcatcaagaacagccgcaagacagtcaagatttccctggtcggcaagtacgtcaaactgcacgattcttatctgtcgatcgtagaatccctgcaccatgccggatgggaaaatggcgcgcaggtggagatcaactgggtggatagtgagacgatcactccggagacagcgccggaaatcctgggcggttcgaccggtatcatcgtgccgggcggcttcggcatccgcggcatcgagggcatgattgcagcagcggattatgcgagaagaaacaatatcccgtactttggcatctgccttggtatgcagatcgcggcgatcgcatttgccagaggcgtgttaggctatgaggatgcgaactcaaccgagtttgcgccggacagcaagcatccggtcattgccctgatggaagagcagatggatctggctgacatgggcggaacgatgcgtctgggtgcatatccgtgccgcatcagtccggatacgctgatgatgaaagcgtatggaaaaggtctgatcgaagagagacatcgccatcgttatgaatttaacaacaagttccgggaagtttatatggagcatggcgctatcttttccggacagtctccggacggtacgctggtagaggcgatggagattccgggacatccgttctatctgggagttcagtaccatccggagttcaagagccgcccgaaccgcgcacatccgatctttagggagtttgtgaaagcggctctggaggtaaaggaaaaaaattcttaaaatatggagaaaataaagtatgaagatcaacgaaaactataaaaatctggaagaaagctatctgttttccaccatcgctaaaaaagtagatgaatacaccaaagcccatccagaggcaaaagtaatcaaaatgggtatcggtgacgtaacccttccgatctgccagaaagcagctgacgcatttgcaaaagcagctatggagcagggaaaggcggctacgttccatggatatggtccggagcagggatatgattttctgcgcgtagcagttcagaagtattatgcgtccttccaggttgaggtggcggcggaggatatattcatcagcgacggcgcgaagagtgatgtcggaaatatcctcgatctctttgatgcggacaacacggtcctgatcccggatccggtatacccggtttacatggatacgaacgtgatggcaggcagaaagatcgtatttatggatgccaatgtggaaaatggctttcttccgatgcctccgaagggacagaaagcggatattatttatctctgctccccgaacaacccgactggcggtgtgtacaaccgtgagcagttaaaagagtgggttgactatgcgaacgagcaggatgcgattcttttatttgatgcggcgtatgagtccttcgtagcagatccggcgcttccgagaagtatttttgagattgagggcgccaagacctgcgcgatcgagttctgctccctttcgaagttggcaagctttaccggaacccgctgtggctataccgtggttccctctgaattagagcgcggtggttcttccatccgcaagatgtggctgcgccgccagacaaccaagtttaacggcgtttcctacccggtacagcgcgccgcagaggcagctctttcaccggagggaatggcacagtgccgcgagcacctggacgtataccgcaccaatgcgaagatcatgaccgagaccttaaaagagcttggcatctggcacatcggcggcgaaaattcaccgtacatctggatgcagtgcccgaacggcatgaaatcctgggagtttttcgacgatctgcttgccaaggcaaatgtggtcggcacaccgggcagcggatttggtaagaatggagaaggattcttccgtctgactgcatttggtacgactgcgaatacaaaagaggcaatggagcggatcaagaaggtttacggaaaataaatagctctattttataaataagggggctggtgcatctggggcattgttatcctacgcaccgtcccttttttgctgaagcagggaggtgaggaccatggtgaccttaaacgattatctgtattccggcgatacgatgtttaagattttaaagaattacagccgggatttgaaagcggaggcaaaacagacaaacaatgagatagacctgatacatgcaaattttctgattcagatccgggagcttttggaacacaatgatttcctgacgacccagtcacagaagatccgggaattttatattcatatggcaaaggaatatccgcttctggcatttaactttaagggaagaatcaagtcgctgatccgctcggaggcgaaatttaacggatatatcgtcgaatatatttatgactgttatacagaacataaggcatttccgtcgatctccgatttgaagcagagattgagctgtttccgcgacctgatcgcgtaccggatcgtgatttcactgccgaagtgttacctgaaaccgggggaatcgcagcaggatgcggatatccggtacctctaccagatagcgaatgaacttccgggatttctggaggaacgcgggtttacggcggaaccggcttacggggtgaaagagagtacctccccgttgatggatgaggaggcaaggccgtactaccgtgattatgtctgcggaaatagttcggatgattaccagtctctgcatattacgttttacgataattgttccagaagctatgtggaggtacagcttcgcacaaagcacatggacgatatcgcggagatcggcgtggccaatcatttaagctacgaaaagcgccaggagggcgagcgggccagacgggatgagattccggagggcgcgtgcgtttattttgacgaggcatacgagcgctgccagcgcctggtgtcgctcaagttggctgagctcgatgtcaatatgttttcggcgatcaacaatgacctggtcaatgacggctgcgggctgtaccgggggcggctgattctgccatatgagcatttatcgaggcatcagaatgagctggtggattgagggggttcacgggcaggcatgaatctggttgcgaatagttgacgaaacgggaagattcatatatagttgcctgtaaaggaaaaatgaccgaaaatgatagggaggaaccagtttatggaccatacatcctgccgcctgcgtctggctgctatcgccgatgcacctgcgatattggaaatttatgcacaatatatggacacgccgatcacgtttgagacggagctgccgtccctggaggaatttgaggggcgcatccgggcgatcacggcagaatatccgtggattgtctgcgaggatgaaacgggcagaatcattggctatgcatatgggcataagcagcttgagcgcgcggcgtaccgttggaatgcggaactttctgaatatctggacagtcgggtgacgtcgaagggcatcggcaaacggatgcttctggtgcttttagagcttttaaaggcacagggcgtccacaccgtctacagtctggtgacaagtccgaatgtgaagagcgatgcgatgcataacggatgcggattccggacgatgggcgtgtgcaaaaataccggttataagagcggaaaatggcacgatgttacctggtatgagaaagcgctgctgccatatgaggacgtaccggcggagatgattccgattggggagatggagaaggagacggtagataagattttggcgtctttttgaacagagacataaaacaaatctgcataaaataaacagggcgtatgaaaaaggaattttccattttcatacgccctcatccgttctcttttattcaccagcgccgtaatgcgctgtccattcattcactcagattagttgaagtatctctttaacagaccctcaaatgccttgccatgtctagcctcgtcacgagccatctcatgaacggtgtcatggattgcatccaggttagcagctttcgcacgttttgcaaggtcaaatttgccttcggttgcgccgtgctcagcctctacacgcatctccaggttcttcttggtggaatctgttacaacctcacccagaagctctgcaaacttagcagcgtgctcagcctcttcgtaagctgccttctcccagtacagaccgatttccggatagccctctctgtgagccacacgtgccatcgccaggtacataccaacttctctgcactcgccttcatagttagctcttaaatcttcgagaatatcctcgctgacaccctgtgccacaccaactacgtgctcagctgcccaggtcatctcgccggactgctctttgaacttggaagccggagcgccgcatactggacatttctccggagcagcctcaccctcgtatacgtaaccacatactgtacagacaaatttcttcatagtcaattctccttttctaaaataaatttttaatttcgtgttttatagaaacaataaatagatagtaaagttgcttgcaaccattctgtttcataggagcttttaaaacgaaatcgtttatttggcttaaactaaaacagtaatgattactgatattaagatatcatagattcttgcgtttgtcaatgaaaaaatagaaataattcttatttttttcatttttatcgataacctggatattctcagaactttttcgctggtgatgtattcatacccggtcagcgcatggcagaaatcgggaagcggctcatttggtcccgtctgttccgatacaaaatcagccgcttctatattagtgtttttcccctttcagacactcatcgcatatcccatagaaaaacacggtatggtcatcgatcgttcccggcgcaaattctttggcggctgtctccagctccttggttgcttccatcggaatatccatgacccgtccgcactggcggcagacgtagtggtaatgtggggatgtatcataatcgaaatgatccgtgccgtcgccgcaggacagcttccggatctcgcccagctcaactaacaggtttaaattgcggtaaacggttccaaggctgatattcggaaactgttcccggatgctggtgtaaagggcgtcggcggtcggatgatccttccggctcatcaggcaggctttgatcgattcgcgctgacggctgtattttaaggttttcataagcgacactccaatccttctaaataatattgataatgattattatttatattatgcgtcctgacacgatgaaagtcaatcttttttcaaagatttccgtgagaaattttagagtcaaatttcaacatcaccgatgcataaaagatcccgtcctcataccggaaatccaccagaccctggtaccgctcagcgatcgaacggatggaggcggttcccgtgccgaagccgtcatgtttggtcgagcggaaccgcccattttcctcgatcggcggatggcagcaggtgttgtcaacggcgatcacgatgtgaccggcatcctcctgggcgcagatgcggataaacggcgcgctgtccgtacattcccgacaggcgtcgagggcattttccagaagattgccgaagatcgagcagagctgtggctcacccagcgggagagagggcggaagctggatgcggaccgaaaaatcgaccgacgccttgcgtgcctcctcgccgtaatagctgataatcgtgttgaccgcataattttcacaccaggtccgcgcggtgtccggtggaagcgtcatacggtattgttcgatgtaggtattcagatcctccgttttcccgctttgcaggtaatgctcgatgagatttaagtgctggcgcaggtcgtggcgcgcctcccgcacctcttcgatgtggcgggaaagctgctgatactgtgtgtactgcatcgccaggagggtgtcctgctgcgccgcgcgttcttccaactgcgcctgctggcggactgcattgagcgcttccaaaaggacatagtagatgagaattgtcatagcaaagagccagaggcgcgtgaggataaaacggaacttgcggacggtatcaatgtttaaatcaaagttataagcgcagataatcagggtgcatgaaaatggaataaaccagactttctgccagaatgcggagctgtctacctgaaaaacgcgttccgtggcatttttcataaatttgagcccgagggggagcgtcagaagcagaagaatcgagatgagcagcaggctttgatcgcggagtgaataataggtaatgctgggatcgtagaacagacggctttccagaaagaaacagatgccccggactgtgacaaaataattcaggatgaagtttcccagaaacagaagtttccagaaattagccttcacacataaaaaatagatcgccagggaaacgaaggcaaataccgtgtcggtgacccgggtcggtttaccgtggctgatcaggtaggtatacagggaggactggagcagctgaccgataaaaatgaacagaatcaggattttaatcggaaatcgaagctgctttttaaatggcagaatcgataaaataaaaaaaggaatggaatagacggtttcaacgagaaatgccttgccaaacacagaccagttcatagagtacctcccttccgcaatgtgtcaaacaagtaggctgcaaatgcttcttttgtctcttttttcttccggcggctgcagaaaaagcagctgccgtttttcagatggacagaaccgtcctcgtccaccgaggtaacatgtgaaaaattgataagcagcccgcgtccgctcatgtaaaaacgactgcccttcgggagcagtgccatcagatccgaaaaagagagccgtgtggcggcatcgccggagctggtatggatgatcagccggtggttctgcgtctccgcgtacagaaaatcgtcgagcagaatccgctgcgtggatgcctgtccccgtccgagcgccacctgaatttcgatgtaggcaggcgcggcgagaaatgtccggatctcatcgagacaccaggcaagtgccttttcctccaccggttttaagagataatcaaggggatgggcacggtaaccctgcagtgaataatcacgttccgttgtagtgaaaacgatggggagacgtttttcgcgcttgcgaagctccagcgccgtgtcaataccattgcgcccgtcccggtccagcataatatccataaaaaccgcattaaaaagccttggacggaaggcttccagaaatgcctcgccgctctcgtagcagtcaaagtacaccgtttccccgtgcttctccaagttctcctgtatcaaatgaatcagatgattctgatctatcttcaagtcttcaacaatcgcaaaatgcatcaaagctcaaccgcctcctttattcaaaaccgtgaccatttaggtcgaggtttgaccgtttgcgtcgatgtggttttcattaaatcgctcatttggtatgcttatagtataaaagttatgacttgaaatgtaaatgaaatattgttacagaaaaatcaaaaaaggcaggtgggatatggtacgggtagtgatatatggagaaaaaccgaccgacattgaaggactggaaaaaatgctgcgtgaaatattgactgaaaaccgcagatggccgatgattcacacgtatatcagcgatctggacgcatatctgcactttgtaaaggggaatccctacctcattatgctggcgtccgtgcagggcagacagggagtggaaatcgtagaaaaaatccgggaaaataacccggcggcgtccttaatctggctttccgaccgggacaatgcccttgaatcctggcggcttcatgtgactgcattcggggtatttccgacgaaaaaagaagaattagaagaatttctggcggcgtgtagcgaaagcctgctggatcggaagaaagagtattttgttcaagtgggaaacagactgaaatagaaaaattcgctcagaataaatggaggaaaacagcatgaaaaagaaatataagcgtgccctggcagcggcgctggcggcggtgatgatatggaatacctgtgactggcacccgcaggtgctggcaggcagttcggtgcagtatatcgaggaagtgaaggagctttcggatgaaatcctgcatcaggaggttccgtatggaacgaaatataaggatctggagctgccggacaagctgaaggtgcgggttttggcagaagaagcatcggatgaagaagacggtgcagaaaagattgctacgccgtcggagcttcaaagcggagacggtaaagtggaaacagaaaaaaagtctcagacgctttcttcatctgaaacagatggtacagttcggaaagcatccccatctgaggcagatgctacagaaaaatcggaaatagggggggtggatgacactgagcagaaagcatccccatccgatgcggacgggacgaaaaccgataaaaactggaaggaagtaaaggtccgctgggttctggatgagaccttcagtgagaaagatacatacgacggagaaacaccgggtacctatgtgtttgatgcggaattgaaaagcagccgctatgaactggataccggctttttgccaagcatcgaggtgacggtgctgccagaagaaaaaggtccggcaatcatcggattttcggagttagatgagacagttgcggtgcagaagcttcctctgggtgccaaagaaagcgatatcatcctgccggatatactggaggttgaggtggaagaggcggatgaaacgctggcggaagacagccagaatgtgcatctggtgaaagcagtggataagggcacagagaaagatacagatgcggaaacggcagtctggcagatttcaggcataacctggaaactggacgaagagcagagtgacctcccggagtttcacggcggcatttccgaaaaagactatttcgaagaatttgacgaggacggagagccggtcgagacctcgacgaagacctgggcgggctatgaggaggcaaatcaggactacaacggctgtgcctatgtctacacaccagttctgccggaggaactgagcaaatttgaagtggcggatacggctgacctgccggagatttatgtgatggtgggggacgcgggcgtggagctgctggtagatgcaccgtatgatttgaatggaaattatctggtgattgataaagacaatgtgtctagccttgatggaaagacgatcactggtacctatcatccgacggagagattatcggaaggtcgaaaaatcgaaggtggtattgtaattgataatgttacagtaaatttaacaattgaaaatgtaaatgttggctatggcactgatatcatagatgatgcagccggaatccttctgaaaggaaaagcaaaattaaatttgacagtacaagggaaaaattcattagcgggtacatacagcggtgctggaattggggtggaaaaagatgcaacactggttattacggagcagagtaccggaagcctgaaggcagtgggaggtgcctgtggtgctgctggtatcggaggaaaagccggatcaacaggttacgaaggtgcaaaagaggaatacgggacaggaaaaattataattaagggcggaaccatcgaagctgaaggtggagcttattgggtttatgcgtataattatcatggaggagccggaatcggaaccggtctgtatggaatcggcggaaccattgaaatactgggcggaaggataaccgcagcaggaggaagggagacaggagccggaatcggaggcggagctggtggaagtgtagacaagatcgtgatcggcggggcgaggggcaaagctcccgatataaccgtatcttcttataataatggcgaatcaggatatctgggagctgccatcggcagcggatggaatggagtgaatggtttacaattatcctgtggcgatatccggatattaagtggatctgtggaggtaacgggcggaaatattggttatggagtgttaaagcctcttcctggaaatagcatgaaaggcggcagtgtcactatttccgaggaggtgcagttagagctgccggttgaaagctccattgagcccaggggaaaatgtatctacgggaaaaaaatattccagatcaccgcttatgataaccagctttcaaatggaacctatcaggctgacatatccctgtatcaggaaagtgatacagaaaaagcaaccccggtttatcaaacaaatgaagaaatgaatgtctccggattcaggggaacgataccggatataacccagtggatgggctattccgggaatatgaagatggttgtagcgctgaagccttccgatggcgggacagttaagacgatggagggaagggttgttctaaacaaaggaacggatgaaaccatctccgtcacgcttggagaagccgcttaccagaagacaatggctctgaccatccatgatggccgtttgaaggatgataagaattatacactgacggttcagatcggggaagaagcaagcgaaggcggtactgcaccggatgtggtaatctattcatctcaaaaagcttccggttatcagataaagatcgatacagtcagctggtatacgcccctgtccggagtggttccggtatcggttcaggtacaggaagaaggaggggaaggagaaaatacggatagctttaaagtaaccggatccctcacgatggagtcagaggaggaaacgaatctttccctcaccatcggagaacccctgtatcctgtccggttccacttctattcatccaatgtgcaggcggcagagaatgtatccctaacagccagacgactggctggagctgcttcagaaactccggttgaattaaagcaggaagaaggccagtttgcctttgacgggaagctgacaatcgatgcagcagcaggcaatcatgcatatgccctggcatatcttccggccggaaattaccggtttgtgataaatacaggtattgcagaattaggcggatccagcggaagctttactctggacagtgaaacggtaaaggcagaggttgccggaacggatattaccgtattaaatgaggcagaggcgctggagggagagctggatctttcccttggaaatatatctttttccggggcagatggtaagctgacaattttatattctaaaacagatgattccggcaaggtggttacagcaaagttaatagaccagtcctatgataaaagctatcggatcacttcatctaagctggtagagaattatcatctctctgtggataccccagcttccgaggaattaaagctcgtattaaagagccttacgattacaccggcagaggctactgcaccgattcagataaacggagaatcccatgtgaccacctatctggaaggggaaaacaagatttcgattaatcaatcaggggaaaaagtttcacctgccggtatcagcgtggcgaaagatgcaaagcttacgattgacagtgagccggaacagcagggctccatcgaggtgctcaataatacaggtgtaaaggggactggtgcagcaattggaggaaatggaggagaggatgcaggaaccattcacatcaaggggggaactgtaattgcaacttccgattctaacggagcggctatcggtgcttcggcaagaaatagtgtaaaagaaatacggattagcggaggaacgataactgcagaaacaaaatcgaatggtgccggaatcggaacaggaagtgcttttggcaagaaaagaaccggcaaaatcgtgatagcaggcggaacggtgaatgcaagctcgttgagtggtgccggaattggaagcggttatggatatgcccctggagacccagcgataactgctaagattgagattcatggcggaatgattacagcctattctggacagggagcctgcatcggaagtggtaaagacagttcatcggaggtgctgattgacggcggcactatatgcttaaataataaagaagcatggagtagggacgctgcccatattggaaagggggctgcgaattctacacgggcacaaactgatgtgacgattgcgggaggaacgatccatctgatcaatgcgggtgcatatataaaaatccctatgatttatggttgggaacaggtagatggaaattggcagaagaatacagcaaaagacgggaaagataacccagtttattataccacagcggatctgaccggtatctatgagaataatacactggttaaaaaagcaggtattgaaggtgaaggaagctcctacggctttcaggatgtccggacagattccaacggaaagatctatatgtatcttccagaatcggaggcagtgaaagcctcctttggcggtgtggaatttaccggaacagtaaaggcagacacggatgaaaatgtattggagcgtaaacagacctctattgattatcaaagggaagtcctgaaaaatacggctctgtatgatctggaatatgcggaatccgagaattctgaatcttggacaaagatccgggcaggaggcgaagcttctctgacgaaaattctggacaatcagccggagaatgcgagagagattaccctgtatgtgcgaaaggcagccgcaggttccacagcaggcgaagcagccgcaataacgattccggtaagaccggcaaaaccggatccgatacagataacaaatgtaacgaaagacagctaccttattaaggctgggacggccgtttccggttgtgagtacggaatttcagaatccgtggatggcgagcttcagtggcagtcagggacttggtttaagaatcggaagccggctaacacctattatataacccttcgtgtgaaagcaacagacaacagttttgcatcgaagtcggctgatcgcttatctgtgacaacgccggatatcttacggttccaaggtcccgctggcgacgtatcctttgaagcgaatggaacctatggacagacactttcagagattccggtacagctggcagagggatttcgggttgttaattctagaggaacggaggtttctggagaatggagcttcagtaaggagcagaaaggaacgcaagcttcctccatttatccggaggtaaagggaaccactgcatatcaggtagaatttagcccggagggagcatcggaagggcagtatggaaatagtttgaaaagaagtgtgattccggagatatctccgaaagagttaaccgcagttgttacgacacctattgaaaagccttatgacgaaaataccgacatcgcattagcggcgacggtagcgataggaactccgggtcagaactataccataagcggtctcaaaggacgctttgaagatgccaatgccggaatcgataagacggtaaccattgattcctcagaggcaaaggttgagacaggcgagagtgcagtgaatctgcagaattaccgtatcatatatccagcccagaccggaaccatccatcagatacagggttcggtttcaatcgattcgcaagcatggaccggagaaaaaacctatggagacgacagcttttccttgacaggtgtgaatgtagagggagatggagctctgaactatacaagctcggatgaaaaggttctcaccgtggacgcacagggacaggtgaccattaaaggtaccggttctgcaaaggtaagcatcaccatggaagatggaaagaattatattggcacaaacacaccggcagatggaacgataaccataaaaaaaggaacactcgccctaactttaacggctgtgaaccggacgaccggagtccagctttcgaaaggaattctgggaacagaggaagaggattttgatatcattgccagagtacagggagtttaccaggacaagctgcagggttatgttcatttctatgataatgaaaacccggatgcagatatagtttcggtaggggaagatggaaccgctgtacttaagtggacgaagccgggagaatcatttgtaggcacccacacaatcaaagccgagtttgattgtggcgaatttaatacgtgggaatccagatacaacacaccagctccggcatcccttacatttgaaatcagtaaggcagctccaccggcagaggataagccagaagactccgacaagccagataactccgacaagccagaccaatcaggcagccagagctcttcctccggacgtgacaagtcttccggcagcggagcgaccaggcgggatccggtgaggggaagaaccaacagcatcacaggtattctcacaggaactgccaacagcactgccaatgacggaaagagtcactggatgcaggatgaacacggctggtggctccgcttcgcagacagcagctacccgaaggcagaaaaacgcggtacaaatggcattgcatatgcatgggagcaggtaaacggcaactggtgggcgttcgatgaaagcggctatatcaagaccggctggatgcgcgacgaagactatggcggctggttctacctcgatccggaacacggcatgcagaccggctgggtcctgattgacggcaaatggcactatttccacccgacctcagacggaagaaaaggcatcctgtatgtcggacgtctgacaccggacggctactatgtagatgaaaatggtgtgtgggatgggaaagacagacagtaaaaagaacatttaggtcgaagtttgactgattgcggcttctatctaaatcccttatgaagccgagtcaaaatgaaattccaatgtgtttacagctgtattcatgaaaaaatataatgagcgcaggagaaaagaatgcggctgcgaagcagacatattcttttcttgcgccattaacgaacgaacagccatgcgaagcagggcggtagagcgcgatagcgcgggttcgtgagtggacgggtgagaatacgtatgatataatgaaccccgggggatcataacctgattcacaaggggaaaacaaaccgacacaggaggggaacacatgaagaatttctacaccgaagaacagtggaatgagattctgaaacagcaggaatccgtacttcgctacgacacatttacccggaaacaggcgcttgagctggggcttttgattgcagagatcacgggggaaaaatatcacggttcggtcgctgtccgcatcgtggaggacgagacgaccgtctttgcctacaagatggagggcgcgacgctggaagcagactggtggatgaccaataagctggcagcatcgcggctcacggggatgagctcgctgcgggcactgacggcatcgagagccggagaactggaagcatcctggaaagtgcgcgaggagaacttcttcgtgtgcggcggctgcattccggttttcatgagagatggaagccgtccgtttgcctatgtgatggtatccggcatggaacactgggacgatcatcaggtgatcgcggatgcgatggcgaaacagctgggggttgagattccggaggttcaaaaagagcagccataaaatgattgacttgtaaaaataaagacgtttgcagaaatggaaggtagatgagctatctgcatttttgcaggcgtcttttgttgttttactgtgccgtatggcgatgaattatccgttattttgtatagcgcacttccccaccaggtggtataattctagtattataaaattttagattcaaagaacatttgcaatgattcagatgttttctgcatagccgggaaccgtctgaggcagccagagaatgcgaggaatgtggatgagtaaaaaagaggtacgtcaggcggcggcggaactggccgagcgcctttgcgaaaaagactttttagaccggtcggggctgagccggaaaaatgtgatgatgctcatgaacaaggatcactgggaggagcagttcgcccacattttcccgattaaaaagcggatttcctgcagtgcggtttacgaaatctgcgaggaacctttaagccttttagggcatgagccggaagagggctggatgaagtttacctaccagtatgtgtgccatattctctacccggatgcggagtttaagaagaaaaatgccgctttttccgccggtgcggagttctatctggcagtgcttcagttcgtatttgaccgcgagcgggcggtgcttccgtacaaaccgatggaggactttgcatttttggatgatgaggaaacttcaagctttgagtgcgcggcagaatacagccgtttcaagaagtttttcgcccaggaatacatctatgagatgatgcgcctcaatgcggaggtgacgccgtttcggacgctggaacatatcgcgggtgtgcattatgtcgcgatgacggtggcacgggggctttacgcggcgggtgttccgattgatctgacgctgacatcgggggcagcagcaggtcatgatctcggcaaattcggctgcaagccgaatgagcgggttccgtatcttcattactattatacaaaccagtggttcaacaaccattcaatggaatacatcggccatatcgcggcgaaccattcgacctgggatctggaaccggaaaacctgtcggttgaatccctggtgctgatctatgccgatttccgtgtaaaacagagccgcggcgatgacgggcgcgagattacctacatttctaatctggatgaggcgttcaacgtcatcctctcgaaactcgacaacgtggacgaggtcaaattaaaccgttaccgctttgtttattccaaactgcatgattttgaggattatatgcggtctctcggtgtggatgtggatttgaatggacacccgaaaaagccggaggtgctgccggatatttcccttcggaatgcagagcagacggtgcagtccctcgttttcatgggtatcgagcataatatccgcgttatgcatcagatgggggcagaacgccagtttggcaatctcctcgaggcggcgcgcagcgagaaggattggaagagtgtccgcgcgtacttaaacattttccgtgaatattttacatacacaaacgacaaacagaaagagcagacgctgggctttttatatgagcttctgatgcaccgtgagggcgacatccgcgcgcaggcggcgaggctgctcggacacgtgatcgcgcagttcaatgccggttaccgcaaggagcgcccggcgggcatgccggatattgccgaggagcgcgtgatggagatctggaagcgatatctggaaatgatcatccgaccggaccacaagctgatgctgcagcagaaacggcgcattcgttatcaccttaaaaatgtgctggcatcggtggttgatcatgcgacgccgggcgatctgcgggaatttctggaggcatttctggtttggtatgatcgggcggatgagctggatccgggcgaggcattttctttgctggatacggtgcatttcatgccgtttgataagctgagtgaagaggaactggggaaaatcgcaaaatttgccctgattgagtcgcagagcggggaaccggatgtgcggatcgcatcatggcgcgccttcaagcttctgacggcgtaccagccggatcatccgtgctgtgccgagatcggcgtgtgcgtgagggcggcgcaggttggggacaatatcacgatgaccttcctcaaataccgcgtgttaagtaacctcggagaggacacggcgagagaacaggaacttttgtatgaccgcgacgttgtctctgatattttcctggataacctcaaaacagcgacgccgtgggtcatcaagtcggccaatatcaagctgctcgtcgatcagatcgcacatggcaaacaggaacatatgctgcatatcgcagcgcatctctcaaaccttgtaaaagtcagcgagcacgtgatcgtgcgccatgatgccggaaccgccctgcttcgcatcatcgggcttctgacaccggatcagagaaatgagatcgtggtcgagttgatgaaggggctggaagtcggtgagtacgaattttccaaatatattccgcagtatctggggcaggcggcgctgtggctgccgccggaacagctggaggagatcgtttcctacctacatggcatgatggcaaatgcaaacgaccagatagtctcggttgcgcttgatacggtcggcgtgctgctggaacggtattcgtgctacccagaacgctttgcggaggaaaaagaggtatgcgaggaacggcgcggacgtctgcttggcatcctgcttagcggtctggccaattaccgcgagtcggtgcgccaggaggcgatgctggtgctggggcagaccgtcttcggctcatcctggatggagtgccgggagaaaaaagagctgttcgccctgtccttccgcaagatgctgttcttattcaatgaaaataagggaaatgagctgacggcattttatcgtgcggcgtccctttccaatatttaccggttcatcacgcagtaccatatgaccgagggcaatttagagatcaaagagcggaaccaggtggcattcttcccaggcacatttgacccgtttacgctgtcacacaaggagattgtccgcgagattcgcgacctcggctatgaggtatttctggcggtcgatgaattttcctggtcgaaaaaggcgcagccgcatctgatccgccgtcagattgtgagtatgtcggtggcggatgagttccatgtgaacctgttcccggatgagattccggtcaatattgccaatccggcggatctgaaacgcctgagagaggtattttccggaaaagagctgtatatcgtggtcggcagcgatgtcattgccaatgcctcttcttataagaagaaaccggttaaaaattcgattcattcgatgaaccatatcgcgttccgacgcgtgggtgatgtcaaggcggacaataaatacaatcgtcagatgatggatcagatcagcggcaaggttgtggagctggagcttccagagcatctggaggacattagttcgacgagaatccgtgaaaatgtcgatctgaatcgcgatatttcgaatctgatcgacccgtctgtgcaggaatacatctattacaatggtctgtatttgcgcgagccggaatataaaccatatatccgcgcgcgtgcgatctcctatgaggaggtggagacgccggatgaaatgcttctggcggaaatttcgaattttgttctgcaggacgaagaagatcgcgagaacctgttgaattcgatgaaggagtcgggcgaccggctgctgcttcttaggaataccgtgcaggaaaaccggctcgttggcgtggcgcggcttcgttatctggcgccggatgagctgtttgccgttctgggacaggtcagtctggcagatcaggtgcgccgccatacctacggtgagattcttctgatttcgggtatctatgtcgagcgcgacccgatgatcaacgacgcggaacagttgcttttaaccgaggcgatcgcacggtcctttgagtataaatgcggctatgcacttttcttcccggcagacggctactgcccggagcgcgtgctgtcggcggtggtccgccagggctttgtgaaggctccggaatccccggaagacgcgccgctctatctggtcgatatgcatgcgccacttgtattagtgcagaatctggaaacgacgttaaaagaaccattttccagcaatccgcgcgttctggatgcgatctacaaggcgcatcgggaattgcagatggcgatgacgcgcttctatccgggacagctggttctttcgatgtctgcgagcgtgatttaccatcgtctggtggaacggatcacggcgttaaatggtgtgccacgtgatccagtgacgccgagacacctcggcggggcgatgtgcgtgccgttcggcaagatcctgcgtggaaaagttattccgaatacggtgacgaagacgctgcatacagataaagtgtacgatccggagctgaaagagaagtcgatcgaagcgttcccgtactattcgccgctgcgaagccagatcaaggctatcaagtcctttgaccgcccggtgattctggtcgatgatctgctgcatcacggcggacgtttcgaggcattggaaccgatgctgcgcgaagagggcgtggaaatcaaaaaattggtgttaggtatgatttcaggctacggacgcgacacgatggcgacgaagggcgtgccggtagacagtatttattacattccgaatctgcggaactggtttgtcgagtccacactgtacccgttcatcggaggcgatacggtgcgccgcgataccgtgaaggtggcgggactgacgccgtcgatcaatatgatcctgccgtatgccgcaccgccggtacagggaagtacgccggaagccgcgtttgagttctccgcgtgctgcatccgcaacgcgcgcaacatccttctagtgctcgaatccgagtaccgggcgctgtttgcgagaaacctgacgttaagccgcttgtctgaagcggtcatcctgccgctctgcccggataaaggcgagtgtgtcagctacgatccgaatctggcagcgtcggtgtatctggaaaatgatttggagatgctgtatcggacgcggaagtgagaaattatgtcaaataacgcaaaataatatcatataagatatcaaaaagagcagggggtatacaatatgtactattataaaattggagataaaatctgttgttccttcaatggaaatttatcatacgaaaaggcagaaatgccgcacccgggcacgccgctcacattcttattcgagcgcgagccgggaaccggaagagattcttttaaggtaaactcgccgctgcttttattccaggaggcagagaatgtttcctggctgagcagccggaagctggaggtgcaggcggcaaacaagaattgtgagcttgacgaggcagtcaaagccgcgatcgctcagggcgtgatgcgcgcagtcaaccgccagcatccggattttgaggctattttggcagaaaaaccgcagaaaacgaagaaaagagtccatgttctggcgatcggcgatgtcggaagtacgctgttgaccgggcttcatcttctgggcggcgactgcatcagttcgatcggcatctgtgatatttccgataaagtgaccgcacgctgggaatttgaggaaaaccagattgcctacccatggtcgtatgacgtgctgccggaggtcgatgtggtaaaaccggaagacctcttcaagtgcgatgtatttgtatttgtcgcttctaagggaatcccgccggttggttctggcgtcaaggatgtgcggatgtaccagtttgaaaataactccaagatcgttgcgcagtatgcaagacaggcgagagccgagcatttcaagggcttatttgccgttgtctccgatccggttgacccgctggcaaagacggcatggctggagagcaacaaggacgaaaacggcatccttgatttaaagggactccgcccggaacaggtacagggcttcggactcggcgttatgaatgcgcgcgcggcttattatgcgaagcgcgacgggcggttttcacagtttttgattgaggggcgttccttcggaccgcatggacaggatctcgtcatcgcagattccattgagaattacaacgacgagctttcaaaagaactgacccagctgacggtaacggcaaacctgcatatgcgtgcgattggtttcaagccgtttatcgcaccggcatattcctccggcgcgatctccctgattctgatgatgcgcggcgaatggcactgcggttccgtattcatgggcggcatcttcatgggcgtgaaaaaccgttatactgaatacggtctggaaacagaaatcctgccactgccggatgcgctgtatgagcggattgtgacggcggaggaaaatctgaaaaagattgtgtgattgatgagttttatcgcaggaaggaagcgaaaataaatgattcattcaaattcagaaggagatatctatatagaagaaatgcctctcctcctcgtccatctgcgcgaggaggaaaaaggcgcggatgcgcgcctttcggaggtgttatcctatgcgctggacggctacgcctacgagacagcgacggaaatcagtgcttttgaagattatgtaaaccgatggaggtgcctggagaagacacagaatcaaaaaaatccagtccagggacgtatcctgtttgccgtgccgcttggcacatctggcatcaacctggagctttaccgtctgattcgtttcctgcgggaacatccggattttctgaacggttttgtcggcggacttttggtggacagtgaaaatgacctctattccaaatcggcggcgaaggatctggtatttgccgctaactgtgcgggctgcgcgttcgtgggacgcccgctcgtcgagggcacgcggacactttccaattacacgatcgtttccaataatcttggaaccgatctgatgggggcataccgcgagagcgcggcggggctggtcaaagaagtactgggaacggattgcgtcaggaaaaaatgtccgaaagtattggtattgcacgcgtcaagccacaagacctccaacacctacgcgatctggaaccgggtgaaagaacagctcccggagatggagatccgggagatagggcttcgaaacggtacgctttccgactgcgccggatgcccgtacaagatgtgcctgcattttggcgagcagggaagctgcttctacggtggagtgatggtcgaggacgtctatccggcagtccgcgaggcggatgcgatcgtgatgctctgtccaaactacaacgatgcgctgtcggcaaacctgactgcgttcatcaaccgcctgacttcgctgttccgtacgacgcggttttatgacaaagcgctgtttgcggtggttgtgtcgggctattccggaagcgatatcgtggcggaacagcttatcgcggcgttaaatatgaacaaaaccttctatctgccggggcagtttgcgatgatggagacggcaaacaatgccggggcagcgatgcagctgccggggattgaggaacggatgaatgcgtttgcggagagaatccgggagacgctattatataggtaaagaggcgttataagcagggcagcgtcactgggagagtttgtaactgttcacaggtaggaattttttgaactgaaaattccgtacgatacagttccggcagcagattttgccgatttggaatgcgtagcatcggcaaaatcccgttgctgggcacacgtgtgtgaacagtaacgagagtttcacatctgctataaaattctttacagatttcatgaaactaagtatactatataaatatgcaaaaactgttttactcaggctaaaagctatgtgaaattgtactatttaaagagggagaaaggcagaaatgaaatcctggagacgaacattagcgataggctttatcatagcgataacttcgcagctttattggaacgtatttgtcaacaatttccgtgtgtcagcgtcggttatcctgcttccggtgctgattatgacagtcggaagccagattcacacgatgacgatctgtacggtgacgtcgatcattgtttttttgttccgaattgtgatatattatctgcagggaatgccatccgagatgctggtacagcttgcgatgcccggagcattcttttatatcgtgtacggcatgatgttcaagctgcagatccggaataaacatatcgcgaatctggaaaatgtgattgcggcggcatttttctgtgacttatgctcgaatatattcgaaaacttcctggcggcgcttcttaaaaacaatgcgatgccgggaccggatataattcaaaagctttttatgatcgctgcagtccgcacactttttgtggcactggcactgatcggagaacagcagtaccggcttcttcttacgaaagcggatcatgagagccgttatcagcggttatttcttatgacaacgggactcaagactgagatttacctgatgcataagaacaccgaggagatcgagcgcgtcatgagcaatgcatacaagctctatgagcagattctggaaaaggatcttccacgggaaatgcagcagatgggacttgagatagcgcgggatgtccatgagatcaagaaagattacatccgcatcattcagggcattgaggaggcgatcgaggaagagtcgaacgaggaaacgatgagcctgcaggatcttcttcggattctggaatcatccacctaccggaccatggcggagaaaaagctggatatccgtctgatgtttgactgccgggacaattttatgacgcaggaacactaccagcttatgacgattctcaaaaatttggtaggaaatgcggtggaagcgatcgaatcgacgaaaaaaagtgggatgatctggattcgggagtacaaaaaagatggtaattatgtgtttgaagtagcggacgacggaccgggaatttcagaaaaacatctcccacggattttcaatatgggatattcaacgaagtttgatgaaaaaaccggcaatatatatagaggcgtcgggctctgcggtgtgaaaaacgcggtagaggagcagtttgaaggtagtatttcagtggattcggaagagggaagaggaacgaaattccatattgagataccgatagcgaaattggaggaaatagagtaaatggagatttatattgttgaagatgatatgtcagtgatcagcgtcctgcaggatattattgaagataatgatctgggaatcgtctgcggaacttcagagggacagccggcggatgtggatgatatcctggcaaagaacccggatatggttctgattgattttctgatgccggaaaaggacggtgttcaggtcatgcgtgagctgcgggaaagaggctgcaaggcaaaatgcatcatgatttcccaggtggcggcgaaagaattgatcggcaaggcatacgatgcgggcgttgagttcttcatcagcaagccaatcaatatcattgaggtaaaatcggtcatccgcaatgtggatgagcagatcaagaatgagaaaacactgacgaatattaagaaaatgttcatggcagagatcgcggatatgccgaaggagaagaaaaaagatgacggttacggcagaaaggtgctttacattttaaaccgtcttggcatgtccggcgagaagggcggcgacgatatccttcggatctgcgagtatctgcacaacaacggacgcccgatctcccaggtcagcatcggtcagctctgcgagcttttgagcgatgcgccgaagaacatggagcagcgtgtccgccgtgcgatcgcggtcggcatgtcgaacctggcacatttgggtattgaggatttcatgaatgaaacctttactgcatactccagcaccctgttcccatttgaggaaatccgggcagagatggatcacatccgcggtaaacgccgttacggcggcaaagtcagcatcaaaaagttcatcgacagcctgatgctggcggtagatcgtgaggtataacgggtagatttacaaaactttccaatctgtttatcataagttaaaaaaatgttataaaaattttatgtttttatgatggatcttgtagttttttgtcggggctacagtattatacacttgcgagcaagaaaaaaaataggttggaggtagttgtatgaagacaatcgagcttgatatgtatcaggcaaccgcagttgcggcacttgtactgttactgggacgtgttctggtagctaaaatttctattcttcgtcggtattgtattccggcacctgtagttggtggtttcctttatgcaatcgttcataccatcgtaagaggcatgggcattctggaaatttcctgcgacatgacacttaaaaacgtattcatggtagctttcttctgtagcgtaggtttcacagcatccttccgtatgctgaagaagggcggcgttcagacagttgtattcctggctctgtcagctgttatggtaattcttcagaacgttctgggtgctggtctggcaagcgtatttggtctggatcctcgtctgggtctggcaaccggatccatcccgatggtaggtggtcacggtactgctggttccttcggaccgttacttgaggaattaggcgtagcaaatgcgagcgttgtagctatcgcttccgctacttatggtctggttgcaggctgcgtaatcggtggtcctatcgcaactgctaagatccgtaagtacaaactgtccgcagctactgaggcagctactaagactgagactgtagagacagatgagactggtgcaatcgattccgctagaatccttgacggtcttctgtacttaatcgttgctatcggtgctggtactatcgtatccatgttccttggcaagtttatgacattcccgttctacatcggcgcaatgttagttggtgctatcatccgtaacatcatggatgttcagaacaaagagatcccgatggaagagatcagcacactgggcggtgcttccctttccgtattcctgggtctggctatgatcgatatgaagctgtggcagttagctgagctggctgtaccgatggtagttatgcttcttgcacagacagtacttatgttcttctatgcaaacttcgttgtattcaacgtacttggcaaatcctacgatgctgctgttatgaccagtggtttctgtggattcggtatgggtgctaccccgaacgctatggcaaacatgcaggcaatcaccggcgtatatggtccggctccgactgcattcatggtagttccgctggtaggttccttattcatcgactttgtaaacgcaactatcctgacaggattcatcagcttcctgggctaatagatgcgaatttcaagaggtctgcttttgggcaggcctctttttttgcgtaataggaaatttcttggaattttctatcacacaaaaaggaactaatgtgccaatgatacgtactcgcgcgaagatgcaggttgtcgcaagcggccgcgcgagacgcccgaatgtgccaggacacattcgttgtccatccccgagttataatcaagaacaatataactccataagcaaatgataataacatctataagactatttttatttgattttgccgaagagatgatatataatacattacagaaacagaaaagttcacaaaaacgatttggaaccagagggaaaattgtacaagatagatgaatatatcatcgagtattagtggtaaccatagttgagtgagctattcaaacttatatacatatcaggaggtattatctaatgagcaagtatgttgacagagttcttgcagaactcaaagagaaaaacgcacatgagccggaattccttcagactgcagaggaagtattatctactctgggtccggttgtagatgcacatccggagtacgagaaggtagctcttcttgagagaatggttgagccggagagaacaatcgagttccgtgttccgtgggttgatgacaacggtgctgttcatgtaaaccgtggctatcgtgtacagttcaacggcgctattggaccgtacaaaggaggcttacgtttcgctccttctgtaaacctgtctatcatgaagttcttaggcttcgagcagacattcaaaaacagcttaacaactctgccgatgggcggcgctaaaggtggttctgacttcgatccgaacggcagaagcgacaacgagatcatgagattctgccagtccttcatgactgagttatatcgtcacatcggaccggacgtagatatcccggctggtgaccttggtgtaggcggacgtgagattggttatctgtatggccagtacagaaaacttcgcggtgcattcgagaacggtactatcacaggtaagggaatgtccttcggtggttctctggttcgtccggaagcaactggttacggcgctgtttactatgtagaagcagttatgaaacatgagaacgatgacatcaaaggcaagagcgttgttgtatctggtttcggtaacgttgcttggggtatctgcaagaaactggctgagctgggtgctaaggctgttaccctgtctggtccggatggatacatctacgatccagatggtgttgtaactgaagagaagatcaactacatgctggagatgagagcttctggacgtaacaaagttcaggattacgcagacaagttcggcgtacagttcttcccaggtgagaaaccgttcggcgttaaggctgacatcattatgccggctgctactcagaacgatgttcgtatggaagaggctaagaagatcgctgctaacggcatcaagtactacattgaggtagctaacatgccaactaccaacgaagctctgagattcttaatggatcagaagaacatggtagtagctccgtccaaggctgtaaacgcaggtggcgttcttgtatctggtcttgagatgagccagaacagcgagagatacagctggacagcagaggaagttgattccaaacttcatcagattatgactggtatccatgatggttccgcagcagcagctgagaaatacggcttaggctacaacctggtagctggtgctaacatcgttggtttccagaaagttgctgacgctatgatggctcagggtatctgctggtagtcagtagttccccataccatatggagtgaatgtataagtaatataattgcataacgcagttacataaagagactgctgattcggacaacctggcgacaggaagtccggctcagcggtcttttttgcgtaataggaaattccttggaattccctattacgcaaaaaggcactaacgtgccaaggaataattcttacctcccacacataaaatagtaatggtaatttttgacagtctatctaagacgtaaatgttcaagcagggaggagaatgagagaatgagaagaacaaaaaagacgaaaaaaacgagaatgcagggacacatggcagtagcaatttccatggcgatggcggcagggctggcgctgacgggatgcggcagtaccggaacgacaggagtatcggcagagacatctgcgggaggtaaaaatgaagccgggaggaatactgccggtaacacagcaggcggacaggaagaaagtcagagtggggctggcgctgcgcaggtgacagacacgaaaaagggcggaaaggatggcggaaccagcctcattttcacgacgggaggcgatcagggtacatattatggatttggcggcgtgcttgcaggaaagataggggaatcgaccagcacttcggtgacggcgatcacatcgggcggttcgcaggcaaatatcgaggcgctggatgcacatgatgcggatttgggatttgtgcagtcggatgtcatggcatatgcctacaatggtacgaatctctttgaagaatatggaaaagttgctgatttctcgaccgtggcggcgctctatatggagcaggtgcagattgttacgctggatccgtcgattcagtcggtagccgatctggaaggcaaaaatgtttcggtcggcgcggcggggtcaggcgtctattataatgcggtggatgtgctgggagcatatggattggatatcgaaaaagatataaatccgacgtatcaatcctttggggacagcgcagaggcgctgcaggatggcaagattgatgcggcatttgtcgtagcgggtgcaccgacgaccgcaatcacctccctggcagcgacgaaggatgtgtatctcgtcagcctggacgatgagcatatggatcagctgattaaagaatcgccatattacagcaaaaacacgatcccagcgtccgcgtatggaacggatgaggatatcaggacggtggctgtcggtgcggtagtagtggcgcgcgatgacgttccggcagaggatatctataacttctgctatggcgtctttgaaaatatggattccatcaaggcggcgcatgcgaagggagcggagctgaaccttgaatttgccacttcggtcacagcggttccgtatcatccgggagcagcggattatttcgcagagaaagggatggaggtgccggtgaaataagggggaaacccagaaatgaagtatgaaagggggttatacgaatgggtgaatggaaggaaaagaaaaacagggcaccagatctaaaatacctggaacgtgaaagcctgaaaaagggcgattcggacacagggacagctgcggatgttgagttagtcatgaaaaaatatgaccgcgagtccaacacgcgcgtctggcaggggaaaccagcatcgatcatccggtggctgtcggtattattttccgtttacagcatttatgtgacgcttttcagtaccgccttgccggaaatccggttgtcgatgtttctgggaatgattctgattctcgggtatctgcattatccgattcagaagggagacggacgcatcaaccatatgccgtggtacgactgggttctgatggcagtgggggcggttccatttttctattttgcggcgaacgcgcatgcgatcattaagctggcgacgcgggtcacgaagaatccggttatggtgctgatggcgattctggcggtgctctcgctgatggaactttgcaggcgttgtgtgggaatcccgattctctgtgtggtcggtgcactgcttgtatatacatttgcgacggtgcgttttggaaaggttatttatgatttattttacacgacgagcggagttatgaatacgccgatcaatgtctgtgcaaaatatattgtggtctttatcattttcggggcgtttctggaacggacggggatctcgaatttttttatcgacctggcgaactgtctctgcggttcctcggcgggcggtccggcgaaggtggcggttatctcctcggcgctctgcgggatggtatcgggatcttcggttggaaatactgtcacaacgggttcggtcacgatcccgatgatgaaaaaatgtggttaccgcccggaatttgccggagcagtggaggcggctgcttcgaccggcgggcagatcatgccgccaatcatgggcgcggcagcattcctgatggcagaatatatgggcgtgccgtatgcgacggtggcgctgaaagcgattcttccggcagtgctgtattttgcgggtatttatatcgcagtgcatctggaggcacagaaactgggacttcgtggaattccgcgggaggaactgccgcagatgcgggtgctgatgaaacagatctatctgctggcaccgttgattgtgctggtggtgctggtatcgacaaatacatttacgatgcagttttctgcgtcggtagcgatctttgccgcgattgcggtcggtgctctgaaccggaataaccggatcacgctgaaaaagattgtggatgcgctggaggcaggcggacgcggcacgatcacggtggcggttgcctgtgcgatggcggggctggtggctggatgtatcacatcgaccggtctggcatcgaagctgatcacggcaattgtggcagtttcccagggaaaaccgctgatcgcgctgttcctgacgatgttatgctgtatcgtgcttggcatgggcgttccgacgacggcaaattactgtattatggcggcgacctgtgcgccgattctgattgcaccggagatcgggatcaatctggtctgcgcgcatttctttgttttctatttcggaatcgtggcggatatcacaccgccggtggcattggcagcttatgcgggttccgcgatcgcgaaagcgcctccgatgaaaacggcgctcaatgcgacgcggctggcggttgccgcttttatcgtgccgtatattctggcatttaacccggcgatggtattcatcgacacgaatgcactgcaggttgtgcagatctgcatcacctcgctgctcggtatcttcgggattgcggcggcgcttaacggttttctgtttggatggctgtccgttgtagagcggctggttttgatcgtgggcggtctgtgcatgatggatccgggcgcatggacggatcttctgggacttgtgttggttggcggtgtgacattctggcagaagaaccatggattggagaaagatgcggagacgggtgttggatgaatgaatttgcattgcagtttacataacgtgtaaactgtgatgtgaagtgtgtgtaaacgtagaccgcacaggcgcaggcatgtgcggtcttttgtggcataggaaacttcgtgcggtttcagcaaggtatgttttttgtttccggtgggatgtttgcaaaccagaggctgtgaatcgggcggtagcgaatcgattttaagataattttcacaaattcactctggaaatatcgggtggaatatggttaaatagtcaatagagttttgccacccaaaagagtgtagaaggaacggaaaggagaaataccaggatggatgagaataaagagttggtagagacaatggaggactatgccgaggagctggaggcgtctttcaagcgtctgcatgagggcgatattgtgactggcacggttgttgcagtgacggacgaccaggtgctggtggatctgaaatattttgctcagggcgtgattgaccgtgagaatctgagcaatgatccggattttaatatgaaagaagagattcagccgggcgacctgctcacggcaacggtaattcagaccgacgacggcgagggcaatgtcgttttatcccgcaaggaggcgaatgacaggatgacgtgggaacatttccgtcagctgctcgatgagcgcacaccgcttgaggttactatttccgaggtcgtaaacggcggtgcggttgcgatggtggaaggcgtgcgcggctttataccggcgtcgagactggatgcagcgtatgtcgaggatctggacagctggaatggaaagaagattccggtgctggtgattgaggcggatgaggagaagaaacgtctcgtcctgtccggcagagagttggcgagagaaaaacaggatgcggagaagaagagccggattgcgcgctgtgagaccggcgcgatcatggaaggaacggtcgagacaatcaagccatacggcgcgtttgttctgctggaaaatggcttaagcggactggtacacgtttcccagatgagtaaaaagcgcgtggagaatccgggtgcagtcgtaaaggtgggacagaaagtgacggtgaaaatcctgtctaccgcaaatggcaaactaagcctcagcatgaaagaggtagagccggacgaagcgccggaagaggaagtatttaattatcatgaatcaggcgaggcgacaaccgggtttgccgagctgttaaagggctttaaatttgactaaatagcagtaaaggagagggaaaattgaatatccctgagacgtataatcagcttgaccagtggacgacagtcatgtttctgtacaattctgccctgaaagcgattaacacgaaaattgaaattttaaataacgagtttattcatttatataattacaatccgatcgagcacatcaaatcgcgcctgaaaacgccggagagtattgtcaagaagcttaaacgtggtggatatgaggtgacgatcccgaacatgattgagcatctgagcgatattgcgggcatccgtattatctgctcgttcagcccggatatttaccggatcgcggagatgatcgcgcgtcagtcagatgtgacggtgctggtggtgaaggattatatcaagaatccgaagccgaacggatacaagagttaccatatggttgtgacgatcccgatttatctaagcgatggcccggtggatacgaaggtggagatccagatacggacgattgcgatggatttctgggcaagtctggaacacaagatttattataaatttgaaggaaatgcgccggattatctggagcaggagctgaaagcctgcgcggatatggcggatatgctggataataagatgttttccctgaatcaggcgatcacgaagattgcggaggaacaggcgaaggagaaggaagctgcgaaagtggcggaggaaatgaagaaagcagagcgggaggatgtgcccgcggggaacgagcaggagccgaaagacgggaaacggagcggggaatctgcgtccgggaaccggaaagaagccggagagtaagagacgaagaaaatgaagatacgcaggcggatgggtgagacaaagcagattgttcaggtaaatggggggaatattctgctgtttgagctggctttccgtttgctcacgctgccgcttcttttgcaggcagtggcggtgctgttccggctgtcggtgcgcgcgtctggctacagttatgtgacggtcagcaatctggtttcctacctgctgcggccggttacgatcgcgattctggttttgatggcagcgatcctactggtgggagtttccatcgaggcggcgggacttctggcggcatatcaggcggcggcactctcgcggaaaatgagcgctttttcgatgtttgcggcaggcatccgtctgacggtatcagagatccgaaagcggaatctgaggttgtttctggtgctggcggttcacggcctggtgcttcattcatttttgatttaccggatgttatgtcatgtgaaggcggtcaaatttatccttccggcgcttctggcggagaactgggggcggcttttactggttggcgtgattgttggcgcggttgtgatttcacttccgacgatttttatctgttttggctgtatgctggagcagcggtcgtttcggggcggatttctgcgaagcagggagctgctgcgcggtaatcgggtacaggtagttgggacgcttgttttgtgcaatctggcagttacggcggtaacggtggtgctctatctgattgcggttgtgattgtggcggtgtttgctgtctggtttgcggaccggcgtctggaattgattctggttttagaggcgcgcgaccggatcgagatggttttgatgccgctcatgagcatcgcgctgatgtcggtcaattatggcgcattgacggtgttatatgtgcagctggaccggaaacgtcagaacaaagagcgctggaagtttgaagctggcgaacatgcgggtcttccgtggatgagccgccgcaaccggatggcggcgctggcacttctgacggcattgagcgccggagcaatgtacgacgctttttaccggggcaatgtgctggcggcggatcagctgagggaagtgcagctcacagcgcatcggggcgcatcgacgagcgcaccggagaacacgatgcctgcgatggaggcagcggtcgatcagatggcggattttgcagagctggatgtgcaggagacgcgggatggtgtgctggtattgttccatgacagcactctggagcggatcgacgggacgcggcggacgatccgatcgctttcctgggatgagctgcagcaggtagatgccggtggctggtattcggagcagtacagcgggacgcggattccgaagctggaggacgttatcgaatatgtcaggggacggatgatgctgaacatcgagatcaaatatgccggcgcgtcgagcgatctgccggaaaaggtcgtggactgtatccgggagaatgatttcgtggaacagtgcgtcgtgacatcgacgagtctttcttatttaaagcgggtgaaggcggcggattcggatatttatacgggctatatcctgtcggcagcatatggaagctattacgaggatgatgcgatcgattttatcagcctgatctccagttcagcgaaccggaagctggtcgagcgcgtccatgcctgtggtaaggaggttcatgtctggacggtcaataaaaagagtgaactggagcgaatgaagatgatcggcgtcgataacatcatcaccgaccggccgatcctggcgcgggaggtcattctgggcgaggaaaatgcggagaatctgctggcgcggctgagggcgctgctgcggtaaagaaagattacaggaaaaataaaaatcaggagaaaaacatgagatttgtactacagagagtcaaacacgcgagtgtaaaggtagacggcgagctgatcggctcgatcggccgtggatatatggtgctgatgggcgtcagcgacaccgacacggaggaaatcaccgacaaaatggtggataaaatgtgcaagctgcgtatttttgaggatgagaacggcaagacgaactgttcgctggcggatgtggatggcgagatcctgctgatcagccagtttactttgtacgcggactgcagccacggaaaccgcccgggctttacgggtgcgggaaatccagaactggcgaaccatctctacgaacacgcgctggcgcgctgcgccggacaggtgcggaaggtcgagcacggtattttcggggcagatatgaaggtcgagcttttaaacgatggaccatttacgattctgctggatagtgatacgatagtgaaaaagaaatgatttgcaaaaggaggaaggatatgtcagtagcgaaagaacagagagaaaaactgatctgggaatttcctaatattggaaagaaagccccggagcaggaggaaaaggcatttgcgtattgcgagggatataaggagtttttaaatgcggcaaagaccgagcgcgaatttgtgcgcgaagcggtgctccgcctgaaagaggctggttatgaggagttcgaagaaggaaaaatctatcagccgggcgacaaggtataccagatcaaccgcaagaaagcgcttctgatgagcacgttcggaaaacgtccgctggaggacggcgtccgcattaacgtggctcacatcgattccccgcgcctggatctgaaaccgaacccgctgtatgagaaggcagaggcggcatatttcaagacccattattacggcggtatccgcaaataccagtgggcgacgatcccgctggcgatgcacggtgttgtgattttaaaggacggcacatcgatggatatttgcatcggcgaaaaagagggtgatccggtcttctgcgtgaccgatctgcttccgcatcttgccgcacaacagaatgagcggaaactgaaggacggcatcaagggcgaggaattaaatatcatcgttggctccctgccgtatccgtgcgaggaagaagactcgatcaaggagccggtcaagctgctggcgctgtcgctcttaaatgagcgctttggcatgacggagaaggatttcctgcgtgcagagatcgagtttgtgccggcagtaaaggcaacagatgttggtctggaccgcagcctggtcggtgcttacggacaggatgacaaggtgtgcgcgtacacggcactgaccgcagagatgaaagccaagtccccggaatatacgactgttacgattctggcagataaagaggagatcggttccgttggaaatactggcttaaattccgattttaccttgcattatattgagggactgtgcaaggcaggaaatgtggatgttcgcaaagtgctgaagcattctctgtgcctgtcggcggatgtcaatgcggcgtatgacccgacgtttgcgagtgtatttgaagaaaaaaactcctgctatctgaataagggtgtcgttttgacgaaatatacgggtgcgcgtggcaaatccggcagcaacgacgcgagcgcggagacgatggcgaaagtgatccagatcatggatgaggcaggcgtatactggcagatcggcgagctgggcgcagtagacgtcggcggcggcggcacggttgccctgtttgtggctggcatggatgtagacgttgtggatatgggtgttccgattttatccatgcatgccccatttgagctggcatcgaaactggatatctataacacatatctggcatttgcagcattttgcagctaaaaaatagccagaaaattccgtcaggaaagacaaaacgtttttttctggcggaattttttatcaaataattcatatccggtttccttaaattgggaaaagtgatgaactatgaaaaaagagttgctgaaaatataaaatattgaaaaatcgcttttgcgacaggctggtttgtggtatgatgattggtaagacatacgtgcagatatatcatatgtgcgtttgaaagccaggtgccggatggcgcaagcaggaaattgagagatagaggacgactaaatgaagagatggaaaatagcaggcatctgcctggcggttgcggtagcagcagcggtatctggatgcggaaaaaagacagggactgagacgaccgcagcagagagcacggctgcagagacagaggagtatgtcgcagagagcagcgtgaagctgggcgagtacaaaggcatcgctgtgaccgtgaccgaggcatccgtgacggacgaggaagtagaaaaccagattcagcaggtgttgaattcaaaggccgagtaccgcgaggtagatcgggcagcccagacgggcgatcaggtcaacattgactataagggacttttggacggtgaggcatttaagggcggtaccgccgagggctatgacctgacactgggatccggcagctttatcgatggattcgaggatgggctggtcggcgctgtgaagggcgatcagaaagacttaaacctgaccttcccggatccgtatccgaacaacccggatctggcaggtaaggcggttgtatttgaggtaacggtcaatgcggtcaaggagcgctccgttccggaactgacggatgagtttgttgcttccgtatcaccggatgatggaaccgtggagaaataccgtgaatccacccgtgagaacctcttagagcagaaacagctctcgattgacaatcagagagatacggatattctgaatgcggttgtggacaattcagaagttgtatgctcgactgcatcgatcgacgaggcatatgatacacagttaaaggcatacaccaacatgctttcctcctacggcgtcgatctggcgacctatgcgggtatgattggaagcgacgaggacagcttcaagcagaagatccgagaggaagccaaggaaatggcgaaacagtccctcgttttaaatgagattgcaaagcaggaaaatatcacgatcgacgattcggacaaggaagcactggcgaaacgctacggctatgagagcctggagacgatgcttcagaacgataacatcgatcagaagatggtggacgatacggcactgatgcagaagacacttgattttctggtagaaaatgccaagatcaccgtcagcactgaggagaacaatgcggcgctgaatacagaagcagccgaggacgaggcggagtagaaagcgtctcataaaaatacagataaggggatagacatatgcagattttatacgacagaatccgtaaagatggaatcgtaagagcaggaaatgtattgaaagtggatcgtttcctgaatcaccagatggatattcatctgttccaggagatcggcaaggagtttaaacgccgttttgagggtgaggagatcaacaagatcctgacgatcgaggcgtcgggtattggtattgcctgtatcgtagccgaatattttgatgttccggttgtatttgccaagaaaacaaagacgaaaaatattgccggagaagtgtatacaacgaaagttgaatcgtttacccatggcactgtatatgatattattgtgtccaaggagttccttggaaaaggcgataaggttctggttatcgatgattttctggcaaagggcaaggcattagacggtctgaccactttgattcaggattcgggagcagaattagttggtgcgggcattgtcattgaaaaaggttttcaggacggcggcaaacgcatccgtgataagggcatccgcgttgagtcactggcgatcgtagacagcatgaatgcagagaccggggagatcgtattcagaaatgaagataaataaaaaagcattgttttttgatattgatggaacattgtttagtgaaaaattaaggcaggtaccgcaaagcgcggtgcttgccttaaaaaaaacaatggaaaagggaaatttgacatttattaatacggggcggacctggtgccagacgtccaaaatccgggaggaagcgccggtaaacgggctgctctgcggctgtggtacctatatttccgtggatggaaagacactctatgaccagagaatttcgccggaacgggcggagaaactgaaagaggatattctgcggttccggatggatacagtgatggagggcgtggacgcctgctttttccggccagatggggtgcagaccgaaacgatgcgggcgatccgctcgattctcgaccagagcggctcggtttcggcgaagaactggtcggatccgtccttttcgatcagtaaattttgcgtggcggtcggagcagacagtgatccggcgggattttttgagacacttcgggattttgaggtgattgaccggggcggcggcttctatgagtgtgtgccgatggggcattctaaggcgagtgcgatcgagtggattttgaagcaatatgggatcgcgctggaggacgcgtgggtctttggagacagcatgaatgatctgtcgatgttccagtatgtgccgaatgcggttgtcatgggaaaacacgatgccgggttggagccgtatgcgacgtttacggcgaagaccgtggaggaagatgggatttaccgggcgatggaagagctggggcttttgtaaggaagaaatggtttggtgtttgatatatatgtataaagagtgaaatttgtgtggatgtgtggagttcagagaaacatcctgtggagagaggtttcaggaaagattgaactggtggatgtctgagactggaaatgctcaagattgtggatagttgagacagaactagaatgaaagggtgttggataaagatatatgaattatgagaaatcggaaaaatatgaagttctcaagcggtatttcggatatgacagtttccgagaaggacaggaaatgctgattgatgggatttttgatgggcgtgatgtgctgggaatcatgccgacgggcagcggaaaatcactgtgttatcaggttccggcattgattcttccgggaatcacgctggtggtgtcaccgttgatttctctgatgaaggatcaagtcacggcactcaatcaggcgggcgtccacgcggcgtatctgaacagttcgctgacgacggcacagtattataaggcgcttgggtatgcgcgcgaggggcgttatccaatcatttatgtggcgccggagcgtctgatgacggaggcatttcttgattttgcgatgcacgtggatattgcgatgctggcgatcgatgaggcgcactgcatttcccagtggggacaggatttcagaccgagttatttgaagattgttgattttatcgagaagctgccgaggcgtccggtggtcagtgcttttacggcgaccgcgaccaaggaggtccgggacgatatcatcgacattttgcagttacagaacccggtgatgctgacgacgggatttgaccggaaaaacttgtattttgcagtggagacgccgaaggaccgctatgcggcgatccgggcatatctggaggcgcacccggggcagggagggattatttactgtctgacccgcaggaatgttgaggagatctgtgagaagctgatccgggatggattttcagtgacgcgttaccatgcgggactttccgatgcagagcggcagaagaatcaggatgattttatctatgaccgggttccggtgatggtggcgaccaatgcgttcggcatgggaatcgaccggtcggatgtacggtttgtcctgcactgcgggatgccgaagaatctggaagcctactatcaggaggcaggacgtgccgggcgtgacggcgaaccggcggagtgcatcctgtattatagcgggcgggatgtggtgacgaaccagctctttattgagcggaaccaggacaatcaggagcttgacgactatacgcggcaggtggtgctggaacgtgaccgggaacgcctgaaaaagatgacgttttattgttttacgaataagtgcctgcgtgattatatcctgcggtatttcggcgaatatggaagtaattactgcggaaactgttcgaattgtatgacgcaatttgacacgatcgacattcaggcggcggcagagagtctcttaggctgtgtgcagtcgtgcggacagcgctatggaacaacggtgattctcgacacggttcacggggcgaatacggttaagatccgcaattaccggatggatgagaatccgcattatggggagctggcgaaggagagcgtcgtgcatctgcgccagatgtttaatttcctccaggtggaggagtatctgtttgtcacggcggatgagtattcgattgtcaaattgacggaaaaaggtgcggctttcctggaagcaccggagccaatcgagatgaagatggcgaaggagcgggagaaacagacagctggaagcagcaaaaagagccgccggggcgcgaagcttccagccggggcagccgaatttacggagaaggaagagacgctcttcgagtcactccgcgcgctgcgccgcgagattgcatccgaggaaaaagtgccgccgtatatcgtattttctgataagacgctgacgcatatgtgtattttaaaaccggtcacgaaagcggagatgctggaggtgtccggcgtgggtgcatataagtttgaaaaatatggagaacggtttctggagtgcgtgcggaagttcttaggacaataagcgggaatcctcggcaattcaattaccgagatgaaagcgcagtagtgtgcatatctgcacaatgcaaatagtataataattctcatcctttgatagtaatgccgtaaccggcatacaataaaaacgaaaatacgttcgaataatggttgcgcattacatttcgatatgatatactatatgtatgaaagaaaatcttatatattataggacttgtgtgtgtaatattaactaccatatgg

SEQ ID NO: 11051 - DNA, 39981 bp, Unknown
  gut microbiota DNA sequence
gaaaagctgctggatacgctgaccggagccaatgcgaccttgcttgcctacgccaacaaaaaaattgaagaactggacacccgacgccagactatttcaaaggcaatcgccgaattgagtgttgaaaccatatcgccccagcagataaagaagttatcctattatctcgacaactgggacagcatagattttgacgacaaaagaaaagccgccgatggtttgatctctacgatcaaggccaccagcgaccgtgttcagatagagtggaaaatctgacatttccgctctatcgcccctcatttctattttatcttgtttgtaccccttgtacaccgatgtttacatctgtacaaatatcagataatctatcaaccactattctattatattgattaatgggtataaacctatatgttttaagcattcctttcgtatcaataaagtcagttaataaaatacttaaattcatatgtatcctccctacactttgccttttgccaaaatgtatatcaacaattccgaaaatcttacccctggggtaaatcagtttccgcatgtgtcttctgcggaaactgaaacacacaaccatttttgccacaaatcggcgcaaccctttgatttacctggcttttctcgtcagaagagtgactgtttccacatgccccgtccacccaaacaaatccaccggccatgcttctttcgcccgataaccatgctttgcgaatactttcaaatcgcgtgccaatgtatccggaccgcaggagatgtataccacccgtttcggctgcataagggctaccgcgtcgataaattcttcggtacttccgcttctcggcggatccatgaaaacgacgtcggcgctctcgctgcgggctgccatatgagacatgaaccgtccggcgtcattgcagaagaactgtgcattggtgatgccgttcttcttcgcattctgcactgcatcccgcactgcatcctgatttaactctacgccgataactttgcccgcgtgtttgctggcaatgagaccgatcgtaccaataccgcaataagcatccagtaccgtctccttgcctgtaagtcctgccagttccatcgcttttccgtacagcttctcagtctgaactgagttaatctgatagaaggaacgggacgaaatacggaaccggagtccgcagagttcatcttcgatatatccttttccatacagtacatgttctttgtcccccagtaccatactggtgcttctgccgttgatattctggacaatcgtagtaatttccgggtgcttttcacgaagcgccttgacgaaattgttcttcgacgggaataccggggatgctgtcaccaaaacgaccagaatctcgccggttgtgaagccgcggcgaatcaatacatgacgcagcagaccgtatccggtgtcctcatcaaaaacacggatcttgaacgaacgaagcatactccggatcgtcacgatgatctcgtctgctttctgatcctcaatcagacaggaatccaccggaagaatccgatgtgtcccctctttgtaaatgccagaaatcggattgtttttccgatccaatccaaataccgcatgaactttattgcggtaatgatacggctcttccattccaatgatcggacgaaccggacagacaccgcccagcagttcttccatgcgcttctgtttttcttttaactgctgatcataggttaaatggagatactgacagccaccgcactcacggtaaatcggacattttatttttccacgctgtccaccacgaaccgttttctgaccatctttttcccctacatttcgtttcctgtccccatgtgtgccccatttatcctcaactccagacactttacgggcagattttccctgtttttccccattgactcccacttttgcactattcttggaaaatccagttgttttctccccccggccaaacgatttctttccttccgttctttttccatcagaaccattccctgccgtctttttccatcctgtttctttcattttttctcacactttctttcttcgcttatcttctacgcctctcccaactctgcttccgtcttcacgcccttaaaattcttcttccaacgttctttcttaaaatgcaccgcgtaaatgagtccgcgcacgcattcatcggctgccattgcgatccagacgccttccagcccccagccgagcttgctgccgagcaaccaggagccggcggcagctacgacccactggaaggtgattccgaccgtggtcggggtcaggacatcgccgaccgcaatcaggcatttggtcataacaatgttgaccgcgcgcccgatctccagcacaatctcaatcaccagaatccgccgtccaagcgcaatgatctccgggttgtctgtgaaaatcaggaaaatgtatttgcctcccaggcacatcagcaccgccatcccgacacacgccgcaatcgcaaccttcagtgtcgcattcactcgtttctgtatatcattcagacggcgcgctccgatcaggtagcccagcacaatctgggttgccgtcgcgatcgccatcgcataaacataatcaatattggcaaaaatcgtacaatatcccttggttacagtaaccagagtgccaaaggaattaacaattcccagaatcatcatctgggagagattgtacgaaaaactttcgacccccgtcggaattgccaacaggcagagattttttaaaatctgcaccggaaatggacgcagataactcattcccattttgacgcggcggctcttgaaaaacattccgatcatcaatgccagaccaactaacttactgatatccgtcgagatcgccgctccgaccgccccaagctgcggcattccgaaccagccgttgattaaaatcgcatttcccacaatattcatggcattcatgataactgatataatcatgacttcctttaccatggcaaatgcgcggatcatcgctgagaaggtcagataaagtccctgcaccagaataaatgcgccgacaatcagcagatacagcgacgcctcatcaaaaacctcctccggcacatggatcgcccggtaaagcggcgtgtgcccggcaaaaaccagaatcgttgccgcaagactgacgccgccgatcagcacgagcgagaccatgcaggtccgggatgcatttttttcatcctgcgcgcccagatactgggacaaaatcacagtaaccgccgtcgatgccatgctcagcacgataatcaccaagttcatgatctggttcgcattgacaatcgccgccaccgagggctgcgacacccggcttaccatcatctgatcgacgtttccgaccaaaagctgcaataacagttccacgaagatcggcagcgacatcagaaataaattccggttcgtattcattttgtcaatatcattttgatatttcatattttccccttacttgtaataatagcaaaacagcacatacagccgtccaaacactctcgtattcgcccggctgtatgtgccattttacacgatactatattgaattgcaagtggaagtcattctttttcccttacaaaagccccctcatttttaaataatccttaatcaactgaaccgccccgtccacaccaatctgtgtcgtattaatcaaaaggtcgtagttctccggcttctcccagtcgcgccctgcataataacgattataatcgcggcgttcccggtcgatccggtggatatttttgaggacatctttgtccgcgtagagattccgctcacgcacgcgctcctcgcgcaccttgatatccgcgtagaggaacacgcgaatcagtccctcggtgccgtccagcacataatccgcgcagcggccgatgatgacgcaggattcctccgccgccagcttccggatcacttccgactggaagcgaaacagattgtcggctgaaatgagatcggaaccgaacgacggtgcgcccttttccggtgtcaatgtattgataatcttgtataaaagccggttgcccgccttctcgtctgccagatggaaatagctctctttgataccgctctcatctgagttcatacggagaatgttcttatcataaaaactgatccccagatcttccgccaactttttgcccgtatccgcaccgccgcttccatactgcctcgcaatcgtgatgataatttttttcttctctgacataccaaacccctccctttatctacaagaaaatgcatattgctttctatcttcagcataccataatgaggggattttttccattcatttttacaaaaagcacagcaaaaatcaatcaaataagtcattctattcttattttcagatagtgcctgtttttcagcttttctcccctacttcacctccctctcatacaaaagcaccgtcggaaatcccgccttccgcagttcccgttccatccgcacagcgttgtcgagatttttaaacgcaccgacccgaagcttgaaatacgtcccatcgtacaccagaaatgcagggaatcccatacggcgcagttcttctaactgctgctctgccagcgatcggatgcggtacgcccccgtctggatctggtaataatagtcgctctcttccaccggacggcgatccatgtcgtcatcgattacatttagaatcccagatgcaaccgccgccgcaatttcgtcaaactgcgcgtcaaaccgcttgttatcctccggattgtcgataaatccgacttcaaccagaaccgccggcatctgcgttttccgcagcacaatcaaatccgggcgctcgatcacgccgagatccacatatccggtgcgcgccagctctctctggattgaatccgccagctgttctgattccctgcctgtcttgtacaccagcgtcatgacgcccgaaccttttcccggctcactcgccgcattgcggtgcagggaaacaaaatagtccgcgcccgcctcatttcccatctctgctttctggtagggcgtgtcatagacgtccgttgaccgcgtgtagacggcattcaccccattttcctcgagaatcctccctactgccagcgccagacgcagggtatcgtccttttccatccgatcctcaaatactgctcccggatctttcgttccgccgtgcccggcatctatcatcactttctttttttcttccaaaagaaaagactcctctcacatatcgttgtactactaccatatgtgaaagaagtcccaaagtttcctgtttaattattcctcatactccccgctaaacacttccaccgccggtccagtcatgaacacgcggtttttctcgcggtcccagcggatctgcaggcagccgcccaacagctcgacctcaacctcatcctccgtatgtcctgccagaatagatgcaacggcaaccgcgcaggcacccgttccacatgccatcgtttcgccggatccgcgctcccagacacgcatttttacgtgtgtgcggtcaatgaccttgacaaactcggtgttggtacgatccgggaaacgcttatggaactcgaatttcggtccgatcgtctccagttccagggaatcaatctcatccataaacagaacggcgtgcggatttcccatggaaattccggtaaattcgtattccgttccatctacctcgatcttctccggaagctcggaagtctgctccggctcgcccatatcgacggtgaccgccgttactttgccattttcgaccttcatatccagatatttaatcccggacaatgtctcaacaaaaatctgcggcttgtccacaatatggtggtcatacgcatattttcccacacagcggatgccgttgccgcacatcgcgcctcgggaaccgtccagattgtacatatccatgcggcagtctgccacctcggatggggtaatcagaatcaatccgtcggaaccaattccaaaatggcggtcactgacggcaatcgccagcttctccggatcgtttaccgtttcttcaaaacagttgacatagacataatcattgcccagtccctgcatttttgtaaatttcatcgtttttgctgctccttctgcctttttgatcctattgtaaaggatcttacgccattttgtaaagactgattaccatttgtgccgcctcaataaggctgacctggctgtccatgctgcatttctgcagatatttgtgcgcctccggctccgtcatccggttccgctccatcaaaatagcctttgcggtgtcgatcgctttctgatcctcttccctgcgcttctgcggcggctggcgacgcatccgccgtcttttttccgtctgtgactgctcaatcatgcggaccgtcgaaactaaatctcccattttaaacggtgccggcaggcagacaatccttcccatcgcttcgccgctccaccggctcggggaagcaaggagaagcaaatcaaatcccggcggcagctggtcggcaagctgccggcaggtcatatcaccaaaccggtagccgctcaccacaatcccgcttcgcaaatcatcggttgacgctaaaacctgcgcgcccgatgtgcaggaggctgtgacctgtattccatgttttacgagtatatttctaatatttcgtccgtcctgcggcttcgaaaatgctactatgatgtttcccacgtggtctcacctcactgcgatttcgtaccccctaacaacgatacagatattccgctgtctcccaatccgtcacataggcacagaagcgttcccactcctctttcttgccctcgccgtacatccggcagaacttttccccaaatacacggtgtgcaaattcattctgatccagcttctggagcaatatccccaatgtctccgggaaccgcggcgcattctcatcgcccgcttcttcatccagcaccagcgccttctcgattccttccagtcctgctgccaggatcgccgtcagcgccagatacggattcgcagacggatccgggaactgcacttccacggaaatacgtccgttccggtcttccttcacatgaactgccttttcacttcctttttcccacacagccgccgggaactccggctggaacaccgtgctccgctctgccgccagacgtttgtatgaattgacggtcggattcgtgaaaatcatcatatcgctcagatttttaagcacgcctgccgcaaactgcttcgcctgcgccatcgcctcggcgccccgtctggaagagatcgacacgcccacatgaagccccgatccgtcgccgctcatgtttggcttcggcataaaagtcgcatgcagaccatggcgtttcgcaatccgtttgaccgccgccttgaacgtctgtaaataatctgctgcctcaatgccccggcgcgccggaaggacgaagctgtgctgtccggcagtcagaccatgatgcgtgctctcgaccgcaaatcctgcttcctccaggctcagaaccatgtcccggcggacgccctctgccaaatcgatcggtcccgcgtcataatacccggcaacctcatgcgtcaccgtcgtcggtctcccatcatcatccgtgtgaaacagataaaactcacactggaaatcaaaatcaaagtccagtcccatcttctcggcacgttttaccgtttcctgtaaaatatgacgcgaatccgtccaggacggcgtcccatccgcattgcagacctggcagatcacgcgcgctacattttcctgcccggaatcccacggaagaacctgatacgttgatgcatccggcttcaagtacaattccacactctcgctctggtccgtcagatactccggcgccgccgcgccctcgatcccagctttctgtaagccgccgagcgcaaaccggttgattgcatacccctctttcatcgctttttccgcctgcctccgcgtcatctggaccattttgcactgtccaaaaatatcggtaaactgcagctttaccaaatcaacatcttcatcaaaaaaaggttcggatcggttcgtattctctcccatcgccatttcctcctataaaaaacgaggcagctgtctctgtttccagtcagccccctcgccctcttttcatatacgcccaaaattttcctgcctatacagccccaaaaatttcaagcatacgtttatgatcgttttgctgtgtgagaatgcccctgtcattcttttcacaatttttataaataaaatatagcagtccgatatttttctgtcaaatacttttttatttaatccgcagctgttcgctcaattcatttcccaactggatatgtcccacatagccgacctcgccgaccatgtaaaccatgccgtcctccttgatttccacttccagcgtgccacccggcatatggacgtacatatgcggatcggcaagtcccaggcggtatgccgcactcgccgccgcgcaggcgcagcttccggacgccagcgtatatccaacgcctctctcatagatctcgatctggatattcgtccggtcaaggacatttaaaatctgcgtattgaccttttccgggaaatattcggatgtttccgaatgctcgccgatccggcacaccatttccttcgaaatctcattcatccagataacacagtgcggatttcccattgaaagacaagtcgtgacatacggaatctttccaaataccatcgtctggtttaccatctcccgccgctcgccggtcaccggaatctcatcgctccagaacgtcggatgtcccatcgaaattttcacacgggtcgcatcctcgttgagataaaagactgtctcctcgcctcccagcgttttccaggagatcgtcgttttctgcacatatcccgcgtcccgcagatattttgcaaaaatacccataccgttgccgctcttctccgcctcgcttccgtccgcgttgtagatgtgtacataaaaatcattctcccccagatatggacccgccagaatgccatccgcgccgatgccaaaatgacggctgcacatcttcttgatattctccacattcaattccagatcattcttatttggatcaaacaccaggtaatcatttcccatacagtgatatttttcaagcacaacctgtttcatcgcgatacctcctgcctattttaatcaataccataaaattctttcatcaatgatttctattctacttccgttctggaaaccactctttctttaatttttattttaggaaaatatagcagcttttaatagaagaatcatgctttaaatattgcatataatgctatataatatgaactaagaaatgaaatatctgtgtttcaaaacatatttatctcagaggaaaacaacaaactcaatgcatttatacaagatataatttcccgcaacaatcaacctgcaatacactcaaaaaaggagtccccttatgtcagaaaataccacccacgaatcccccgcctacgaaaaacgcggctacctcaaccacgaattccgcctcttccacctgcgcgggcagatggatacaccggttgcctaccactatcatgatttccacaaagtcctgatcctgttaaatggcgaagcagactacatcgtggaaggccgttcctaccacctccgtccgctcgacatcgtcctcgtcggcgcgcactgcctgcacaagccggtcgtgccatacaaaagccgatatgagcgcatcatcctctacctgtcgccggaatgcctggatgcattctcctgtgctgactgtgcgctcgacctctgtttccagcttgccagagaacagcagtccgatgttctgcgcctcggttcccttaccatgacgccgctcttagaggcgctgtcaagactggaaaatgcctatcaggcaggtggtacaaatgacaatggcacagacaatgctaactttgaatcccttggtggcagcagttatggatccgagcttcttctgcgtttattattcctggaatttatggtacaccttgatcgcgccgcctccgaaaaccatcgggaatacgttccgacctccccttccggcgaaaaaatcctggaactcatgcgctacctctctgaacacccagaagaagaccacaccatcgaccagctcgccgcccgcttttacatgagcaaataccacatgatgcgcctcttccgccaggaaaccggctacaccattaccgaatacctgactgaaaaacgcctccaaaacgcaaacgagctcctgcgccggggcacccccgtcacagaagcctgctatcaatccggattccgcaattatgctgcgttcctccgggcatataagaaaaaatatcgcgatacgccgcataatttatccagattaaattaccaagaaaattttactatataataaggaaacttccccctattcttccctccggaatttctgaatcgactccatcagcattctgaaattccggatcatcgaatcaaacgccccatatttataaaaattgataaagacaagccccaccggcaccgccagaatcatgcctgtcagcccgcgcagcttaaatcccagatacaaaagaaacagcgtcatcagaggcggcaatcccatcgactccccgacgatcttcggctggatgatctgacggacgacctgcgtcaggatgtagagcaggataagcccggtcgcatacgcatactcccccgcaaacagtttcacaaccgcccatgggaacagcaccgttcccgttccaaagatcggcagaaaatccagaatcgccgtcaaaaacgccaacaggacaccgtagcggacacccagcaccaaaaatcctgccgcgagaatcagcgccaccacacacatgatacggaattgtgccagaaaatatccaccaatcagtccctttgcgtcccgtttcatatactcgatatagcggaatacaaatgccggaagatgctctttcagccaccgcatgatggactcccggtccgccagaaacaggtacgaagacaggataataatgaccatatttaccagaagattcggaatactcttcgccacatgtccggcgatctgcacggtcggttccgccgcccgcgataccagttttccaaacagaccatccagattatccgaaaatgccagcagcggcggttgtaaattctgcggaaaatattctgcaagcttgcgcccattctgcaatgcattctcgatctcagcgatcacactctgatatatttccggtgcatccgccagaaaacttcccatttcccggtaaaccagaagacccgccccgtaaaaaagaccgatcacaatcgccagcgccgcaataatgatcagcatcgagccgtggcgccgcaccagcttcacgcgccgttccagaaaccgcaccagcggatttgctaaaagtgccagaatccatccgaccacaaacggcatgaaaaaatgcagaagtctgggacctaaaaagatgaccagacataaaccaaggagcggaatcacaatattcagaatcattctaaaacatcgtttcatctcatccttttcctttccaagacgatgatacaatttcgctataccagattatagtgttccgcaatctttctgaatgccggaagcgatctctcgatctgtccatatgatacgcagtatgcaatgcgcacataacctgggcaagcgaatgaacttcccggtactaccagtacattgtactgtttgcatacctcacagaattccttctcattctccactggagatttcacaaacaggtagaacgcgccctccggcttgatgcaggaaaatccgcactctttcaatccgttgtaaagcaggttacggttgcggtcgtaagcttccagattcacattcgcatctacgcagcgcttgatgactctctgcatcagggatggcgcattgacacagcccagaacacggttcgcaatcgttgccgcctggaatacgtttgcgctctcatccatctcagacgggattaccagataaccgatacgctcgcccggaagggacagagacttactgtaagagtagcaaaccactgtattgcggtaatattttgtcacatacggtacaaccgcgccgtcgtaagccagctcacgatacggctcatcggacagaagcacgatcgatgtaccaaattccttctgtttcttttccagaattgctgcaatcttctgcagtgtttcctcggaataaataacgccggtcgggttgttcggggtgttgatgatcactgccttggtcttttcgttgatcttttcctcaaattcaacgagattcggctggaaatccaccgtattcggagatacaaccaccagctcgccgtcatagttgcggacataggaaccatactctacaaagtatggtgcaaaggtaatgacctgctctcctggatttaacagggtctttaaaatgacattcaaaccacttgccgcaccgaccgtcatcaggatgttgcctgcgtgaaaggaggtgccgaaccggcggtttaacgactgagcgatcgtctcacgcacatcttcatagcctgcgttggacatatatccgtgtacaaacagggaatcttcttcctttacgatatcctgaattgcctgatttacctctgccggagccggtacgctcggatttccaaggctgaaatcaaacacattctcacgtccatatttcgccgccagcttattgccctcttcaaacatcatacggatggcggagttatttttcataagcggtatcattttttctgaaatcattggcttgccctcttttctgtaaaactgatcaatgcggcaattctatctgtatacaagcagcactttaacttactgaattgtcgtctttttgttattatagcagattttatttcacttttatatcttaatccatatatttttaccgccctgcaaccttatgcgataccagaaatgtcacaaccgctgtcaccgcgaaataaaaccatgtggacggattgctgaaccaggttgtgaaaaacgataagagcatgtaaagtgcaaactgtgcgtacagaagataggtaatcggattctgcacctggcgcatcatccgcatcagcagatacgccgccgctcctaatatggcagaaaagatgaacacgccaattatgccgaaatcgtagtacgcatcataaaacatcgtcagcgtcgtcagctcttccttcgtcacataatacggaaatgccgtcaacgacggaaccagaaacttgagtcccgtcagcgtccagaacggtgccagcatcttcatgccccagctgtgcttcacaagtcccttgaccagacagtcgaaattatcgtaattgtttgcaatatagatatacggctgcgtcacaaaaatcggcaggtgccgtttcatctcaaaaaccgtattcaagtaggcagtatcatggctgcgcgcgatcgtcagcagaatgtagagcacaatcagcccagccagcgcaaaaacaacataaatcggattcagctggtgttccatctgtatgtaggtaatcaatgccagcagtaccgcaaacagaagctgggagcgcgacacgcacagaagcggaatcgccaccgccgctgcatctgccagaagcatacataccagccgtccccggctgcgaccgccctcgatgcaaaaatagatcacagagagcgccggaaccagcacacaggacaccgtcagataatgaagcccggtcacatggaaataggaataagcatgcggaacgccccggagcagcagcggaatatagcccatatagaccgcctcgatcgcgaaacagcctgccgatagcgccgccagcgccaccgcgcagaaaaagacggttccggcataagattccaacccccggcgctgcaccgcgccggaatgaccgcccacgcggacggacgcctcaccggaaaatgcttccagataataaaaagccagataaaagcccgcaaacgccgccaaaagtcccagccacgttcccgcactccatgcctgacttaaataactaagcttcatacacgccagtccctgtccacctacaaaggaaagagcgaaaatcccccgcagatgcagaagatttccactccggatatagtctgacgcatacagatacaccgccgccgccagaagccctgcgccggataaaagataatggcggccaagcgccagaagcagcgaagccgcatagcaaaccaaataaacgatcatagtttcatcctatctgtacgtctgtacacattcttttaccgcaccggttttccctactcgcccagcccgtcatcaactattttcagcatcgccgacagagcttcctcctcgtcttttccatcacagataaactcgatctcatcaccgctcttgatgcacgccccaagcacgctcaggacactctttgcattggacacggtgccacggaactggaactggacagaacaatcgaattttaccgcctcattacacaggattcccgccggtctcaaatgcagaccagtcgggttttttaatttaatttttgcttttaccattgtttaacttctttctcctcatttgtggatggcataccatactttatgcagcattgccgctctctgcatccacattttcttttgccgagcttgccccgctctcccggttggaactgctctggctgcccatgtctccacggtcactctcggtgctttccgtcgtctgggcactggagcttccatgttcgctgacccgcactgtcacagccggcgccgacagcatcttatacgcgtcccccagctggaactgcgccgctgccgtgtgctcgcccagtcccatgcctgatacatcgacccggatattcatcttcgccgccgacaggctgcttaaatcctcctcaagtccctgtaccttgacttccatcttcgtatcttcgacggtatagctgtagctgctgttctttccgtttagagtcacatcctccggtttgaccgtaaaggtcttctctatcaacttctcgacctgtagtgtcacgttgatcgtcgtgctgtccagtcccacgatcgtaagcccggacggcagataatcatccagatcgatctcgcactccacattcttcgtcgcgccctgcacattaagggacggtccctgaatcgtgagcgtgctgaccgatgccagatccgtcttaagccccgccacagacaccgacttgatatccgtcttcggacccgtatagcggtatccatccgccacttcaccactgacgtcaaaatcaagcggtacttcttttactttcaggatctgcatcgtataagagacatctccgccaaccgtcttgacagaatctcccaaatctgacagcacatttccattggcgtcaaaatactccggtgttgctgttccaccgacatccgccgcagcaccgtcaatattaaaacggatacccacgctgctgatctgtccgatcagggaggttggtcctttgaccgtcacctgagatggcaccattgtcacctcacccgcctcgtaaccctctgccgccttgccctgaggatacgctttcagcgtaaatgccttggtctgcagagcctcggtcgtgatcttgatgacctccggggacttcacaaccggcgtggactccagcagttcctcattgttcaccacttccactcggatcgggatcgcacccgtcacatcatacatttccgataaatccgcataggcgttgaaatccgacgcctttaccttataatcatccttcgtccggatcttgaaactgatcgtcgccgtttttttgcctaccacatcataggcaagatccgcctgctccagcacctgatcgttcgtgatcgtgaccggaacctccctcgtcgataccttgatcgggttcgccacattcacgaccgccagccacacaaagaaagcacagaacagggcaatcagcttgatcgcaagattattcgtcagcttttctttcatttctgcgtcttcccttccatattctgaaacgacctgtgttttccgtttcccgttttaccagaactgacaatatatctctcagttcatctccatccttgacactcttaagccgtccggacacagccaccgacacacgccccgtctcttccgatacaaccagcgtcacgctatcggtcgcctcactgactccgactgccgcacggtgtctggttcccagcgccttgctgatatccatattgtccgagagcggcagataacaggtcgccgccgtcacacggttaccgcgaatcacgaccgcgccgtcgtgcagcggtgtgttgtgctcaaaaatattgatcagaagctggctcgtcacgataccatcgacctcgatgcccgtcctctcgatctctccgagcggcgtgcccctctcgatgacgatcagggcgcccgtcttgacttttcccatctcaaaacaagcacgcaccagctctgcaatcgtcttttcgctgaaatcctcatttttcttcgtatcatccgttgaaaacagcgtcgtcagcacgttctggcttccgatctgctccagtgctttccgcagctccggctggaaaataacgatgatcgccgttaccgcaatgtacgatgtcttttccagaagccacagaatcgtatccagttccaggatcgcagctgccagaaagaatgcaagaataaaaacaatacccttcagaagcgtccacgcccgcgtatttttgatccagatcagcatttcatataccagaattgctataatcgcgatctctattaaatttttaaaggttatcttcggtacgaacgagatccacgaataaatctccgtcagtatctctgccattcttttccctccctttcgggctgcgtttctgttaccagtcacgtacatatgacccgtcacgcatttcttttaacaacaagtttcttttataaaatagtctatcttctctttactttattgatttcctgtacctttacatccgtcctcgagatcgcaatctttggaaccgctttcacatagtaataataatcgtcatcctcaaactgcgtgtactcggtccggctgtaatcgaccgaaaaaacaaacagctgatagatcagcgatgcaatgaccgcaccaatcattcccacaaccagctccggcactgacaccggaacgccaaagcggaaatcgccgataaacacaaccagaatctgtaaaataaggccagctccgatcgcgatcccccaggagtagttgatcgacagtttcttgagcacacagaccgtcagcgcccccaggcagcatgccgcaatcatgacaagcatcgccgggtttgccagcaggtttttgatgacctgcgccagcatctgcgtgatctcagtctgctcactgcctgccaagaagcttccgttctgcttcacatacagaatcacgtagtacagaaaaatcccacagctcatcggaatcaccgatacgaggcttccagtcagtccgagaatcatcgggactgcaaacggcaccttcagaaaaaacaagatcggcgttacaatcaggtacgcgctgtcacccggctgaaatccgtaatacagcagcaccacgatcagaaggaacaccaaggtgatgagcgccacttccatcgatgctgcaaagagctgtgccagcaaaaaaatcccaatcagaaacgcaatggctccaaatgggagaaatgcacatataattcccgcaaacagcggcaccagaccgccgctcagtttcggcatcagtccgatgttctggttaatcagaaacaccgccgcaaaggcagttataaaacgcaggaatgcattcacaaatgcactgtatctcgcatagaaagccttgagtgcttctttccctgcaaggagtcctctcatctgcctctcctctctctctccatttttctggcgcgccggtgtatatcgtagcgcttatccagatgtttcagtttcgctatgtagatccggttcatcctttcctcgtactcataccgcccgccatacacgatgatcgtcaggacgacatacagaaaaagccccccgaggtataaagctcctcctcgaaaagccagtcccttcagttcatccattcctatcgaactcagaactacttctacattaaataatacccacattccaaagagaagtatgctgcacaatgtatagcttataaatccccggagcagattgcggctgatatagtcgcttttaaaatactgattgactgttttcatctgggaagcatgcttcttctcaaacagtgccagttcggtcattaattttatcttgtcttcgttgagcatacatggttccttttttatatatgccgcggcttccggtccgatacgtcccgtttctgaaaccgctgcgccaaaaacgcattcttccataaattataacataacttttttctcttggcgagggggcggggggatttttcataggtttttcataaatttgtaagggattgtcagacatcaaaaaagagctctgccgatcacacattttcgcatgatcggcagagcgtatcaagtctgtttcataagatgtaaaaactatgccttttttgcttctttttatgttatgatacttttatgatgataccagggtcaaaaggtcagaagttcgacgcaagcttgcttgcaggagcatttttgaccttggaacccgccaaaaacatgagtaagtagccatttttcaaagaaaaatgagcgaattacgaatgtttttgaagattgcgggagcatatagtgcggagcaatctggtatcagaggggtcaaaatgccttttgaccccaacatctttatgatattaggatcaaaaggttcgaaacatgcgtaagcagccttttcccagacaatcagaagaaaagagggattttgttttgaaaatcgcgattgtagatggtttgtccagtgtatgggtgcaatacctcgcgctcccttgctttggcgttttatttaagctgatagtagacgccgagatcggaatgattttatttctatatttatttatcatcgattatctgttggtcgtgcgtgccgccgctttctgcatctgtcaggcgctcttcggctacaactttttctcctgtcagaccgggtgttccagctctgaaaacacgccgcctttcatccgtctctccgcggtgcagacgggtacctccaccctgtccatcaccacggacaacaccagcgcattcagccctacctggatgaatgaaaaactggtatcgaccaaacctgctggaagcggcatcggaaccgaatcgatccgcatgatcgccgaacagtaccacggcgatgcgcggtttgaatggcgggacggcgtattttatgcttcggtattgctgaatccgtaatgacacaaaaaggggatatccagttttttctgctatctccctacataaccggttcctgcagcacggttccctccgggaatgcggtacggaacacgcggcgcaccagcggacctgctacaatgagctggaacggaagcgccatgatgatgttcttcggaatattggtcagccagatgatgagcaactggctccatgcgccggatttcacgcaggcttccagaccgccatataaggacataacaaataccatcggaacgaccatgcagcaggagatcgtgattactttacgaagtgtgctgctctccggtgatacaaagtaacggaacgcaattcccttcgccggaccggacacgatgaaccagtcaaacagaaacgcatacacgaatgcaaacgggaatccgatccatccttcgcggatcgtttccaaggataaatgtcccatatgaagggttacattgtacatactcatccagagtaccatcgtgaaacacatgataacggaatagataaaactttctctcttatttcttggcattttccttctcctcctataaaataattgcttctatccagatgcaacggcaaatcagtccgacacacccacgcacaagatgctgtccgtgataaatttcacaaaataaaaggcagcagaaatcggaaactcgtttcgatctctactgctgtatgcaatctcactgcgttttttcaaactatattcgatttgggttacggttcgctattataacgtcttttttccattcgtgtaagcactttttttattttttcacaatttcatcatattgaacgatcaatttttttattttttattccgcttatgcaacttgacaagagctgctttttcagctcccctttcattttttccgaatttttccctaaaaacaggcaaatagatattgacaatactgcctttattcgatagaatgtaatagtatgtttacattgaactgtccgtgtccaggctttaatgcaaaccaaatacaaaatgaattacgaatcaaaataaaagaatttatgatggaggtacactacattggctaacattaaatccgcaaaaaaaagaatcttagttgcagagacaagagctgcaagaaacaaggctatcagatccaaagttaaaactgctgttaagaaagtagaagctgctgttgctgcaaaagataaggctgctgcacaggctgcattattagctgctaccagcgagatcgacaaggctacttccaagggcgtataccacaagaatacagcttcccgcaaagtatcccgtctttccaaggctgtaaatactctggcttaattatccagagcggatctttcgaattatatattaaaaattaacccaaattaaaaaaccattattctgtgggtgtgacagaataatggttttttgttgcttcttttccagccgggtccggccgaagaaccgctgattctgatgctggcactgccctttagaatcagcgcacggaacttctgggctgactgatcagcagctccaccgccagccggtcgcccatccgcccggtcttgactgcctcctcggcatccacgcaggtctgcacataggaaatgagctgttctttcgtaaatgccgccgcctggctgctgagttttccggctacgaacggaggtactttcaatttcgaggcaaccgtcccccggtctgcgccggacgcctgcaattctcgcaccagcaaaagctggttaaactgtctggcaatcaggaacaggatccgcatcggcggctccctgagtgtcagcaggtcttcgtacagatccatcgcccgcttcgtctttcccgccgtgatcgccgctaccatgtcgaagatcttgttcgtgatctgcacggtcgtgatgactttcacatcctctgccgtcactacctcactgcccatcgtgtaggaaatgagtttttccagctccatccggatgttttccatatcatcgccgacgcgctccaaaaagagattcatcgtggagggcgtgatcttccgcccattctgcgccaggatcgtcgccgcccatctggcgagctgcgcgctgtcctgccgcttcatctccgcaatgtgacccagatccttgacctttttgtagagtttgtttcgcttatcgaccgcctcctccacaaatacgatgcaggtcgtgtccggcatcatcggcagatactccgccagcgcctccgaagaagtcttgaaaaatccgctgtcctcgatcagaatcagacgccgctcgctgaaaaatggcatcgtgtccgccagactgatcagctcgttcacatccagcccttttccctcgaaataattgtagttcatcgtatcatcgcccgagatcgccgcccgcagcttctttttataactctgcttcaaaaacgcctcttcgccgtatagcagataaaccggcttaaatgtgccatttttgatgtcttcattgatcgtctgcattaactccgtccccgcctcctggttctattcgataaaaacagatccattttttcgaatgactgtccatccggttactttcctgtctattttttcacttcctactattataaacatttttctaaaatgttgtctactgtaaacccataaaaagaataaaacagcagctccttttgttacttgaaatttttccttggttcactttctgtcaaaacctacattaccatccccagcaaaagatagaccgcatacgctacgatccacgcaatcacgcactgcgccatcacgacaaagcaagcccattttccgcccagttcgcgtctgaccgatgagatcgctgccacgcacggcgtatagagcaggcagaaaaccagcagactgaccgctgaaagaggggtcagaatgtcacgcaggctctgagtcgtcccgaacagaaccgacagcgttgatacaacactctcttttgccataaatccggtcagaagtgccgtgcagacacgccagtcgcctaatcccatcggcgcaaacagtggtgcaatcacaccagaaataaccgccagaagactctgctgggaattggacacaacattcaggtgcagatcaaatgtctgaaggaaccagattaaaatcgtcgccacaaaaataaccgtgaatgctttctgcaggaaatcccttgccttttcccagagaagctgggcgacattgcgcgcccccggcatccggtagttcggaagctccatgacgaacggaacggcttcacccttaaataaagttgttttaagaagcattgccatcaaaattcccatcaggattcccaacagataaagtgcaatcataacaatcgccccatgatgcgggaaaaatacagcggtaaaaaacgcataaatcgaaatcttggcggaacagctcataaacggagtcaacaggatcgtcatttttcgatctcgctccgaagaaagcgtccggcttgccatgactcctggtaccgtgcagccaaagccaatcagcatcggcacgatgctccgtccggaaaggccgatctttcgaagcagtttatccatcacaaacgccacacgtgccatataaccgctgtcctctaaaagtgacaggaagaaaaacagcgtcacaatgatcggcagaaagctcaaaacacttcccacgccattgcacacaccatcgatcagcagggaatggagcaccggattgataccggtcgctgtcagcgctgcgtctgcccgctctgtcagccattcaatcaccagttccagaccatctgaaaggaccgcgccaatcacattaaatgtcagccagaataccagacccatgattgcaataaatgccggaatcgccgtgtaggttccggtaagaagacggtcaatcttcacacttcgctggtgttcccggctttccctcggtttgacgactgtctgcctgcagactttttcgataaaaccaaaccgcatatccgcaatcgcagctgcccgatccagcccgcgttccttctccatctggcagataatatgttccagcgtctctttttcattcgtgtccagattcagacgcgcctcaatctcctcatcgccttctgccagctttgatgcagcaaagcgcaccggaatacccgcattctgcgcgtgatcttcgatcagatgcataatgccatgcaggcagcggtgcaccgcaccaccgtgataatccgcatcacagaaatcctgccgtcccggtttctcctgaaaatgcgttacatgaagcgcatgatcgatcagctctccgattccttcattctttgccgctgagatcgggataaccggaattcccagttcttcctccagttcgttgacacggacagaaccgccgttctggcgcacctcgtccatcatattaagcgccagaaccatcggaatatccagttccagaagctgcatggtcagatacaggttgcgctcaatgtttgtcgcatccacgatattgatgattcccttcgggtgctcctgcaaaataaactggcgcgtcaccagctcctcattcgaatatggcgataaggaatagattcctggcaggtcggtcactttcgtattttcatgtccgcggatcgtgccatccttccggtccaccgtcacacccgggaaattccccacatgctgattggatccggtcagctggttaaaaagcgtcgttttgccacagttctgattacctgccagggcaaacgtcaggacgatgccatccggcaatgggtgttcctccgcctttgtatggtattttccaccttctccgagtccagggtgatcgatcgcgcgcgccatcggaatcccatgttcctttttgtccgctgcttcggttcctgcctcgcgtacattctcaatctctatcttctctgcatccgccaggcgcaacgtcagttcatagctatgaatccgcacctcaaccggatcgcccatcggcgcatattttaccatcgtaaccgatgcagtcggaatcaatcccatatccagaaaatgatgccgcagtgcaccttctccgccaactgcccgaacggttgcagtttttcctattggtaaatcctttaatgtcattctctgcctccatctctcttcattagtcaaactcattgtatgtcatcaggcttctacatccgcctgattttgaagcaaagcatagagagaaaaatactattgaaactttttctcaattatgtttccagataagtctattgtactttagggaatttgtcaatcgttggaatctttaagaatctaccaatcagaaaaaaatagaaaagataaaagaaaaacagcaaggatgaatcatcctcactgtctcaaaatagctgggctacaaggattcgaaccttgaaaatgacggagtcagagtccgttgccttaccatttggcgatagcccaatcttttatttcatagctgtctcagccacatttattattatatcataaatttttgtttcgtcaagtatttttttcaaacacttatgtttttttgaacaattataattatttaccagttcgaaacattttacagtctcgtaatgccccggatatttttccgtcacgaggcttcctgcaaataattctaatggttcttaaaattcctgctgcccgaatccaacttctgataactccagacatatcatggttcaggcaacaggaatcatatatcctcatacactccgctttaattagctgactccgcatctgtcttcgtttctttttccgtctgctttgtctccatctgactgtactctgtctccgagtgcgtgctctcttttactgcttctgtcagtgtctccggcgcacgggatgtctcggacggctttgtctccactgtctcatcatccgcatcgtcgtcatcctcatcaatcagatcgtccgcaatatccggcgtctcgaaatagccttttaccgtaccaaaggaaccgccgtcccgcactgccactccgccgagcgtaaacgtgcactccgtattggctggaagccctttgacgtgaatctcacaggaggttccgcctgtgtccgtgattctcgccgaatagctctgaccgtccggatctaccaccgacacggtcggatttttccatttaaccttttccttaaaaacgatgttcagcgaaccgctctcgtaatctacatagtcaatcttcgctttcttgcctcccgaatcgacttcttcctcgtcctcatctgctgcggcggttgtctccaccgggcgtactgcagtcgatggctgttctgccggcgtcggttcattttccggctgaccggtgctttccacggtcgtctccgctaaggtttcttcctcggtctgcggcaatgtcacctcacgaaccagagccgcatccgtctcaatggtgctgtccgtcttcgaataacctaccgtataagcacgatccgcgatctcccgcgcaatctcttccatcgtcataccggcaaattttttcatatcattttcggtcaggtcgttatcccgaatcagctctcgcagaaaatacgcttttccataagaaatattgtatttctccgccagatcctgaatctccccggttaccttcatccgctggtcatagacaaccgcctgtaccgcgtgttcctgcagggaagactctacatcccctacgacatcctgacgcaaagatgatgcctttttctcattctcattggacacggtaaccagaatcgcattgtccagttcatccagataaccgttccggaccatcgaaccgatcaatgcgttgaccgcaatatcaaggtctacatttttcaaattcatatcatccaggatcgtctccgcatcctcattaagcggattcgcctgcaatactttctcgttccggttgacggaaagctcaatactcggattgacatcgatgccaatcaccgaatcgacacggtgattctggtaaaatgaaacaccgcctcctaacacagccacacacagacaggctgctgctgccatcgccacggtccgcatccggcggtacatccgtacacgtctggatggttttacatagatctcctgtggcgtcgagagatcgattttatcaaatacgttgggagtcagggcgtccatcgccgaccgcagatgtgactcaatctcatcctgttcccacgctgtttcagagtgatcggtcaatgtactccctcctctctcaggtgttttttcagttttttcatagcacggttgtacttggaaagcaccgttgccagcggcatctccaaatctgccgcgatctcacgatgttttaaccccgctgatgtccgcagaagtacaatctgccgttcttcttcatttaatattttgagtgctgcgtgtaataccatcttatccgcagcatcctctatctggggacagaattcccctgtctccatctcagaaagatccgaaagcccgatatccgcttcatgcttctggtcacggaaacgcatatagcaaagatttctagcgatcgtaaacatccacgccagcggtttgccctgcgactgatagcttccagcagaagtccagacctttaaataaagctcctgcatgacctcctcagagtcctgcggattccgcaaaatcgacagaataaaaccgtatatagttttatccgtattctgataaagctgctgaaacgccgccttatctccctctgccactcgcaaaagcagcttttcatcgctcatcttatcataggcgaccgtctcttccatggtcgttaaaagccccatcaaaaacatggacgaaatttcctttctatataacttaatgcagataaaccagttcttattgcatttgttatgaattttttctgattcctgtccagctcctcgcagcagctggcaaaaatcaatgcagctttattcatactcgacccgttccagaaaaagcccctccggcggcgccgtaaagcccgccaacgctcggtcacaggaaaaaagcgtctccgccaccgattccggtgtccgcttatgaagtcctacctctatcagtgttccggtcaggattcttaccatattatataggaagccattgccacgaaaatgtagttcgcacacactttcccgcatggcaatctcgatggcagtgagattccgcaccgtcgattttttcatccgtttcaacgagcagaatgctttaaaatcgtgctcacctgtcagatacgcagccgcccgcctcatggccgctatgtccagaggttcccccagaccgtacacatatcggcgctcaaatacatttttcttcgctgccgtctcaatccggtagcagtaggtcttggaaacggcatttagacggctgtgaaaacgcattcctgcctcctgcgccgataagacagcgatatcatctggaagatagcagttcatatacgcctttatctcctctacactcatttcatcacaggatgacggcagatgaaaatttgccgtctgcccccaggcatggacacctgcatcggtccgcccggaaccgtgtacttcaaccggctgacctgccattttttcaagaatctgttctagttttccctgaattgtcttgtctgtatttccctgtttctgccacccgtcatagcggcttccgtcatactgcagggtgatttttatatttcgatccggcatattttttctccatgtgttatccattttcattcttttttattcgtaaatatatctgtcccgccgccagatacagcaacgttccggtcagcgctcctgccatatccagccacacatcgctgatctgaccagaacgcccctcggtaaacagctgaatcgtctcatccagaaatggaaccgcaaatatagcgatgcggtggatttccagccatacagacccgcacggtgccatcgcacgcattctcccagtcctatctttcccatcagccggatcctctgtccacatttcttccaaaatagctccgttcacacgcacacagagagcactctgccgcagcaaaatccccaatcctgtatactcaataaaatgagcacatttgcgcacaatatgctcggtcagccatggtacggctattccggtatctgctgccagcttctgcaaaagccggagaacccgtccgctctccgccgatgactgcactgccgggcgcatggaattggagtagataaataaaatgtataatattaagatcacatgccagatccatgccattcccagtgctttctgtttttcccggatattttttcctgtattcatctatcaatccctgtattcgcttgactcttctatgcgcttacgcctttactgctctgattttaagattccgctcgcgtcaatccgctgtaccgccagcgcgatcgcatcttcatcctgcaccagcgccatccgcacatgtccttctcccgatggaccaaacgcacttcccggtgtcaccagaactcctgttttttcaaataacgtttttacaaattccatcgaatcgctaaatccagccggaatcggtgcccagacaaacatcgttccctccggtttctccatcttccatccgatcgatgcaagaccatcacacagacagtcacgccgtctctcataagcagctctggtcgaagccacacagctctggtcaccggtaatcgccgcgatcgctgccttctggatcggcaggaacataccgtaatccatattggatttcaacgttttcagatgactgacaacttccttatttcccacgcagaagccgacacgtgcccccgccagtccataggtctttgacagggaattaaattccactccgacttctctcgctcctgggaaacgcagaaagcttccgcaggttcttccatcaaataccagttcactgtaggcgttgtcatgcagcacgataatatcatatttctttgcaaatgcgatcaattcttcatagaaactgtccggtgccagcactgccgtcggattgttcgggtaggagacaatcataaatttcgctctctgtgccacttcctccggaatttctttcaaatcaatgatgtagtgattttcttcccgctgcggcatatagtaaagctctgcccccgccagcgacggaccatccgcaaagaccggatagcacggatccggcaccagaaccacatcgccctcgtccacgatcgaaagtgcgatgtgcgccagtccctcctgggaaccaagcagagagcagatctccgtctccggatccagtttcaccccatagcggcgctcataccagtcagacactgcctgcaagagcgcctgctgatcctgaattgcatacaggtaattctccggcaccaggcaggcatcgctgagcgcttttaaaatatgaggtgctggtgcaatattcggcgcgccgatactcagatctacgatcgtctctccctcttccagctttttcttcttcatctgtgccagcatggagaatacgccctcgccaaaccggtccattctatttgcaaatttcatcttgtgttgtcctttcttgaaagaaatctccgattttctttccttttctatttctatttttatctctatgaatcctctttaaaactctaataattcccatccgcccgatcactctgtcaaatgacttattcaaccagttccaccaaatcacatcgaactgccctcgctgaatcttatcaatccagctttgcatcatcaggctatataagtattaattatagtacatggatatgggaaagtaaagggaggataacagctctcgacagctattataacttttcaaaaatgttgtaaaaacaacggacttttctgtgccggacgattatacttatcatgtacttaagaaaacaaaaaaatcaaaatagatgttctgacatatctcatcctttcatgtatgaagatcggtcagatgcacatgaataagaaagacgaggaatttatatggtacgaagaattgtagaaattgatcagaaaaaatgcaacggctgcggtctctgcgcttccgcctgtcatgagggcgcgatcggcatggtggacggtaaagcaacccttttaaaagatgattactgtgacggcctgggcgactgtctgccagcctgtccgactggcgcgatctcctttgtcgagcgcgaggcggcggcttacgatgaggcggcagtccaggtccacatggcagcacgcaaagcaaagcaggtattagagtcaaacgcagcggcaaacacatccgcacgttccgaagcaaaaccggcgacaccggcatttggcggatgtcctggatccatgagccgtttcctgaaacgtcctgacacagctgcttcccatgcatcctcagcagccacatccacaggcggtcctggcagcgctgcttgtgaccattcagaaaacaccccaataagcgctctgtccaactggccggttcagatcaaattagccccgatccgcgccccgtatttcgacggtgccaaacttttggtcgctgccgactgtaccgcttacgcatacagccgcttccatcaggactttattcatggtaaaataactttgatcggatgtccaaagcttgacagcatcgactactccgaaaagctgaccgaaatcatccgcagcaacgacatcaagagcgtgaccgttgtccgcatggaggttccatgctgcggaggcattgaacaggcagttaaaaatgccttgcaggcaagcggaaaattcattccatggcaggtaacaaccatttcgatcgatgggcggattttagattaatatctgccattcccccgattgacctacccaaccatttcgtgcaagttccgctctccatacacacctgccgaatggactcaatcagactcaaaagaatacgaaaatttatatatctaaacgagattttattaaggaggttcattatggaatacccatacatcaaaaacattactcacgaaaaagtgcagtctttagccggcctggtaaacgcagaagacggtcagatcgtcagcaagactctggcacagaacgaagctgtcagcgttactctgtttgcatttgcaaaaggcgaagaaatctccacccatgattccaccggagatgcgatggtgaccgttctggaaggcaccggccgcttcacggtcgatggcgtcgagcacctggttcacgcaggcgaagttctcgtcatgccggcgaaaaagccgcacgccgtttatgcaccggaagcatttaaatggatgttgacggttgttttcccatttaaataaagactgcgctcaaactctttttaccatgcagcccgactgatagcagcccttatccatttattccaaaacaggcataccgcaggaatccatgcatgattttcatccttttctctgcgatatgcctgtttttcattttataagcacatggttgtgttcatttttccagttaatctcccttcaacagatatgaacagcagcttccagctttcattattccacatactcatgcgtctccacccactgcagcagcttttcaatcgccggattcgggttgctctgacgccatgcgatctcaaaatcaagttcttccgggctgccgtccgcgcggagaagcggaaccaccaccagattccgcgcattccgataatggcggacggcatattccgggagaatcgccacgccaaatcccgctgacacctccagaagcaccgtctgtacctcccgttcacgcgccacgatattcggtataaaaccgcccttattgtaacaaatcaatacttcttccgcctcatcgttggaacgcccctgcggctgcatgatgataaagtcttcccgcgccagatcacggtacatcagatggctctctcccgccagcgtatgccccggataaagaaccgccatcatcggaaaccgtttgaggaaccgatgctttaaatcctcgtaattctgcgtgtacagagacagattaaacgcaagatcgcaggttccattatctaacagctcatagagcgcgctcatattttcccgcagcagatgaatcgaaatattcgggtacgcctcatgaaaacttctgagcgtctccgaaaaacggctctgctcatatccccggataaatccgatcgtcagctccccagctacgccttccgctgccgtccgcgcgagcttcgccgcctcctcggcgcggaccagaatcgcccgcgcctcgttcagatatacctttcctgccgccgtcagctcgacatggtgcttgtcccgcacaaaaagcggcaccccgatcttctcctccaacgactgaatctgcagcgtcatcgctgtctgcgaaataaaacattttttcgccgcccgcgtaaaattcagctgctccgccgccgccacaaaatattccatttgttttaaattcatctcatttccccatttctatatcctatatgtaatcgcgtcttttcgatcgagcagaaaaatgaatcacgccgtccaatttacgggctttcgatctggcttttcctgttttgttataagtttcccttattataatatctgttctttctattggcaagtttttcattcatcctttataatttttaatagtcaacaaaagaaagtgagtgaaaggtatgaaacaattcaaaaatttctacgaaggcacatacgccaagtacattctgccgggcgtcctgctgcaatcggttctgattggcggcggctatgcaaccggacgtgagatttattcttacggtgcaaaattcggagcgatgggctggatctccggactgacgatcggcatcggttttgccctgtttgccttcctgacctttgagatctgccggatctacaaggtttacgattataaaaactatatcaagcaggtcattggaccgctctggccgatgatggatattttaactgtcctcatcgcgattctgctgattgccgttatggcagccgcaactggaagtattttcgagcaggtcggacttccgaatattctcggctccgttgtgatcgttctgatctgcggactcctgaactttaagggttccaaggtgatcgagaaatttgaatcgatcggtactattttactgtatggcggctatattctgtttacaattctggtactcgtcaacaagggcagcaacatttcccatgtattcagcacgatggacaccagcacctacgacggctctgtcactgttccgctgtgcatttacaccggtatcctgtatgttgcctacaacatcaattccatcccgatgggcatgttctccctgacacgccagaccaaacggaaagaaacctttatttccggtctgatcgccggtcttctgatggttattccgtggtttttgtcttactttgcgatgatgtgcttctacggtgacacctccatcgtcggcgcggatgtcacaaccccgtggatggaaatgatcaaggcagtcaacggcggaccggcactgatggcactgttcagtctcgttatgggctggacgctggttgagacggcaactggctgcatccacatgatcatcgaccgtttcgacgttgccatggaggaaaagggcgctgccaagctgtccgatacaaaccgcggtctgattacggtcatcacgctgatcgctgcactcgtattatcccgcgtcggcgttgtcaccttgatcgagcagggctattcgtacctgtcttacggatttatcctcttctacctgctgccgacgctgctggtaggcggatataagattattaaacataaagacaaataaatatgtaatgataagaacacatccgcctgtggtagatatcatcttataggcggatgtggtataatgtaaacacttgacgaggtattttcgaatcaacatagaaaggaagtatatgcaatgaaatatgtcggatattacaatggagaaatcggccccctcgaggaaatgaaaatcccgatattggaccgcgccgtttattttggagatggctgctacgatgccaccacctttgcaaacaacaacatttttgccgcagacgaccacctcgaccgtttctacaacagctgcaagctgctggaaatcccgtttgaaatgtcgcgcgaagaactgcgtgccgagctgcagaaatgcatcgatgccaatgagattgaccacggtatgctgtactggcagtgttcccgcggaactacctatcgtggacatcagtttccacctgctaccgtaaaaccaaatctgatgatttttactgttccgtgcgacctgattccatttgataagactttccgcctgatctcgatggaggacacccgtttcctgcactgcaacatcaagacgctgaacctgattccaagtgtcatcgcttaccagcgctgcatcgaacagggctgccaggaaacggtcttccaccgcggcgaacgcgtcaccgaatgcgcccacagcaatatcttaatcatcaaggacggcgttctctgcaccccaccgagagataatctgattcttccgggcatcacgttaaaacacctgctgatgttagctgagaaaaacggcatcccgaccagcgaggcaccatttaccatgcaggaactggcagacgccgacgaaatcatcgtcagcagctccggcgggctctgcatccaggccgttgaactcgatggaaaaccaatcggaggaaaagatccgaagacgctgaagactttgcaggatgcttatgcggagttttatgcggaagatacgaaggtacggtaaaaatccataaatttgccaagggctgtcactcaaaacgtggcagctctttttcgcttgcgacatgtttctgcttcgcgcaagtgcgcatcctcgcggagcattttttgtttcataggacgcaatttcctatgaaataaaataagggatccttgtatttacaaggatccccaggacgcggagacggagggattcgaaccctcgtgccgggatgaaccgacaaacgcatttcgagtgcgccgcgttacggccgcttcgctacgtctccagatattaggtgtttctcttcgaaacacctatactattatacatgatagtttgacttttgtcatctgtttttttcagcatttactgataatacgcatcaattccgttcgcaattcccccggcaatcaattcctgataatcatcctgcgccatcttctggtcttcttccgggttgctcataaagcccatctcgacaatggaaaccggtatcttacaccagttgatgccgctcatgctgtctgtctcctgcacaccgcggttcttgaagccggttgccgcgcagacagagtccgtgatcttcttggaaagagaatagcttgccgcgtgaagcccgccgttgtacgggttggtcgccgtctggcacatggagagtgttccgttgactgtcgtgttatccagcgaattgccatgaatccggacaaaaatggaggcgccgctcttgttggcgatctccgctctctccgcattgcttaagttgacatcgttggactcccggatcatgacgacctgatagcctctctcttccagaatccgttttaacttcttcgaaactgataaagtcagctcatattccggcagcttcgtcgatacaccttcggtgccggaagccaccttcgccttcatggtcgaggagcccggtccaactggttctttgtccggattgccctttgcctgatgtcccgcgtcgatcgctacgatacgtccgttggacaccggtgcaccctgtgcatccgcttctgccccctgcgctgtgaccgtcgcttcctcactgcccggctcggtcgtcgtcaggtattcggaacggataaaacagctcttgtccttataaagcacctcgctccagccgtctccgataccgacgcgctgcacgctgtcgccctgattcagctgtgtcacaatctcatactccgttccacagcccgaacgcacgttgagcaggttctcagtcgcatacactgtctcatcgacactccggaagccgctcgccgtcgttttgtcactctccagctcgctctggtccgcaaccgccgctgcatccgcctcctgaatgccctgtgcatcttccagctccagacttcgctttgccgcattcggcacctgtttcttcgctgtctgttccgccggttctgtctcagcagccgccatctgcacctgcttctgtgcctgattcggaagggtaaatccagcatggcttacgccaatggaacccgccgtgaccacaatcgcggtcaccgccgcccagaaacgtttccggtaatccggtgtgcctggctttctttttctgctttctcctcttgccatttataaaaaactccaatcttacagaagattctaacctctccatgatccgcgcattcactgtttccaatcaatcgcatcgcagcacaactttgatgccgacagagatttctgcccaattaaaatcttctttcatttctaaattattcgatcgtaccgccgcctacgacatattcgccgtcataaaaaacgactgcctgtcccggcgtcgccgctctctgcggctcatcaaatacgcattccacccgatcttcgccaatcttgcggatcgtacagagcgcccctttgtggctgtaacgaatcttcgcactgacgcgcatctcctgatcgcccagatcctcaatcgccatccagttgagattccggcaggtcaggcggttagaaaagacatcctcattttccccgatcacaacctcgttcgtctccggacgtatctccgtcacgaacaccggatgaccgagtgccagatttaagccctttctctgtcccaccgtataatgggtaattcctttatgacgacctaaaatattgccgtacttatctacaaaattgccttcgtcaatccggcaatcactattttcctcgataaattttgcataatcgttgtccggcacgaaacagatctcctggctgtccggcttgtgtgccaccggaagtccaatctcctccgccatctcacgaatcttgtctttcgtatattcgccgaccggcatcaaagtgtgtgcaagctgatgctgggtcaggttataaagcgcgtaggtctgatctttcgccgccgtcgcagacttgcagatcgcatagcggccattcggcaactttctcacgcgcgcataatgtcccgttgcaatataatcagccccaatttccagacttctctgcaaaagggactcccattttacatatcggttacaggcaatacatggattcggcgtgtgtccgtccagatattcctgtacaaagtaatccatgacattttctttgaactcttttttgaagttcatcacgtaatacgggatctcaagccgttccgcaacccgtctggcatcatcgacagcgctcagaccacagcagccgccgtgctcttcctgctctacattcgtctcatcctgccagatctgcattgtgacgccgatcacatcgtatccttgttcttttaaaagccaggcagccacggaggagtcaactcctcctgacatgccgactactacttttttctttttcatcaatactcttcttcgacgtcttcctcgccgatatccgtcttcggttttacgagtcctttgatctcaatgccattcttctgagcataatcccagagagcagcgtgaattgcctcctctgcgagcagcgaacagtgtaccttaactggcggaagtccgtccagtgcctccataacggctttgttggtaacttccatcgcttcctggatggtttttccttttaccatctcggtcgccatgctgctggtcgcaacggctgcaccgcagccaaatgttttaaattttacatcctggatgatctggttgtcatcgatatccaggtaaatacgcataatatcgccgcattttgcgttgccgacggtacccataccgctggcattttcaatctcgcctacatttctcggatgctggaaatgatccattactttctctgaatacatcgggtgtttcctctctatatcttcattcactgtgtacgtgtacagtaacggaatttgccgtgctttcgcctttaaatacggcaaatttctgctgccaccacgttatcctacggcactttcagttgcaaaagtacctatctgtagatgttcattttgcttaaaatgtctaaatcttactgctgcggatgtttcttaatgtaatcctcatacagcggagacatagaacgaagacgttctacaatcttctttaagcagtctaccgtgaaatcaatctgctccatggttgtctcggctgacagggtcagacgcagggaaccgtgtgcaatctcatgcggcagtccgatcgccagaagtacatgggacggatccagggatccggaggtacatgcagaaccgctggaaccacagatgccttccatgtcaagcatgatcagcatggattcaccctcgatgaactggaatgcaaagtttgcattgttggaaagtctctgggacggatgtccgttgaggcgtgcaaatggaatttcttttaatacacgctcgatcaggtggtcacgcatcgctttttcttttgctgtgcgctcttccatcgtcgccatcgcaatctcaactgccttgccgaatcctacgataccagccgtattctcggtaccgccgcggcgtttacgctcctgcgcgccgccgtggatgaaggaacgagtctttaatccggtacggatataaaggaagccggttcccttcggtccatttaacttgtgggcgctggaactgagcatatcgatatgacactcatctacattgatcggaacatgacaaaatgcctgtaccgcatcggtgtggaataaaatgccgtgtttcttcgcaatctcaccaatttccttgatcggctcaatcgtaccgatctcattgtttgcaaacataacagagatgaggatggtgtccggacggatcgccttctccagctcgtctaatttaacaacaccgaactcatctacatccagataagtaacctcaaagcctctctgctccaggtactcacaggtgtgcagaatcgcatggtgctcaatcttggtcgtgataatgtgcttgccctttgcctgatatgcctctgctgtggaaatcagcgcccagttatcagactccgtgccgccgtaggtaaagtaaatctcgttggactttgcgcccagcgctttcgcgatcgtctcgcgggcctgtgcaatcgctctcttcggctctgccgaaaattcataaacggaagacgggttgccgtaatactccgtaaaatacgggagcattgcctccactacttccggacgcgttttggttgtcgccgcattgtccagataaatcaactgtttcataactaataaatccgcctttcttcttagtgtatgcacgcctgcctttattgtgattgtatcacatggaatctcacggcaagaactccctgcctgtaaacatttgctgcgtacatagtttgtagcaataaaggtaaaagcttcatctacgttctttattattatataggaaaattgaaaaaatacaagcaagaatgagcgggtttttgaaaaaacctagttaaaaatggggtatataatgtgctcaagctattccaccttacttatccagacaataaaaaaccgtccagctaggaggggtcaactcctgactaaacggttttttattaaatctttgctccacttctgccttgaaatccgttacccaatcggcagcaattccgtggaaacgcatgttatcctccaagagggaatcttcggataactgctgtagtgctgtcattggcttctgaccgcacatggagggttgatgcaatagggtttacataaataaaaagaaataaactggtaacggatacctgtcaatacttatacataaaagggattggtatagaatcaggttggttcttcacttgacatatcgctattgtaatatt

SEQ ID NO: 11052 - DNA, 27285 bp, Unknown
  gut microbiota DNA sequence
gatacttctaagtgaaaactcttgttttttcctgatggctataatataacacgcatcaacttgaaataccatccccggaacgagaatataaatattgtttttttacaataatataagcatttaaaaatagtcctataaagcaaaggctaattaagccaaatggaggcggaaaaatgtatattaaaaacccggagtattttattaccaccgtccgtgagggaagcatttccaaagcggctgaaaaattatatctgtcacagccatatttaagccagtgtatcgcacgaaccgaaaaggaattaggcgtcaagctcttcgatcgcagccatatgccgctcaaactaactgaggcaggaaaaatctatatgcgttatctggaaagtgtcggagtcctgaccgggcagtttgaggaacagctcggcgagctgaaaacgggacgcagccgtactctgaatgtcggcatgacgctgtggcgcggatccgtcctgctgccggatatcctgccaagctactctgaaagccacccggatgtccgcatcaccttacgtgaacaccacactgcccagctttccaagctgttacaggaggatcagatcgattttgccctgatgaatatgccgctcaatctggatgatttcgtctatgacaccatcttcaatgagcgcctccttctggtagccagcaaggaccatccggctatccgcggtctggaagcaggcactccggaccatccgcttccaatcgacatgaaaaagctgcgccgggaacgcttcatcctgctgcaggaggatcaggtcatgggacacgccatgaaaaacctctttgccaagatgaatatggaaccaaaggatgccctatacaccaccagcagtacgacttcggtcaacctggcggcaagagggttcggcatcaccttcctcccggaaggcggaatccgccacactgcccacgtggagcagcttgcattcttcaccgtagacaatccaccgttcagcgtgccgctgctgcttttatataagaagaacagcattatttcaccacacgcgaaggattttatcgatatggtgaaggagtattaccggaatctggaggaaaagaagattaaggcataagaatttgctctttctctgtgcattctgtttctacatatattttagaatttttgcacaaaacgtacaaaatgggacttcagcccctaatagacacaggcagcctagacgatatccgtcgaagctgcctgtgttttatttcatatttttctatcatttcttggtcgaatttatttaacatttgaagaatttttattctactattcttccttatccagattccgaccattcactcggtctttcaattcgtaaagcaaattttttaagtaacttttacttacgaatcttctccacaaattccttcagtctcttgcatccctcaacaacattctcatagctgtttgcaaaggacatacggatatagtggtcgccttcgcttccgaatacatcgcccggtaccattgctaccttggcattttcaagaagcagcggagcaaattcctgtccactcatgccgagtttttcgatgttgatgaagatgtagaacgcacccttcgggcagcggcagctcagtccgtcgatctcgttgattgctttaactgcatagtcgcggcgtctctgatactcttttaccatgtctgctacttcgttcttctcttctttcagcgctacgacgccggctttctgtacgaaggaacttgcacaggtaaccacgtgctgatgcagcttattgacagtcttgacaatctcttcgctgcaggctgcgtagccgagacgccagccggtcatggagtatgctttggagaagccgtttaatgtgatggttctctccttcatgcccggaagagaggcgatgctgatgtgttttgcatcatcgtataacagtctctcatatacctcatctgatataatcatgatatcgttcttcacagcaatctctgccagttctttcagcacatcctctgccagcacaccgccggtcggattgctcggagtgataagaacgagtgccttggtccgtggggtaacctttgcacgaatctcatccagatcaatctggtaatcattctcctctttcaatgtataggtaatcggaaccgcgcccagaagcttcggaacatttaagtagtttaaccagcccggattcggaaccagaacctcatcgccctcgtcgagaattgctgccatgacatcaaaaactgcctcggaaagacctacactgacgatgatctcagtcggtttgtactctacattgttctgcgtctttaatttccaggcaatcgcctcccgcagctccatggtaccaaagttggaagtatagaatacatcgccttttttgatatcctcgatgcaggcattcttgatgtattccggtgtatcgaaatccggacgccctaactcaaagtgaatgaccgtctctcctgcgcgctccattgccagcgccttttcgtttactttacggattccagacggaaccagttcatccattctttttgcgaataatttatccataataaaatctccttttcattctgcatatactctcagattctcattggtccgcatctgctgacacttttccaagaatattttatttttcctggtagccggccggaattccgtttttctgttctccagcccttacgctgcctttgtctcggtttccgcaccagttcccagcgtatgcatcatgccctcgctgcgtgctaccaccatggtggttaccacatcaccggttacgttaaaggttgtatttgccatatcaatcagtcggaagataccggcaatcagacctacaatctccagcggaagtcccatgttcgtcagaagaatcgtggtcatgatgatcgcgcctcccggaacacccggacagcccatagctactaatacagtagaaataataatgtttaccaatgcggacggtgtcaggttcattccataaatctgtgccgtcattacgatagccgctgcatagtagatacatccaccattcatgttgatggttgcgccaagcggcagggagaacgatgataactcggaagatacgccaaactcatcattcgtaacagaggttgtgatcggaagagaaccgctgctgctggtggtgctggccgttacaacccatactttccagataccctgcagccatttctttaccgggaactttgccagaagcgctaccatcggaatatacatcagtaaaacaaggattacatcggaagcataaaccgtgagaatcagctttccgagcggtccaaagattttcagaccatatgcaccaactgaatctgctaacagtgcacatacaccaatcggagaaaactccataacaatggctgtgattttatacattgcattggcacagctctgtacacctgctaaaaggcgttccccctcttttcccatcatgataagtgctacgcctaagaataccgaaaatacgataatctgcagcatatttgtgttggtaaaagaagtgaaaatgttggatgggaacatatcgattaacgtatcaatgatactcggcatcgcctgcgcctcataatcagttgattgtgataacgcggttaaatcaaatccttttcctggattgatgatgtttgccatgataagccctaatcctacacagagtgcagatgtcagcgcatacagtccaaccaccttcacgccaatgttccgaagctttttcaagtctcctaagctcgcgactcccgctgtgatggaaaagaataccatcggaacgacaatcattttaatcatatttaaaaagatggttcccagaggttttacaatggttgctttttctccaaatacgagtccgatgacaataccaaggccaaaaccgatgaacgtctttgtcgccaagctcaatttctttttttctttcatgaatattccccttcttatgcaataccctcacttactgttcacacatatgtgaccaccatgttgtttcacagcactttctatttcaaaagtgcctgctttaaacaacctcctctatgctatattctctcccagatttcatttccccaaatgtcctccgggagagaggtatctgcagttccgggtaaatttcccaattcacctgcaaaacatgccttccgtgaactcttccggatgtcctgcattccggaaatgcatctttgccatgttttgcaattagtatgctcttgtcatcgcaccgtctaacaggatagtctgaccagatacgtatgtatttgcctcggagcacagccatgtagccagacgtccgtattcatcgatggtgccgtagcgtcccatcgggaacttcttcaggtcttccttctcgtaatctgctacgctgatgccagccttgtctgcacgcatcttgttcagattctcaattcttgcggtgccgatacgacctggtccaatgacattgactaagatattgtctttgccgacctcactcgccagggtcttgctcatgccgacaacgcccattctcatggtattggaaagaatcaggttgtccaggcagtccttaacggaagaagaagttgagtttacgatacggccgccgccgagacgtttcatggacgggagtaccgcacggatggttcttacgtaggagagcaggcacatctcaaaagcgccctcccatgccgcatcatcaaagcttacgaacggtcccggcttcggacccggacacatatttacgagtgcgtagatatcgcccagtgtttcaacggtgtgttttacaagtgcctcgatgtcctccgccttgttaacatcgcagaggaaggtctccggacggtttccggtttctttctcaatctcagcctgtgcttccagaagctgatctttaaacggttctgcggtacaaatcataacctttgcaccttctcttgccatctcggttgcaattcccttgccaagtccggctgctgatgccatacagagaactactttgtcttttaatcctaaatccatgttgctacctcctgcttaaaatgaatatataaaatgatttgaatgttctgtttgaattttttattttcctacacttccttttccggatgtttttttaagtcaacaaccgggtttacaagtggtgtcatctcgaatccgtccggtccggtgatgcggcactctgctacatcgccattctggatatggaacgctctcggtgttccggtggaaaggatgtctccggcgtaccagccctggatgctgctgtgcagggataccagacgcggcggtctgtgggtcatgtttgctactacgttttctgcatgaacttcaccgttgtgaacactctggaccagaagttcattgacatccggtacctcatccggggttacaagctccggaccgaaggagaagaaggtcgggaagttctttacgatggttaaatatctcgggttgccgcttacataatcatttccctttaagatggattcctcagtcatatcaaggatggtggtgtaaccgacgatggcatcctgccagttttcttcggatacatctctgcaatccttgcccatgatgattccaagctcagcctctgcggtggttttctgtgcttcttttaacttcggaagcaggatttcatcgcccggaccaatcagggtgtctgcctgcttgaagaagcttcccggaaatcccttcggagctgcagaaccgatgtctccggcatggtctgcatagttaaggccgataccgaagatacgtttcgggttgcggtagagcggtccgtatacaactttctcgctcggaaccagtcccggaatactttccagctcttccttgccgcctgcgttataccattttgtcagtcccggaatctgctgcttctggatgagactcatgacatcctcggcccatgcggttccctttgctgcattcagtgcctcaatcggaagcactccattctttaagacgataccggctttttctgttccgttcactttgatagttgcaaatctcatatggtttcctcctttatctgtcagagattgcttcttcagaagttctatttgtctgtttcttttcattttgtttcagcgtctgaaacccaacctcttgaagctctctgtttctttctgacattactttaccattcccaccaaaaatgttccaactctctttcgaatatggacgtataggtaaatggttatggaccataacgtgtctaaaatgatacttgaccttccctaataagcgaaaatacgcctggatacaggctttccttgtggttggaggaagtggaaatgcctgttccagacgtatgattttaaatatatataatcgttttattattgcttttataagttaatcattctagtagtatgtttgatgtccataggagaatccttatgcctgtccatgacactgagaatttgaacacttattttaatatgcagccttgaaaaacggcaccagtgcaatcgctttcgcacagtcatgggaatagccgccgcccaggctctgcatccaagtttctattttttcagctatgggatatactccagtattttatctggttaaaaatccgagttatttttaaatatggcactataagcaattttctatcagtattttgtgaaattttaaactattttttagccagtagaatgtatttgataaaatcatctactgttgcccccacgcccggatagcgcttcatcgacaaaaggattgcacgctttgccagcggatcgccaatcttgtaataacagagtttttccgttttctctgtgtatttcagcagtgcatccctaaaaaagatgataccggactgtccgctccgcgccacattataggcagtctgaagctgatcaaaatacataatcaccttcggctcgaaaccagcgtgggcgcagatatccatactccttttataagaatcctgattctttttcagcatcagaaatggttctttcgagactttggaaaggtccaccgcacgcaccgcttcatccagaaaactccgctccaggattgattccctggagatctgaaactctttcagcttctcattcacagcaaaggaagcaggaaccgccataatcatatactcataccccagcgtcacactctcaaacatctccgggtcgagtgcctcgacatccatcgtgatatcaaactgcccggttctaagccccgcatccatccctgaaatatccgtctccgtcacgttgatccggcactttggattcagtctgcaatagccccggatcacctccggaagaaaatacgcacagaaatatccggagcttccgatgttaatcacaccggaacggatacccgccagctctgcaaaatgctgctccatctcattgctgagctcgtatatcttccgcgttttttccagataatactgccccgccggggtcagtgccaccgggttcacattccggtcaaaaagcgagagcccatataactctttctcaatctttttaatcgcaccgctgagcgccggctgggaaatatagagtttctgggctgcttttgaaaaacttccttccttcgcaatttccatcacgtattcatactcacgcttactgaacatactcccatccctccattgtatctctatgtactctatcagctacccgcttttatccggttatatgttttagtctctctcccggaaaaaaagtaaaaatatttttatcgcaattataacgggttctttttatcacgtcaattctgtaatgtatactatttttacacaattttcagtctctaaacaacaatccgagcatttttcactcttgctttatgaggcgttctttcctataaaacaacgaaaaagacgctatgctgaagcctcattacttcgtacacagcgtctttttatccgaaattttatcgaacatctaagttccgattattcagcctgctcagactctttctttgcgttcaggtactcctggatgtttgccataacctcgtctgcgttcagaccatgtaccatgcaggcctcctccagagactcaccgatcgaagacggacagccaacacagtgcatgcctgcctccatcagaacatatgcaatacccatatcatactgaagcatctcgcccatcgtggttgcttttgtgatttccatgataaattttcctttctattcatacttgcagtctcttacgcagctttgcggttttcaccgccgctgcaaaaacaccgcgattattcttatgctttcttatattaacacgaatcgcgcggttttactatctttttttgtgaaacatagaaaatgttacgattcactggaaaaatttttctgagctgaaaattttgtacaatccggcagcagcattactcttctcttgcatcctcttcttatttctcttataattaccatgattgttctatgttttcctgtattgagaatacgatagtcactggctccgtttttctgcctgtgtcggaaaacattttgatttttatacattaaggagttttataaaatggatcccttttccatgttagaattactattatccgaaaaccagttcgaacttattctcccggaaaccggcacttctgctcccgacacgatccgcctagtttacctgatgaatgatgcagtcgaaagtttccttctcttccacaacgcccgcctgaccggtacctacgatccggcatacgagggcgaactcgatgccctcttaacccaggatgaaaacgaacgctatgccctgatcgtccatcagggagactcggttgtcacactctttttcgaagatctgactctcgaaaatcactactatgactacagtcagctcgggcacttctggatgaaaggctacgaatacctccgccagctcgaataccgcatcgccatcctgcgcgacaaactcgactatctgggggaaaactcctgcaacgcaaacgagcgggagcttgcctccctcgcggaatttcccccactgaacgtctgctgctacccggcggtcccggaaaaataccgcgtcatccgtgaaaatccctggcatctctccgaagacgcttcgcgcgtcttccaatccatcgccgtcgaagccagtgatccaaaactgctacatcgcctgaaagactatgagcagcaccccaccaagcgccgcgcccgtcagattgcccgcctcctgcaccggaacgcccatgccaagacagtcgatctcctgacccggaagcttcaaaaagcctcttccgcctacccgtcccgcaccttcggaaaagcccagcagacccgtcacctggctctcgaactttttgccaaaaaaagacagaaagagcttgaaaagcgcggcatccgctccgaactgctgcgtgaagaaccctttacgacagcgcaggattcgattgaatttaagatgcatttaatgatatgggagaaagggattttgaaccgtaaggcgcggattgagacttgggaagatcaataacataatctattgcaacagatcctgccggttgcagtactctgtatgcagcagcttatgtgacagctccccacacggttctcccagatacgtctcataaattttctggatcgccgggttcttgtgcgactgtctgaccggaagctctgcctctgcctcatagatggctttcttccgcttctccatgatcgaccatgtcttaggcggatttccaccgccgccgatgcagccgcccggacacgccatgatctcgataaactgataatcggcggttccgttctttaccttttccagcagaatcttggcattcttgatgccgtgtgccacggctaccttgatcactctgccgttcaaatcaacctgcgattccttgattccctcgaaaccgcggaccggtgtatagtctagatgttccatctctttgccggttaccaccgcataaacggtgcggagtgccgcctccatgacgccgccagtcgcaccgaaaataagtcccgcgccgcttccttcgccaaatggatcgtcaaacggcgtatccggaagctcagaaaaatcgattccaccggcacggatcagcgctgccagttcctgtaccgtgatggaaatatccacatcctgatagccgctgtccctcatttccggacgggtacactcaaatttctttgccgtacacggcataacggaaacactgcagatctcacccggatcgatgccctcgcgcttcgcaaaccaggtcttgatcagcgcaccgaacatctgctgcggggattttgccgtcgataaatgcttcgtgtactccggcgcgtaagtctcacaatatttaacccacgccggacagcaggaggtgatcatcggcagagttccgccattctgcaggcggtttaacagttccgttccctcctccaggatcgtcagatccgcggaaaaatcagaatcaaataccttgtaaaagcccaggcgcttaagtgccgacaccagacgtcccgtgctgacaacacccggctgctcacccagtgcctccgccagcgtaatgcggacggacggagccacctggataatcagttttttgcctaattctttctggcgatataacccgtaggtatgataatgcaccgtcaatgctccggtcggacacacctgcacgcactggccgcagttaatacaattggtatcagccagtttttccccataggccggggcgatcagcgtatggaatccacggttttccttcgaaaggacgttgattccctgaatctcattgcagacctccatacaacgcccgcacagaatacatttctgcggattccgcatgatggccggagaactccagtcctccttctgatggcggagctgcttgtcatagcggatatcgaggtgcattccgacatcctgcgctaccttctgcagatcgcattttccgtccttcggacatacgaggcattcctgcggatgtctcgcaaaaatcagttccagaatatttcttctcgctttcagtaccttcggggatgccgtctgcacgaccattccctccgaaacaggtgtactgcacgcggtcggtagaagtctctgtccttctacctcaaccacacagatacggcagaccgccttgatgctcaaatcctcatgatagcagagagtcggaatgtggatacaggctttcttcgccgcctggaggatcgtcgttccttcctccacctctaccggctgtccgtcgattgtcagatgtaccatcatgcttctcttccccctctccgtttaaactgtcccgcataggatgttccccggctgcggtgtcttgcatacgcgtcatacgaatcatatatgacatcacgttcaccgactgctgcatgctgtcttcctatccggctgtttccatcgtttctataatcttcttctgcttcataaatgccttccgccacagctgcctgtgtacagaccgggcagtaatcccgatcaatgtgcgccagatattcctttcggaagttctggatactcgtctgcaccggaactgcggtcgaatgtcccagaccacaaagtgcggtcagacgcatcgtctccgtcagctcatcgattttttccagatccggcagagtcgccagcccccggctgatgcgggtaaccagattgtacagctgctggccgccctcgcggcacggtgtacattttccgcatgactcgccgcggaagaagtccaaattgtttcgcacaatatctacaatacagttgctgtcgtcgatgaccagaatcgtaccgcagccaagacgtccgccggatgccgaaactgtatcaatatccagtgtcatatcgatctgatctgcattgatgatcgcaccggaggtaccaccggtctgcacgcccagaagcccttttccatccgcgataccgccgcacacctcataaatgatatctttgaggttcacgcccatcggaaattcaaatacgcccctgcggaccacatttccacagaccgtaaaaagtttcgtgccagggctgtttgccgtgccgatgctgcggtaccactccgctccgtttaagaggatcggtgcaatattcgccagcgtctctacgttatttaacatggtcggttttccaaagagtccgtgaatgcttggaaacggcggacggaaacgtggctcgcctcgttttccctcaatggactcaaacaatgccgtctcctcgccgcagacgtaagcacccgcaccggagcggaacttgatttcaaagtcaaaaccgctctccatcatattttttcctaaaaatccgcgtttttccgcatcctccagcgcatcttttaataccgggaacaaatatgtatactcggctctcagatagatatatccggtatgggcgccgactgcttttccagcaatcgccatgccctcgaagaccgcacacgggtcggtcgagagaagaatccggtctttattcgttcccggctctccctcatcggcgttacagacgatgtatctcgtcgggtcagatgcatgggcggtaaactccatcttgcggtaggtcgggaatcccgcaccgccgcgtccacgaagtccggaggcgcggatcacatcgataatcgcttcactatccatcgaaagtgcttttttcagcgcttcaaatccgccgcggtccgcatactcctgtgaacttctcggattaatcttgccgcggtttttcagcaatacgtgcatttcctccatactattccacatcctcccgtatatattgtttgataatatcccgcaccgattccggcgtcaggttgccgtacacgtgctcattgatcatgatcgccggggatatttcacacagtcccaggcagggacagtattccagggtgaaccttccgtcctcggtcgtctccccgatgctgatgccgagctgatcctccagcgcctgaacgactgcctgcgccccatgtacgtggcacggcgcgctcttgcacattcggacgatgtagcgccccctcggttttaccgacagcatcgcataaaaggtgatgaaactgtacaccttgttcatcggaatatccatctccctggcgatgactgacgccacctccttagaaaatgccgacacaaccttctgcgcccggatgatcactgtcatcagcatatccggtctgcccttgtattccgccgcaatcgctgccacctgtaccagctttgaagccggtgtcttatatacataactgtccctgtccatcctgctccctcactttcagtttgtatttttccaaacttattttttgtttgactaactgtctgtttgattttttctcaattatagggatgcactgacaaattgtcaagaaaaacttacagtttggtttgttaattgacaaacagtttgtctgagagtatgatgaaagaaacaggtttgctctcatttcccgttatcttgtacctgaatttttgatttttaaacaaaaaaggagaacattctcttatttatgttccctatctactaacttttttctatagaaacaggattgacgcagcaaaatgaacgcgataaaatttttttcaggaactttgacaaaagaaagacaatccctgtgcatttcattttccgaattattttaagacgcaaaattttgcgatacacactcggggcacagagcaccccaaaggaggtattcatggaaatttccaactacatggactttcagtttctcatccgttttctcgaaggacttcaaaagtttctcggagataactgtgagatcatcgtccacgattaccgcaaaggctacgatcacacgatcgtctacgcattcaactcacagctaagcgggcgcgacgtcggcggttccccgcgcggcggcatgatcacacagctcggcaatgatatcgagccgctcaagcattcgatcatttccctcgataccagccagaaagaccggctttttaagtcctgcacaacgctcatcgaggacgaacatcacaaaattatcggatctgtctgcttaaatatggatgttcgcgatctctatctggcacagagcgccctgcaaaatctgatcggacgcccaggcaccatcggcgtatcggcagctgtgggcgcacagatcgacggcatgtctggctgcacaccatccggaatggcttctgatggcaccttttccggaactggcagcacggacggcacgaatggcgcaaatcaggcagccatgtctgaccgcgactttattctcaaaaagaatgtcgatgatattttacagcactatatttatcaggcagagtccatgatcggaaaaccgatgatgctgatgaacaaggaagaaaaaattcgtgcactcgactatcttgaccagaaaggcgtcttcaagatcacaaaaaccagcctgctcctgtgcgacgcgatgcagatttccaagtatacactgtataattatctggaagaagcgcggatttcacgaaagagtgaaacgaatgaataagaatcataaactaattctttcaacctctgtttgcttaacctttgattcattttaaaatataaaagacctgaagagcagccatttaccgcacctttcaggtctttttatattcatttaccatatttacattattttctcaatttttctagtattctttctattattgttgcttcttacctattctttttatcctataaacagacaccacgccggaatcgtaatcatcgaaatcagcgtcgtgagcactaccgttttcgctgcaaacggtgcatcgctgtcatagcgcgccgcaaagatcgctgcagttgcaccggctggcattcccgtcatgatgactgccacacctgctgccaccgaatccaatccggccgccaggctgattccatatgccagaagcggaagaaggaacagacggagcacactgaatttgagggccgtcggattaataatctcacgcagtttcacatcggtcagaatcgtaccgataataaacatcgtcagcgccgagttacagtttccaatgtaggtaaccgtcgatttcagcacgcccggaagctgcagctgtgttgccatcaggaacataccgatgtagacaccgaccagacacgggtgcgtcaggacatttttcaatacctttttccggtcagaaccgcctccaacaaaataggatgtacccgccgaccacatgacaacgcgcatcggaatcagaaaaatggatgcgtagagaagtcccatacttccatatacgccttccgcaaccggatttccgaggaatccgccgttggaaacgatcgtacagtattgaagcaccttccggtgctgctctgaatattccttaaacagcactttgttgagggccacacagacaagctgcaagacaaatccaaccgccaacagcaacccgcacgttttaaaaatcgaagcatcaaatgaaatcaggcacgatttcacaatattgcagggaatcacgatattcacgcagagatccgtcagacatttttcgccttccttgctgatgatcccgcgccgtttcagtaccgcacccgccagtatcatcaggaataaggaaccctgtaggttgcaaagttcgagtaaattcatatggctcttcctccttttcctacgaccttcttatgagacgaaccaaaaaactccagatcggcagtatgtacagatacgacgccaccaccacactcgcaatcggagcaccgacggctgccagaggaacggctccggcgatcgaccacggaaccagcggtgccagcacaaccgccgtattttccagatcgattgcaaatcgtttattatctggatttccttccttgcagagctgatgggtcagcatgatcgaaagcgtctggttacaagcgatcatggaagcaactgccgccaccgcaaaggtcgcaccaaacggagtaattttccggctcaacgcctctattttcccctgaatcggcttcaagagcccagttccctcgaaaattcctgcataacaggaggacaggctcacaatcgcagccaccttaatcattgatttcaggccgccgccgttcatcatagcattgagcgccggatcgcttgcctgataaccggtcagacacatctgtaaaatttctccgattgtccgcccctgcagcgccacgctcagaaacgccgccaacacaatgctgatcagcatcgttttcttgacctccacccggaacacagacagcaccaggataatagccgccgggattaccgcactccaatgaagtacaaaacgattggaaaacagcccttccacatccatccgtccgtttccggcactcatggaacgtcccactatataatagagaatacatgtagccacaaatggcaccagcgatgtctttatcatttcgcggatattttcataaatatccgtcttcgtcagcacacagacaagattcgcgctggacgataccggtgaacagcggtcgccaaaatagatgccagaaagaatcgcgccgccgatccagaacgggtcaagctccatcgcacgtcccatcgccatacagataacacccatcgtcgcaccggttccaaaggaggttccggtcaggatcgacaccatacagttaagaaggaacgcgatcaccagaaatgccgacggcgacaccagcttcgacgaccagcacacgatcacggcgatcgtgccggacgcccgccacagcgctgtgataaagccaataagtccgaaaatcatcaggatattgcggacggttttaacgccggaaagcgacatttttccgagttccgcaaagctgtgcttccgaatcaaaccgtacacacagaagatcagatagccgcccgccagcgcccaaagcacggacgcgccggtaaatacgcagcctgccagcgccgcgataaatgcaagtaatacaattccttctaacatagcttcacactcttttccctaccaaccagttatttttcgcagtaattttttattttttgatgtttttagtatattcctgttctaactcaatgtccatctgttaatttatgtattaaatacagtttatttttgtatcctttaatttaagctatttctgcccttctgccaactcgggtcttctttcagtttcccaaaaaatgtgtccccagtgttttataaacatcttggttttcttctactttcatcttcctcctcatatacttttctgacataccctccccggagatctgccatgcgaagatttcatcctttgattaccggaaccttgctcctgacggcagtcggatttttctgccggattctcggctttttctaccgcatctttctctcccggacgatcggcgccgaaggtctgggtttatatcagatgatttttcccatacatggcatcgcatttgctctctgcgccggtccaatccagacttcgctctcccgcctgaccgccgcctccccggaaaagggacgcgcctttttgcgggtcagcctcgcactctcactatcgatcgccctgccgctgacctctttgatctacaccttcgccgattttctcgccgcgcgcgtccttcttgcgcccgaatgtgcgccgcttctgcccgcactcgccctctcgatccccttctgcgcgatccatgcctgctgctgcgggtattattacgggctcaaaaaaacggcagtcccggcgttttcacaggtggtcgagcagtgcatccgcattttctccgtcctgctgatcgtccatgtctgccgcacgaacaggattccgatcacggtgctgctggctgtctgggggctgttgatcggggaagcggcatcggcggtgttctgtctgctggtttatggatgctcgaagcctgctgccacactgcaaaatacagacacgcatatttccagctattctcgtcaaacacgaaaaaataccacccattttcaatactcatcccgttctacgcccccttatacccctgacacttccagcaccacgcctccctcacaaaaaaaatccgcccacactccccccctgctcctccccctcctcaccatggcactccccctcatggcgaatcgcctcacgctcagctttctccagagtctcgaagccatctttgtaccgaaccagcttctcctctccgggctctcgcgggttgaatcggtcagtatttacggagttctcacaggcatggcactcccctttgtcctctttccatccgccattaccaactccctcgccgtcgtcctgctcccggcagtctcggaggcgcaggcgcagaatcagccggacaaaatcgaacgcaccatctccatggcactccgctacagcctgtacatgggaattctctgcgtcgggctcttcacccgcttcggtccagcactgggcgaaaccttttaccacaacgccgatgccggacgtttcatccagattttatcctggctctgcccgtttctctacctctccactaccatgggaagtattttaaacgggcttgggaaaacgggaaccgtcttcatccaccatacggtttccatgcttctcaccctgtcgctcgtccttttcgccatcccgcgatgggggattttcgcctatctggcggcgcttctcatcagcgaactggtgctcgcctttctccacatccacgccctcgcctgcgaagtcccgatccgcctaccagtcagccagggcattgtaaaaccggcattctgcctgctggtttcgattgggatgttagaagttattccaaacgcgtcttacctgcctcacctgtttccgcctgtcctcatccagtccggtatcctttgcctgctgtatataggaggactgcttctcttacatacaggtacagtcaaacaataaattatatgctattttgctatatcccttaaatgcaatatgtttaggtattttctggcaatttatatttttttattttatacttattacattcagggggatttacaaagggggaacttttttgaaatacgatatcaattttcggcatttagaatattttatcaaggtagcgcgcctcggatccatcaataaagccgcccaggcgctctatatttcccagccgtatcttgggaaaatcatgcacgatctggaagaaaatctcggcgccaggctctttaaccgcagccgctcaggcgtaacattaacgcctgaaggaatggaatttctgacacattccgaaaaaatcattgacgaaatggaacagctctggtttcagaaaaagaaggaacaaatcaaaatttctgatccgctggctgtctccatgacacgtttttctcatatcatggaaagtttcagtgaaatagtcctgcgtcaccgcgatcagccatccttctcccatcgactgtatgaaggcaattcagacgaagtcatcgaggatgtggtatccgggcgtgtcgatgtaggcgtgtttcattttgacagccgcaaacggcgtgaaatggaggccttgctcgaatcaaaagggctggaataccattttcttgccaacatcgaaccacacattatcatttcccgcaaacatccgcttctgctgcaacagaaaccggtcaacctgcacacactggcagagtacggctttctttggtatcttggacaatgcgatgattatatttaccagcttctctccgaaggggatcaggatgcagaaaaaatgcgctcgaaaatcacctatctttccagccgcgccaccctgatgtacatgatctcgatcagtgactgctacagcatcggcatccacgatttcgccaaacaagaagcctcctaccactccacttctattccgattccaaactgtggttttatgctggaatttggatatgcaatgcggaaagacacgccaatgacagcgatcgtacaagaatttatttatgacttaaagaaaaaacttctctaaaaaaacaccatcaaagctgccggacattcacagccgtcccggcagtttttttttgatccttttcagcacctcttccccgttcatcataaatatttattcatatctgacatatatatcccgttatacctttttgtcatatcccttaaagctgacacgcattatacatactgtcttccccatgctaccatactatcagaaagcaacaccgaataaaaaacaggaggcgtttaagtatgagagatgtacttgaacaggccgttgcactgggaaaaacacatacccatgagggtgcagttgccacctacataccagaacttggaaaggtagatggcagtcagctcggagtcagtgttttttgccggaacggcaaacggatttccgtcggggatacgaaagtccgattcagtattcagagtatctccaaaatcatcacccttgcagtcgcgctggaaatctgcggcttcgaccaggtatttaaaaaagtaggcatggagccgaccggcgatccatttaactcgctgatgaaactggaaaatacggacagttccccctacaacccgatgatcaatgcaggcgctatcgtagtggcaagctgccttgcttccgaaatcagtttcgataccatgcttgataccatccgggctctctgcatggatccggacatcaacctcgacaaaaaggtttatcactcggaaatgtctcatatttcccgcaaccgggcaatcgcctatctgctggagagcaaggggtacatcgaaaagaataaagatgtggaaaacagcctgcatttttatgtcaaaatgtgctctctcagcgtgacggcagaaagcctcgccggactgggactgattctcgccaacgatggcattcatccagacacggggaaacggcttttaagcagccaggcggttaaaatcgtcaaaacactcatgtttacctgcggtatgtacgatggttccggcgaatttgccgtccgggtcggcatcccatccaaaagcggcgtcggcggcggtatcttatcagtggtagacggcgagatgggaatcggcatcttcggaccggcgttagataaaaaggggaacagcgtcgctggagaatgcgtgcttgaatatatgtcacatgaactgcatctccatatgtttgatccgcagcggcacactttatagcaaaaacaatatgtaaattgtatgagaggggtattttaaaatggcagatttatacgcaaagataatcggcacagcaagcaactatctttacagctacgtgttaatcatcctgctggtaggcggcggcatatattttaccatccgcaccaaaggggtacagcttcgttacttacttgaatctatccgggttatcctggagccatccgacaaggaagatgagtctatttccgcctttcaggcattgatggtttccactgcttcgcgcgtcggcaccggaaatatcgccggcatttctaccgccatctgtttcggcggtccgggcgctatcttctggatgtggatgaccgcgatcctcggaagtgcaaccgcatttgtagaaagtacgctggcacagatctacaaacgccgtgccgaggacggaagttgctacggcggtccttcctactatattgaagccgttctgaaaaaaagatggctgggtgttctctatgctattttcatgattttgacttacatggttggatttaacctcgttgcatccttcaatgtggcagattcttttaaagtatacagtttctacaatccaagcctgactccgattctcatcggtatcatccaggctgttatcttcggcatctgcatcagcggcggcggcaaacagatcgctaaaatcacaggaattcttgttccggtaatgggcggactttacattgcagctgccctgctgatgattattctccacggaaacatgattccgggtatgttcgcaagcatttttgaaggggcttttgatattcaggctatcttcggcggcttcatgggatccgttgtgatgctcggcatcaagagaggcttgttctccaatgaggcaggtgtcggtgcttccgctaccgcagccggttccgcgggtgtcagccacccggtcaaacagggtcttgttcaggtattatccgtatttatcgatactattgtcatctgctctgcaaccgcatttttactgctctgctccggcgttgcaccgagtgcagacatggctggcatggcatatgtgcaggtagctatgaataacgtattcggcaccgcaggtgttgtatttatcacagttgccctgattttatttgcctttaccacgctactcggaaactactattttgctgaaaccggcatggcttatctctgcggcaaaactccagtcaagggcatccggattacccagagagtgatcgctatcgtgattgtcctcatcggttctgtggcaagtctcggcatcgtgtgggataccgccgatgttctgatgggactgatggcagtcatcaacgtaccaattatcttcctgattgccaagccggcgctccgctgcctggaagactaccgggcacagaaacaggctgggaagaatccggtctttaaagcagctgatattgagttgaaagaagaaaccgatttctggaattaataaaaacaaaaatccgcataaacagggctgtcagaatctttcccacacatggtttcaaccacactgtgcaaaattccgacagccctgcctgtattttttcatatctgtattatatctatctttttaccgttttattaatctgcagccttatttgcggttcttccaaatcaaaaacattccagctgccagcagcaccactccgacggcggctcccaccatccagttcgaagaagatattttccccgatcaattttatcgaaatctctatttctatatcttatactctcataaatagcagatttctgttcctactcctgctcgtcctccttcagcacgtacggcgtcatctggtatacatagtaattcagccagttcgtgtacagcgtgttggacatatttctccatttcagcaccggcatggaaaatggatcgttgtccgggtaatagttgcacggtacctgcggatttaagccttttttcagatcgcggtggtactcgttgtttaacgtcatgcgatcatactctggatgcccctgaacgaaaatctggcttccatcctggttcatcaccagaaatacgccagcctcatccgatttcgccagaatctgcaattccggatgtttcagaatatcctcttcccggtcttccgtgtaacgggaatgcgggcagtaaaaataatcatcgagactacggaccagcgggatcttccggttcaaaagacgatgtctgtaaatgccggaaagcttcgtctttctctgatgtttctggattccataatgataatagagtcccgcctgcatcccccagcagatatgaagtgtcgaagtcacatgcgtcttgctccactccatgatcttcgtcagctcgtcccagtagttgatctcctcaaactccatattctccaccggcgcaccggtaataatcataccatcaaagcgcttgcggcggatctcgtcaaacgtcacataaaacttattcaaatgcgtctgcgatgtatttttcgaaacgtgcgtttccagcatcaggaatgaacagtccacctgcagcggcgtattcgaaagtgcccgcagaagctgcgtctccgtatcctccttgatcggcatcagattcagaatcaaaatctcaagcggacgaatatcctggctcatcgcccgatcctcatccatcacaaatatattctccgattccaaaattgccttagcaggaagatccttttgtattttaattggcatggttatatatcccctttttatataaaattcgtttgaattttaggattctattatataccgatatgattcatttctacttacaataaaaactatatcagcattcctaatcataacacaagctgcaaaaaaaagccagctaaacactgtctggcgtccggctttttcacctctcttatagcttcaaaaactcctcctccgaaagaatcggcacccccaattcccgcgccttcttattcttcgaggacgacgacgccacatcattattgatcagataattcgtcttggacgtcacgcttccggtcactttgccgccgcggcgctcaatcagctcctgcagttctttccggtttttgaattgttccagcgaaccggtaatgacgaaattcatcccggcgaatgcctcatctgcaccctcactgctttcttcgtctcctgcctcaaaggtcagctccgccagcagatgatcgacgatcgcattattctttccatccgaaaagaatgccgtccacgcctgcgccagaacttccccgattccatcaatctcgaccagctcttccacggtggcatggcgcatcgcctcaaaatcatttttaaaatgacggcaaatcatcttggcatttgccagaccgatgcctgcaacgcccagaccgtacaccattctcggcagggtcgtgtgggacgctttctcagccgccgcaatcagattgtcatacgatttctgcccgaatccgtccatctcaacgatctcttcctgatggcggtccagatggaaaatgtccgcatactcatgaatcatgccgacaccgataaatttctccagcgtcgcctctgaaagtcccgcaatatttaacgcatcgcggcttgtaaaaagagtaaaactcttgatcttcttcgcctggcagtccgggttcgtgcagtagagtgattttacatcgttgagctggcgcacctccgtctgaccgccgcacaccggacatgcctccggaatatcccggacgccgctgcgcgtcaggttatccgcgatctgcggaatgatcatatttgccttataaaccgtaatccggtcgcctgcccccagctccagcgcctccatgatgctgatgttgtggacactggcgcggctgaccgtcgttccctccagctcaaccggttcaaatactgccaccgggttaatcagccccgttctcgacgcgctccattcaatatagagaagcttcgtctcctgaatctcatccgcccacttgaatgcgatcgaatcgcgcggaaattttgccgtccgccccagcgactggccgtaggcaatatcatcatacaaaagcaccagtccatccgacggcgtatcattttccgcaatcgcctcagaatacattttgaccgtctccggcagcgtctcttttgtcacctcatggtactctacgacctcaaacccctgtgttttcagccactcaaactgctctttccgcgaatttttgaaatcaatgccatccgcctttacaaggctgaacgcataaaaatggacctgtctctgcgctgtgatttcgctgtttaactgacgcaccgaaccgctgcataagtttcgcggattcttatatttcgcatcgacatcctcgatctgctcattgatcttctcaaaatccgaataccggatgatcgcctcaccgcgcaggataagctcaccctggtaggaaatatttaacggcacattgacaaacgcctttgcatttgccgtgataacctcgccaatctcaccatttccacgcgtaaccgccttgacaagtgttccattctgataggtcaggacgatcgtcagaccgtccatcttccaggataaaagcccggtctgcccgccgagccagtctgccagctcttccacgctcttcgtcttatttaacgaaagcatcggcttctcatggcgctccttcggaagcgcgctgactacctcatatcctacattctgcgtcgggctgttcgcaaacacaattcccgtctctttctccaatgaaaccagttcatcataaagcttatcatactcaaagttgctcatgatctcccggctctcctgataataggcgcgccctgctgcccgcagcgtcccaatcagctcccgtatccgttttgtcttgtcctctgccatctatctgactccacctttcccatcgctctctccaactacctctgaatgcgttttcaagcatttctatgcaacctcatatgtgaacctgcactgactgccagacaacattgtctcagtcattcttctttccgttcaaaatatcttctaatttctgtctctctgccgctgtcacttcccggtactcgcctgttttcagcccatccagcgtaatgttcagcatccggacgcgttttaacgtctgcacctggtaccccagcgcctcgcacatccggcggatctggcggttgagtccctgggtcaggatgatccggaaactcgtcttcccggtcttttccacctcacaaggacgggtaaccgtatctaaaatcttcactcctgcgctcatcttccagacaaactcactatcaatgggtttatccaccgttaccagatattccttttcatgtccgtaacgagcccttagaatccggttgaccagctcgccctcattcgtcatgagaagcagcccttctgaatccttgtccagacgcccgatcgggtaaatccggaccggataatctaaaaattctacgatattttctgcccgatctttatcagaagtcgtgcagacaatcccccgcggcttattgaccgctaaaagcaccggcgcatccttgccggacaccgctacgccatcgcacgccacgcgctgtcccggcatcagcttctgtccgacctctgccacgcgcccatcgatcgtcacacgcccgtccgcgatccgccgatccgcctcccgccgggagcagatgcccgcctcgctcaaaaagcgatttaaacgaacgccttccgctggaatccgggattcctgcttttcacttggctgtactctcttgtatgatttatcattttgatttttttgcattttattcatctcatttcgatttattgtgccgtaggattccggcaaccaaagtataaaaattataacattttcgtccatgggggtgaacctcacatggctaaagtcacatgcttctcagccgttttaaacggcaagactaaatatcggcggatacgccagtaacttagaattcgtgcggatacgcacttttcccatgccggatacggctggtttccacattacaggtagtccgctgtatatctgcctgcatttatgccgcttttaaattgtttacttctacataaagctttctcaaatctgcataaacacaggaggttctacgcttcactgcaggtacttttgcctccagtgaagacctttccgtttccggcaagggttttaaaagttcccgtataaaatatctcgctccgatattataggatgctgacaggtcgcagttatactgttttccggtccggaaggtacataggctatggttctcctggtttcttactaccgctccgcttccgtcacaggccagcctgctggtgttccgggcactgactcttgagacacgaatcccgttccgatgtgcctgatgttcacacagtttctgaatatcccgctttctccataaatgaagcttttgtttctttt

SEQ ID NO: 11053 - DNA, 6660 bp, Unknown
  gut microbiota DNA sequence
actcccctgcccagttctgcaaaaatcccgtcgtaaatgcactgattgaatactactacggcatggcgcagacacaagggacagaatttcaggtgcggctcgatcttcccgatcagatgccgcttaccgatgtggagctgtgtacggtgctgggcaatcttttggacaatgccgttgaggcgtgcagccgccaaaagcaaggggtgcgccgcgttttcattgcaggcgaaaccagaggtaatatgtactttttgaagattgaaaacacttacgacggtctggccttgcaagagggaaaaacattcctctcccgaaagggtacatctgctgatcatggaatcgggctttcctctgtccgaaaaatcattgaaagccatggcggtgatctcgatcttgttcctggtgaggaatcctttcttgttggaattacagcgggtttataaacattgctcatacaaaaggacaccattacttacatttgcataagcaatggtgtcctctctattttccaagttcttcttccataatattcctaatcgctttaatacccgtaaaagtcaattttattccacgattatacatagccagtacttcattcagattttcaacaagtaccttatccaactttttatgtatcgttacaggctgttcctgaatcgtatgaacatggtcaaaatatttttcaataacaggaaatgtattctgtatcaaaaaagcattttctttccctgcaaataatccaatcactatcgtattgcatttaccatatcgtttctttttcttttcaacgatttccttgtatttctcagcttgtgagctaattggtatcatccaatacaattttggattttttctatcctgaattgcatagtaatgaggacgatagttcccctgttccttattactcatcaaatatttatcctgaaccaagtcaaaaaattcatccttgatatgatacgaatatccctgttgtatctccataaataacctttcctatgtgataaaattccccatcagcattcactgatggggaacatttacaaactatactatttttatcccacctgtatagcaagtggcttcatttacgaactgaattatttataccccgcaccatcagcaagcggcaaacatttacttctatctttagtatatacagtttctctgaatttagcaacctgttttttaagtttagaaatattttttactatatcatagctcatcatttgtcgtaactctgtcgtaaaatacatgcatttactttcttaatacagcttagccccagcaggaattgcgtcatctaacataagcagattcaatccttcgtgtccgtcatactcatacactgctgaaatcaacattccttctgatgggattcccatcatcattctggtaggaagatttgtgatcgctacgcatgtctttccaacaagctgttccggctcatagtactcatgaataccgcttaaaatcgtgcgtttcttgtcagttccatcatttaatgtgaactttagaacgcctcaataaactgaggctaaaactgtccattccagttaaacaaatttgaccgcgttttattttctatattcaacttactttgtgatatttcttctcgattaattggtatttcgtcaaagtcaattccctgcatctattggttttcctgcctttctatgaccacttcaataacatcttctattccacagtctaatgcatagcatattttaacaatcgtatctaatgaaacatattcgttcttactcattttagcaactgcatttgtgctaatatgtgctatgtcttttagctgagtcttatttatattcttatccaccatcaatttccaaaggcggttataacatattagggattcagtgctcataattcacctctcttaaatttgcttttgcaactaatgcaagtatatcataattctcattctttttcaattatttcttgatatatatcaagaacatctgcacatatactcatttttaaataaggcaaaaaatagactcctatttctaggagtcctattaaacgtgttctcttattctattaatacaactttgctcctgccggaatatggttatccaccataagaagatggagttcttcatcctctgaatctttaagattatttactgctgaaagtaacataccgcaagattcaattcccatcattgctctaggtggaaggtttgtaatagcaataagtgtctatccaactaattcttctggttcataatatgcatgaataccagaaagaattgttctatctacacctgtaccatcatcaagagtaaattgtaaaagctttttgctctttggtactgctacacattccttaaccttaacacaatgaagcatgcctcaaatccggaacacagcgcatcagccaatccaccgccaaaaaaaatcgtaagcgccgatgccgcaataatctttcccaaagcatttgtaagatcatccagtctttcatccaaaatcacaaggattttttctttcagagcttcacaggtatcggggaatcgatgcagtcacagcaaaggcgatagagatggttcaatttggacaagtccattgcatcccgcctgattcttcgactttgagtaaccgcttccattccccgaaattccattgttataagaatactggatgtaatcgcataaacattcatgtgctctgcaccatacgctttgcccagcctgtataaagtctcctctatacggctgatctctgcacctgcataatacattgcttcaccaatattgagcatttgacgtataagcagatccatgtcgctttcattggcaatcagcagatcggcattcaagaccgaaagcggaaccaatccgcacaagctctgagagcctcatccgggtctttatagaaatcggctccccacaggctcaaagaaatggtatccttgtagccaagctgctctaattcctccagacggcctgcaaatgcaaaatcacctttacccaaagctgcatacccttcttttcggtctgcaaaatgcacatgggcaggaagccccagacggctgcaaaaatctgagatcgtctccgcattattctctgcctgaatcaaatcaagaccggctttaacccatggagaattcacagacttaattaacttttccagatggctcagatctctggcaaataaggaaacagctgcagacatttcttccatcaccatcactattcccaattcttctgccttttcggacaatatctgaaccgattctacaagtcgaagaaaattatcttccgatggcgagtccacatattcccatccgggatgcagcatcattttatcggtttcaaacgcagctgtatcctccaaatactgtttcatcatattaatactgtaatttctcacatacggaataggagatgcaatattaatcggatattgtctgcactgttccggatggaaaacagtcattttaagtcctcgatccttaagcatctggttgatctccctgatccgggcagtatggccctcaggtgtatcatcatccaggcagaaatgaggagatgctccccacaattctatagaccggaaaccatttgcctcaattgagtccaggccatacgcaaacgtgtggtgaagaaaaggcgctgtcaaaatgctgatctgttctttattcataatactcatacaagttcccctccatcaaaatgctttctgagagtttcaatatttgcacggtaatgtggctccggatccagcctatatgcaccattagccatttccatggttatcgtacctttgtaattatattttcgcatcgcatttaaatgttcatcgaggttctggaacccatctccccatttcatatgtccaaatggacgtccatcgttcaggtgaatatgagccagtttatcccccaaaacttcaaaatactgttccagcgtttctcctgtgtatgctaccggaaccgtgtccacgcagcacttcagattaggagaatcaatatcttttaccacacgaaactggtcaaatctggttgttgctaacggagactctctttcattcaggttttcatacatcaaagtaatgccatacttttccgcgtgccgtgtcagcttttccacagaatctcttccatgcttataaccttccgacaacggcctgtcccagtaaggtcttccagggcaaagcaacatctgtgggcactccagttccactgctgcctcaataaatttcttatactgctctacagttttatttcggatattgtcttccggtgccgcaatattaattgcataagtattttcctctggcatcagagaaacaacactaaatccccgcgctgacaatttttttcgcatattggcagccatattgggatcaccgtcatacatatggaaatgatggctgcacccatataattccagtctgtgaacccccagccgatccatagaatccagaaaataatcaaaagaaaatttcttatataccatatttgtcgcggccaattgcgacattaaaagctcagacattgtatatctcctttttcttatccaaaatacattctcagattgcgcatatttctcttgtcatgataaaatggatctgcaaaatattttccatctgtcagttcctgggtaaattttcccgtatagccattattcagcatatccagaatatcttgtttgagattacggtttccatctccccacacaaaatgtccataaggattacaatcctgaaaatgactgtgaataatattttcagtcccgaaagtatcaaaccactgctgaatggtttctcctgccacagacatagctgtcaggtcaatcatgaccttaaagttcggatgattcacctcatcaaacaaatgcttgatctatacgccaccctatcaaagattcctgtgggcgcagcgactcacatgcaatcatcatatcattttcagccgccacttcactcagcctctgaaacatttctactgaacgcttgaatccttcctcttccggttcattccagtagccccagcccgagtttgcttcaaggatcgttgcccccagctcgtgcccaaatttaattccatttgagaagtagcggaaacagcgctccttcagttccggttcttttgctgcaaactgatagccctaagaacagttttccggtgtaaatacaggacatgtcagaccgtgatcatccagtttctccttgatcggcactggatcctgataaccatgatcatcaagccacaacccctgatgcgcagcaagcagatctacacatttcactcccagctcctgctgacaatcaaggaaataatcccagtaatcttttcgttttcattttttcctccttgtttttctgcatgctgattcattcttttgcacgtattttctaatatcgattcaaaatgaatctttttaatattttttgcaaatttatattatcattatttgcaatatatgtcaatatgcttcatttttgtttgttgaagaaaatatttttgttcatttttttcaattactggcatttctttgcatttccctccattcttctatgcatttttcacgttcaaagttcaaaatacaatcaaaataatacagcccctctgcgtcagacgcaagagagtttcctttttccgttttccgcaacccaatcccggttcaagcccggtttaggcctattttttgcatacacaaacagagccaagtatgatataatcccatctttgacacttgaaaatagtaaaacagccataacgccagtattttatcagcgttgtggctgttctttgtcttgcatcgatatgtactatttttggatttgtgctattttttctgttttgtttcttttataatcgacctcatggaagatttggatatgaattcgtagtctgttcggaagccaaacgcattatgcagggcatccgtaagttttgtacgtttgtaggaaggtatatatccactgtctttagacagcagtgtcatattcagacccctaagggtttccaaaatcttactgcaggtaaactctttacccagttttttctctaacaggcggtaaaccagcaggctgatgtggcaggttaaaaagtgagccctgattctgtcttcccgcctcacaaatacaggtcttgcttcgaattctgatttcatgatgcggaagttttctggatgaaacgggcaggatcattgggatttttaccttttctggattttccgggagactgcatcattttcatagctctttgaatctgtccttcacggattttttgctggtaggctttatatttgggggagtatgtgatgataacagtttcatccatatctcctgtaacaatcggatactctgcattatactgatactcctgcggctcagcaaccattggagagtatactgcctttcatcggcagtttaatcagtcttattcctcgttgctcacacatatatgctttcattatttctatattctcgtcagcacttcctgactcaatagccaacttttctgaaggtatgtatgtttcaagcggaactccaagcaatcggtcagaaccaagttctgctttcaagcctttcttattagaataatagctgacagccaaagcaggaaatagagataaatattcttgctcacaaattcggcagcctttattcaatatcgtcctttcatttatcttc

SEQ ID NO: 11054 - DNA, 520 bp, Unknown
  gut microbiota DNA sequence
ccatcattcgtcgtcggcgcgtacgcgtcattgccgcaggggcgcgaagcccaggaagcctattacgatctgctgggcggtcagccctggatcgacggcaccgagatccccttcccgggggaccttgccgaaaccgccgaccgcatctggcttgccggccaactgcccaggcattggaagaacaatacggtcactgccattccgggcaccatgcagcacgtatggaaggacccgaacttcggactggccagcccggacgaggacggacgccggttcgctctggcgttcttcaagcagctgcgcgacgcgctcgccgactttgcgcagtggcggggcagccaggacgtcaagttcgtcgaaatccacacggcgcccacgcgcattgccagccgcgacgcgatgaccgcctcgttgcaggccctcgcgcagctggactggtccggcgccaagctggtcatcgagcactgcgacgcctacgtcgaaggtcggaagccggagaaaggctttttgccgattgagg

SEQ ID NO: 11055 - DNA, 23495 bp, Unknown
  gut microbiota DNA sequence
tataattatttatacaataaaagattttacatacaacttaaataaactcaaggaggagattgttatggttcagatcatcgcaggagcaaagggaaaaggaaaaactaaatatttactcgatatggcgaacacggctgtcaaagaagccaagggttccgttgtctatctggataagagttccaaacatatgtatgagttgaataaccagattcgccttatcaatgtacaggaatatccgattgataccagcgatggatttatcggatttatttgtggtattatctgccaggatcatgatctggagcagatgtatcttgacagcttcctgaaacttgcctgcctcgagggagcggatattgaagagacctacaagacgctggagaccatcagtgagaaatatcatgtaaaatttgttttaagcatatccatgaatgcagccgatcttccagagtgcgcgaaagaaagtgttgtagtatctttataagagattcaaaataaacgaaaccgcagctgtcagcgcagggcggagacaggagactgtccgattcatctgaaaaaggagaattggatggtctcttttttttctaattttctagtttgggctcaaaaccatctttccacattttcattgaaatgcttcttttgcaggtaccacctttgggaaaaaatagatatgcttttacattttttcaaaactgaaaggatttcctatcatatatatgaattttttgcattaaatgaaaaaattacaaaatatactgaaaaataattgtaaaaatttgatttatacggtataatgacacatgtcgggagacaaaggattatgatacatctatttgtgagatagatacaaaagtatacggaaatcatttaaaagacaggaaggaaaatactatgaatgcagaattttaccaagggaaccgacagcggctgtatgacagccttccggatcacaccctgcttctcctgttttccggttcttccatccgaaagacagccgatgaaaattatccgttttatgccgatcggagttttctctatctgaccggcattgggcaggaacacacagtcctgatggcagagaaagacggagaagaggtacaggaaacactttacatacttccgccggatatgctggcagagcggtggaccgggaagcggttcacaccggaggaggccagggcgcgatccggggccgcgcagatcgcatcgagcggcgagtgggaaaaccgtctgaaacttctgatgcggagcggacggtttgagcggattgcgatggatctgtaccggcacgatccggaggatgaagataccgagagtatccggatggcacggagacttagaaagtggtacccggcagccacactcacggatatttcccgtcagatacgccgccagcgcaccatcaagcagccgtgtgagatcgaggcgatgcgggaggcagtcaagattacgagggacggcattctggcgatgatgaaggcatcaaagccgggaatgtacgaataccagtataaagccgaattcgactacgcactggcgcagcacggatgccttgcaccggcatttccgagtatcatttccgcgggagccaataatttctgtattcactattatgagtacacagggcaggcgaaggacggcgatatgattctcaacgacgtaggcgcccagtacgaccacctcttcaatgatgtatcgcgcggctggccgtgcaacggaaagttttccgaacggcagcgacttctttacacatgtgcataccggacttcgcagcacatgttctctatcatccggccgggaatgaagatggcagacgtggaccggctggcgagggaatacaatttcgaacagctcaaagcgatcggcttatgtgaccggtatgaggatgtcggcagatatatctggcacggcggcgcccaccatgttggctgggacacacatgatctggtcgatgtcgatatcgtagagccgggtatggttttctgcgtggatatcggcatctactgcgaggaatggggcatcggcttccgcctcgaggataactgcctggtaacggaggatagctgtgagaatctgacagcatccatccccagaacgatagaggaaatagaatcagtgatgggaggagagtaagcatggaacagttacttgcgtatatgcagaaagagcacctggatggcatgttcatcagccgcccggtcaatgtaaagtatgtcagccattataccggcgaagattcctggctttttatcacggagcaggaaaaattctttctgacagatccgcgctacaccgagcaggtttcctatgagtgcccggattacacgattttgaactggagagatacctatggttccatcggaaaggcacttgcctacgcggcggaaaaggttggggcaaagacgatcggctttgaagcagcccacctgaccgttgaacagtaccagaacctccagtcggaggtaaaagcagagctggtaccggcggacggcatcattgaggagttccgctccatcaagaggccggaagagattgagtgcctgcgtatctcctgtgatattgcttcaagggcatatgaaaagatccagaaggatatccgggtcggcattaccgagaaagagctggcggcgcgtttaagcctctatatggttctggagggcgcggatacacagccatacggcaatatcctcatctccggtgcgagaacatccctgcttcatggaattccgtcccagaaggcgattgaatacggcgatctggtcctgatggattatggatgccagtatcatggttatttatctgatatgacgcgtaccctggtagtcggacgcgcaacgccgaagcagaaggaagtctacaagattgagcagcagatggtcgctgcggtggaaggattcttaaaagacggtgtttcggcatcggatgcatattatgaatccacgaggatcatcgaggggaccgagtattttccgtatcactacacaggaatcggacacggcgtcggcatgtttgtccatgagattccatttatgagtcctgtttccaaaaatatcgtgcatgccaataacgtcatgaccgtggaaccgggtatctacattccgggatggggcggcatccgcatcgaggatcagcttctcatcacggagacaggcaatgaaaatctgatcagcgccaccaaggagctgattgagctttaataaaagaggacaaggaggaatattatgagaaaaaacaaactacttgcactgggattagctgcactgatggcagcgagtgtagcgggctgttccactccgagcgcttcggtggatgatacgaaggcagctgaatcgggaagtgacagttcccagagcgcagcagcgggcgaaaagattttccgttattccaacacggcggatatcgcgacgattgaccctgataagacaaactccgtagcagacgcgaccgtctcctatcatatctatgatggtctgtaccgcaacgtacagggcgagcttcagccggcaaccgctgagagctatgaagtcagcgatgatggtctcgtatatactttcaaactccgtcaggatacaaagtggagtgatggacagactgttacggctaaggattatgagtacggtatgaagcgtctctgcgatccggcagcagcctgccctgccagctatctgggtgctgttttaaagaacggtgccaaggtcagtgagggtgaacttccggtggatgaactgggagtcaaggcactggatgactttaccctggagattacgcttgagaatccggctgattactttgtcagcatgacaagcatgagtgcatttatgccggtacgtgaagacctggttgagaaatatggcaatgagttcggcggaagtgccgataaacaggtttacaatggaccgttcgttgtaagtgaatacagtaacggcaaggtagaactgacgaagaatccggattactatgacaatgaaaagatcagtctggacggcgttgagattctgaccgtagccgatcagactactgctgtttcgatgttcgatgcaggcgagctggatctggcagaggttccgaccgagctggcagcgcagtatgaaggcaagacacagtcctactacagcggcgcagatgattatgcggcactgaatcaccggaataaatatctggcaaacaagaacctgcgtctggcgatgaactacgcagtcaaccgtgaagaatacattcttctgacccacaatggcttatatcaggctaaccagagatatgtgcttccgcaggttcgcggcgtggacggcgagtacggcaccgagtatccgttagaggcattcccacttcagggtgatatggataaggcaaaagagtatctggatacggcattatctgaattaggtctttccagtgcttctgatatttccctgaaactggttgtatccgattctgacacagcgaagaaagaggcagaggttgttgcaaaccagtggaagaacaacctgggtatcaacgtagatatcaacatggttccgtacgcaacgaaaaacgcactcctggttccggacagtgatgagtacgatatcatcatgagcggctgggcaccggattactctgacccgtacagctacctggagctctggtacagcacctccggctacaactacttaaattaccacagtgatgaatacgataagtacatcgacgcttccaagacaacttccggtaaagagcgtatggacaatctgttcaatgcagagaagacactcctggaagacggcgcactggtagcgcttcagttaagagaggttccgtatatggtatctgaccgtgtacagaatctgggcgcatactttgttggactgaactatgactatatgtatgtggacatcacaaactaatccatcatctatccaaaacatattgaaaaaccttagaagatgattgaagcacctgcgcttcaggatccggcaaagcggctggatttctgaagcgcagtacatatccggtggctgactggcggatgaatgagccgtaaccggcggccggaacaaccggatttgggatgttcccgtagttaaaggagcgtgaacctatgaaaaaatatatactgaagcgggtgggaatatccattgtgactgtgtttgttctcgtatccgttgtatttttcctggcaaggctgatgccgggcggaccgttcaatgatccgaaaatgtcagcaaccgcaaaggccaatttaagtgcctactacggattcgataaacccttactccagcagtatctgacatatctgaataatctgattcatggaaatttcggtttttctaccaaatatccgagccgtaccgtcaatgacctgttagcaggtgcatttccgtattcggcagaccttggtatccgcgcattatgttttgcgatttcctttggtcttgtatttggtattatctctgcattaaaccgtggcaataaaattgatttaatctttgtgattgtagctgtatttggtacaagtgtcccggattttatcatgggcgcgctgctgcagcatttctttgcagtcaaatgggggctgttcccgatcgcgcagtacaagggcttcgcctacacgatcctgccgtcgatcggactgggattctacacgatggcgtccgtctcgcgtatcatgcgtgcgagtatgctggaggtagtccagcaggattatatcaagacagcgcgctcgaagggcatttccaagttccgtgtgacctggaagcatcagatccggaacgcgatcatgccggttgtcacaatccttggtccgacggtagcagccgttctgaccggtacattcgttatcgagtccctgtttgctatccccggcatgggtaaatattatgttgagagtgtgcagaacaacgattactccctgatccttggcatgacggcgttttacggcacattcctggtattctgcaacatggtagttgatattctgtatggcgtgatcgatccgagagtgcggatcggcggaaagtaggtggcagtatgggtgagatgaaaatgaaagatggaaatgtgctgccttctgagaattccggcgcagcagcaggcacatccgaaaacctgacagatggacgcacgattacccgcgacaagtttgagatggtaggtaaaaatattgaaaaaatggaatcgatctcccgaccaagcctgaccttctggcaggaggcgtggagacgaatccggacaaataaggcggcatatttcagtctgattctgttgattgcatatggactgttggcgatctttgcaccgatgttcagccactacggatttgaccagcaggatgcctactcaatgagcaaggggatttcagcagctcattggctgggaaccgactctctggggcgtgacctctgggtacgtgtttggatgggcgcgcgtgtttctttgacgatcggtcttctggcagcccttttaaatactgtaattggtacagtgctgggcggtttctgcggctattatggcggcaagtttgatatgatcgtcatgcgtattatcgatgttatttatggtattccatctctgatcgtctgtattttggttatggtagtattaggctccggcgttaaaagcttaatcattgcaatggttattgttggatggacgggaacctgccgttttaccagaggcgaagtataccgcttgaaagagcaggatttcgtactggcagcccgcgtcatgggcgagtcggcgttcaccatcatcgtgcgtgagatcatcccgaatataatgggtcttctgatcacaaacctgacaatggcaattccgagcgccatcttccaggaggcgttcttgagttatatcggtctcggcatttccccgccgcaggcaagctggggtgttcttgcgaaagagggaacccgtatgatgacggcagcgccgcatatgctgtacgtgccggcattctttatctgtacaactgtactggcgctcaaccagctcggaaatggtctgcgggatgcatttgacccgagattgagaggaacggaataggaggtaggagacaatggctaaaaatatactggaaatcaagaatctgaccttctcgttccatacatacggcggcgtggtaaaatccgtccgggatgtcagttttaatgtacgcgaaggcgagattcttggaattgtaggcgagagcggatgcggcaagagcgttacctcccagtgcattttaaagctcaacccggagccgccgggattttttgagggcggttcgatcaagtataaaggcgaggagatcatcaccaagacagaccgcgagatgcggaaaatccgcggtgtggagattggatttatctttcaggatccgatgacctcgttaaacccgaccatgacggttggaaaacagatcgaggaggtctttgtcggacggaaggggatgacccgggcagaagtcagagaacgggcgctggagatcctgcgtctggtcggcattaatgagccggagcgccgttataaacagtatccgcatgagctgtccggcggtatgaaacagcgtgtcatgatcgcgatcgcgctggttggcaagccaagcatcatcatcgcggatgagccgacgacctcgctggatgtaacaatcgaggcacagatcctggatcttctgaaggaactgcgcgataagatgaacacctcgattatcctgattacccacgatctcggagttatcgccaagatgtgcgatcgcgtgcttgttatgtacggcggcaaggtggctgaaaaaggaacggttgatgagatcttctatgagacggcacatccgtacacggcaggtcttatcaaatcaatcgctacgctggatacctccaagaatcagaagctggtgcccatcgacggaacaccgccggatctgttcgcaccgccgaagggatgtccgtttgcagcgcgctgtgagtttgcgatgaaggtctgttatgaagaacagccggaatttcacaggctttcagacgaacatacctgtgcatgctggctgcagcatgagtatgcgccgaaggtggatatcatgaaggggcttactgaggcacagaaacaggaagaagagaaaaatgttgcggcactgccggaagagaaacggaggggacaccatggcaaaacgaattgataggagcacacccctgttccaggtcacggatctctgccagtatttcaacgtcggcaggggaaaagtgctgaaagcagttgatcacgtgcattttacgatttataaaggggaaacgttgggactggtaggtgagagcggatgcggcaagtccacgacgggacggtgcctggtaaagctctatgagccggcagcaggcacgatcacctataaaggaaaagatatttttaaatacacccgtgaagaggaaaaagcattccgcaagaatgtgcagatgatcttccagaatccacattcttccctgaacccgcgtatgacggtcaaggatatcatcggttccggcatgaaactgcatggactggcgacggacaaggatgtggatcagaaggtagaggcgatcctgaagcgtgtcggtctgaaccgcgaccatatgtcccgtttcccgcatgagttctccggcggtcagaagcagagaattggtattgccagggcattagcggtcgaaccggagtttgtgatctgcgacgagccaatctccgcactggatgtttcaatccaggcgcaggttttaaatatgttaaaggaactgcaggaagaaatgggactgacctatctcttcatcgcacatgacttgagcgtcgtcaaatacatttccgaccgtgttatcgttatgtatctgggaacgatggttgaatttgccgattccgaagagctgtatgcacacccgctgcatccgtacacgcaggtgcttctgtcctcgattccggttgcggatccgaagctggtgcgtgagaagaagcgtatcatggtcaagggcgagattccaagcccgatcaacccgaaggattgctgccgttttgccgagaggtgtccgtatgcgacggaggagtgcagggcgaagctgccggaactccgggaagtgacgccggggcattttgtggcttgtcatatggtaaagtaaattaaatagattcgtgaaggcgtcgaagctgacggggacaggacagcctggcttctcagacttatcattgttcgcttgctttcgctacagatgctcgcctgatgcggacttacatccgcctcattcggacatctgtgctcaaaatgcgtacaatttgataagctgaaagccagaccgccctgtcctcgtcagcttcttagttttttggctaattgagggagtaattgtagacattgatcgccgactggtgtaaaatattagttagaatttttttaaaattatggctgaatttggaaaattttaacgatatataacagaaaggtggattttctatgcagtacgattttgatacaccgatcgatcggacccatacttggtcgatcaagcatgattttaagaaagaaaatgggaaagcggatgatattctgccgctctgggtggcggatatggattttcgatcgccggacagcgtggttgaagcgctgaaaaaggcagtagatcacgggattttcggttacagccgggcagatgagtcgtactttgatgcggtggcagcgtggtatcagaaacgccatcatctgactctgcagccggagtggatgacctgcacgccaggtatcgtgtttgcactctcgatcgcagtgcgggcttttacccaggagggcgatgcggtgttgatccagccgccggtctaccatccattcagccgggcgatcctccgcaataagcggacgctggtggagaatccgctggttttaaaagatggacattatgagatggatctggaagagttggagcagaaggtgctggatgagcatgtcaaactgatgattttatgcaatccgcacaatccggttggccgtgtctggacgagggaagagctgaccgcactggctgacatctgcctgcgccaccatgtatacgtgatcagcgacgagatccatggcgattttgtatggcaggggcatgagcagactccgtatgcgtcgatttcagaggaagcatgccttcattcgatgatgtgtacagcgccgagcaagaccttcaatctggctggcatggcgacatcaaacctctttatcccggatccggagatgcggcgtaaattccggtcggagctgctggatgttggtcaggaaaatatgaaccgtctgggattgttcgcctgccgtgcagcgtatgaaggcggcggggaatggctggatcagcttatcggctatctggctggcaatctggcactggtgcgcgatttctgtaaaaaccgtgtgccgcagattcaactggtagaaccggagggaacgtatctggcatggctggattgccgtgaactggggatgacggatgatgaattgatggcattcttctcgaatgaagcgaaggtatggctggatccgggcacgcattcgggtgaacagggatctggatttatgcgctttaatctgggcagttcgcgcagtgtgattgcacaggcgctcgatcagatcgaggcggcatggaaaaaacggaacgcataatgaaaaatagcagaaccgtaaaaataaaacgttcggagggattgcatggaatttgaagaagtggagaatattggacagcggatcaaggagattcgcaagagtaaatctatcacgatccagaagctgtcccagtttaccgatctgtcagtgggatatctgagcaatctggagcggaaccaggcaagcccgacgctgaacaatctgcagcgcatctgcgtggcgcttggtatttcgatccgggatctgctcagtccttccggcgaggagagaaccctgatccgccaggaggagcagcagttatatgaatatgatgagtacaagcttcaaatccgccgtctggattttggaaagaaacgcggtatttatgagttttcaacctatgatccagagacaaaagatacaccgccgtcctgggggctgcatccatacgcggaggtcggagtcattctggaaggcaagatggaggtcaatctggatggaacggtttatctcttaggaccgggcgattcgatctatatcaagccgaatctctatcacacgatgcggaatgcgggcgatactccctgccgctccttctggcatctgcagattatggatgattctgtataattgacgggatgaattgatcttgaaatttggacaattcactcgtataataaaggctgtacgttgggctatacagaatattgcaaaagtccatggccggagacaaatttgcgtggatttttgtctggtaactgtgaaactgcagaaacagctgccagagaagtacatcgggaaaagggaggatagagctgcatggccaaaaacaagaaaattgtacgctacagaaagccattgaatatcaatgtaggcatgatcatttttgccatgattttcgtctatctttctttcagtgtctatacatatctcaggcgggatcacgtccagttttatgaggtcgtcgagggaagtattgtaaataataaagaatacaacggaatcctgtttcgggatgagacagtggaaaatgcaccgcagaccgggtacgtcaactattatgtgcgcgagggaaagcgggcaggcgctggggcgcgcgtctattcgctagatgagaccggcgagctggggaaatttttggaagaaaatcagtcctctggggtgtccctgtcagcagaaaatctggctgatttgaagaaacaactcagttcgttctgtttatcctacaacgatcagcactttgaaagcgtttacgacgccaaatattctttgcaagcttcggttgcagagtatatgaatttcaatgcgctgggcgatatggatgcacagcttcaggcacagggtatcaattacaaacagatatcggcgccccagccgggtattatttcctatatgacggattcttttgagggggtcgcgccggaggaggtgacggcggattcgtttgaccggagtcaatatacgcggcaggtgggacgagctggggaactgatcgaggcgggcacgccggtgtacaagatcatcacatcggagaactggagtatcgtgtttcagatggatgacaaggataaagagcagtttgccgatcaagatacactgacgatcgagccgttgggaagtgatatgaaattccggggaaattattcgatgtttaccggttccgatggcaatctgtatggacgcctggatctggaccgttacatgatccagtttgaatccgagcgttttatgaccttcgagatctccagcgaggaaacgcagggacttaaaattccggtatcatcggtgatggagaaggaattttataccattccagttgactatatgacaacgggcggcaacgctactgaagatgaggctggcttcaataaagaagtttacggcgaaggcggaaaggcgtcgattgaatttgtcacgccggagatttacagctcgaccgatgagtattattatgtcgagaagagcgacgatgggctgttaaagagcggcgattatctggtgaagtcggattcaaacgagcgcttccaggtaggaccgacggcaaagctgacaggtgcttacaatattaataagggatacgcggtgttcaagcaggtgaaagaacttgcaaatagcggtgaatattacattgtagaaaaaggaaccaaatatggattatcggtttatgaccatatcgtgttggatgccagcaccgtatcggatggccagatcgtatatcagtaatgatatttccaaaatatagagataaggaaggtgtatcacatatggttcaggaacagttagaagaagtacgtcagaatatacggaacgcctgcgagcggagcggacggaaggtggaggatgtcacgctgatcgcggtcagtaagacaaagccggtgccgatgcttcaagaggcatatgatgccggcgccagagatttcggtgaaaacaaggtgcaggagattctggagaaggaaccgcagctgccatctgatatccgctggcatatgattggacatttacagaaaaataaagtccgtcaggtaattgacaaggcagttctgattcactccgtcgatacggtgggactggcagagcagatcgaaaaagaagcggtcaaacgtgatctggacgtttctattcttctggaggtcaatgtcgccggagaagagtccaaatttggttttgccccggaagaagtcgagaaagcggcacgcgaaattgcaaagtacccgcatgtccacatacagggacttatgacgattgcaccatttgtagagaattcagaagaaaatcgtggtgtttttaaaaaattatatgaattatatgttgacatgaaacggaaaaacattgataatgttactatgaatgtcctttcgatgggaatgaccggagactatcagacagcgattgaagaaggtgcaactatggtaagagtcggtacgggcatttttggaaccagggcaaagataggagagaaatagggttatgagtattctgaacaaattaatggatacaatgcgtctcacagagaatgatgacgattacttcgatgaggaagattacgaagaagaaaaaccggtgattaagaagcgttctttcggcaagagggacgaagagatggatgattaccgccacgaggaggaatctaagccgcgttttctgccacgttcctctaacaataaggtagtgcagatgcgccgcagcatggaagtatctctgatcaaacctacttccatggaggatacgagagagatttgcgattacctgctggctggaaaagctgttgttttaaatatggaaggaatccacatggaggttgcacagcgtatcattgattttacctgtggcgcgacctattcgatggatggaaatctccagaagatttccaattacatttttattgcgacaccgtcatcggttgagctgtccggcgactttcccgaactcttagcagacggttccatgaatgtttccgggatgaatctccacttctgatactgatatactcccaggttcgctatatatctgaacctgggagtatttattatacaatcggaaatttgtgtgatttctgattgtatacaggctctctgagcaggagcacactttatataagcactttcgaacaggagtagaaacgcgcgatgctgcaggaaaaagaagaacagcttttaaaaaagagaatgatagaactggccggactctgttatcagcgcgatatacagacaagtaccggctttttgtcgttaaatgaacagacgatctttcactcgatcgagaagacgctgccgccggtgcggacttgcctgacgggtggctttgagggcgcagagcgcaaacttctttgttttctggcttcgtatgacgatgaggagtttggacttccgattgccgtgttggaggtcattccggcaaacctgcgttacagtgaggcgctgacgcaccgggattatctcggggcgctcatgaacctggggattgagcgcagctgcatcggggatattctgatgaaggaaaatggctgctgcgtcttctgccaggaaaagatggcggattatctctgccaggaactcacgatggtgcgccacacctctgtgatctgccgcaaggcggacgcgacggagccgatcacaccgaagatggagcgcgtgagtggaagcgttgcatcaccgcgtcttgacagtgtgatcgcgatggtattttcatcctcccgcacgaagatactgccgctcattgagggtgaaaaggtgtttattgacgggaaacaggtgacttccccggcggtgcagcttaaagagggcgagattgtatctgtgcgcggcatgggaaaattccgctttgccgggagcgggggattgtcgaaaaagggacgtctgtatgtttatgcggataaatatgtgtaaaaaagaaaggactgaaaaccaatgacagctgtaaagaatgagaaaatgaatcgcgtaaccgttcacctggacgagaagccgatctatgatattgtgatgaccgaagatttttcggcacttccgggtgaaatcgaaaaactctccatttcaaaccgccgtctctgcatcgtgacggattcgaacgtagaaaaattatatctgaatgaggtaaaagaacttctggcgccgtgctgcaagacggtaatttcgttcgtatttccggcgggcgaggagcacaaaaacctcgacaccgtccgggatttatatgagaccctgattttgaaccattttgaccgcaacgatatgctggcagcactcggcggcggagttgtgggcgatctctgcggattcgcggcggcgacttatctgcgcggcgttgccttcatgcagattccgacgacgcttctttcccaggtggacagcagcattggcggcaagacgggcgttgattttgacgcgtacaaaaatatggttggcgcgtttcatatgccgaagctggtatttaccaatatcaatacgcttcagacgcttccggacaaccagttttccgccggtatgggcgaggttatcaaacatggtctgatcaaggatgcggcatattatgagtggctgcttgaaaatgcggcagatatctgggcgagaaagccggaggcactccgcaagacagtgacctggagcaatgagatcaagcgtgctgtggtagagaaggatccgaccgaaaaaggcgaccgtatgctcttaaactttggtcatacgctgggacacgcgatcgagaagctgaaaaactttgaacttctgcacggtgaatgcgtggcactcggcgcgctggcagcgatgaagctgtcggaaaaccgcggcatgatcaaaccggaggaaacaaaccgcttcaaagaagcactgggagaattccatatcggtacgcaggtatccgggcttgagaaagatgcgattgtggcagcgtccaagaacgacaagaagatggattctggcatcatcaaatttattctcattcattccatcggcgacgcctacgtggatcgcacagtaaccgaggacgagatgaaacaggcactcgatcaggtgctggtataatagcaggaaaggaatcaggtgcatgaacacgaaattacgacagttctttatcttttttatcgggctgggagtcagcatcggactggatcagtttacaaaacatctggcagttgtccatctgaaagggcagaagccatttgtgctcattaagggtgtgtttgaattttattattctgaaaaccgcggcgctgcttttggaatgctgcagggacggcagggattcttcttcctgattgcagcggcagtcattctggcagtgttgtgggcggtttaccggatgccggcagggaaacggtatctgccgctgatgtgcagcttgtttctgctcgtatcaggcgcagttggcaatatgatcgaccgtctgacacagaaatatgtggtggatttcctgtattttaagctgattgatttcccgatttttaatgtggcagactgctatgtggtgatcgcgactttctcgctgatccttctgtttttcttcttctattcggatgaggaactggaatttctttcttttaaaggtgcgaaaaaggagtcggggcgatgatgcaggaatatctggttccagaagaggcggctggaacccgcatcgataaatttctggcggacgcctgcccggatctgtcccgttcctttttgcagaaacttctgaaagagagcagcgtgacagcagatggaaaagcggttaaaagcagtttcaaggtaaatggcggggaaactatcgcctttgaagttccaaaaccgcaggaggcggcgatcgaggcggaaaatatcccgttggacattttgtatgaagattcggatataattttagtcaataagccgaaggggatggttgtccatccggcggcagggcattatacggggactctggtcaatgcgctgatataccattgcaaggatcagctctccggcatcaacggagtcatgcgccctgggatcgtccatcggatcgatatgaacacgaccggtgtgctggtggtgtgcaagaatgatttcgcccataattcacttgcagaacagctcaaggtgcattcgatcacccgcgtgtattatgccatcgtatttggcaatctgcgcgaggatgagggcactgtccatgcaccgatcgggcgtcatccgacggatcgcaagaaaatgagcatccactccaaacaggggcgcgatgcgatcacgcattaccgcgtactggaacgcttcggggcgtatacatttatcgagtgccgcctggagacgggacgcacacaccagatccgcgtccatatggcaagcatcggtcatccgcttctgggcgatgaggtgtacggtccggcgcggcagccattttcactggaaggacagaccctgcatgcgggagtcttaggctttatccatccgcggaccggagagtatgtggagttttctgcgccgctgccagcgtattttgaagaactgctggagaagctgcggaaaaaagctggaaagtaaaagtaacgtgaatagtaagatcgttctgattcgtatacacattcttttcagatagtttatttttgtgtcgctaagaaataccttttattccgaaaaaatgatgacttttcagatagcttgtgttataataatggcagaacttgaaaggagttgagggagacatgaaaaaaaatttagtaattacaatcggtcgcgaatgcggcagctccggaagagcgattggacgaaaactggcggaatcattgggaatcaagtgctatgataaagagcttcttgcactggcagcgaagaacagcggtctctgtgaagagctttttaagacgcatgatgagaaaccaaccaacagcttcttatattcactggtaatggacacctattcgatgggttataatacatcggcttatatggatatgccgatcaaccacaagattttcctggcacagtttgacacgatcaagaaactggcagatgaagaatcctgtgtcattgtaggacggtgtgcggactatgcgctggcagattatccgaacgtagtgtctgttttcatctgtgcagatgaggaagtgaagattcaggaattgatgaaacgtcacaatattacccgcgataaggcaaaagatgtgatgatcaagaccgataagcagcgttctggttattataactattattccagcaaacgctggggcagctccaagagctataacctctgcatcaacagcagtgtcgtaggcatcgacggtgccgtagaaattattaaggaattcgccaaaaagaaacaagaatttcttaagataaacgagaacgcataaaagtataattaaaaccggtgtgtttgaatttctggtgaagaatcagaaaggacgcatcggttttttgcgcctggatgttttgaagatgagattgcgttggggtataaaaacaaaatagttacttaagattttgaatgtagatacatgaagaaaatgatgatgaaagaaagacattcttatataatccgaacggcgctcatggcggcatcgggtattttattgtgcgggattgccgaagcagtgcgcccggaggtggatttatcagtcgatgtgcctgctgataaagttgtgattgcagatggaattttagaccaggagacacaaaatgatacagacgaatccttctgcgaccgtctgatgaagaaaatggtacacccgattcacatggcatcccgatttttaaatggtctgggggcagactcagaagaatatgttccgtcggaaacggagtataacctgatggcgctccggacggaagagagcgctgttgatctgtctgatccattggcggcatttgagtctcttccatggtataaacttgcaaaacgattccggagtatggggacagaagatacctggggcgcgaagatgtacgaagcgcttggaacgcgggatgcacagtggatatcggagatctacgggtggatccagacgacaccgcttacggcttcccagaaaatggggctgccagctgcacaggtactcggcagctatgatccctccaatccagagcataacgcgcaggatccggcgagctgggtagttccaacttggaaaaatatccgtttccagatatgcgacggagacggaaagccgacgtccctggcatccaatgcgaccgatattttgtccatggcaaatgtatatacatacagccttgactggaaaaatacagacctgttcaatacctatatcaatcagctctggaccggttcccaccagtaccacgtgagcattagcaatgtgtattactgtgagggctgtacagaactgccggacgagccggcaacagaggaaacagcagatgacgatgtggagagcggcagtgcagcaggagaggcatcctcggaggctttagatgcccagggcgcaggagacagtcagacagcggcagaagagccgttaacggagagcgaggcggcatccacagcaaataattatgtcaaaccggcacagggaccgggggcttccacacaggagcaggcagccgaatcaaaagcggctgcgtccccgtcagaggcgacgctcagtgcggagagcgctgcggcagttacattaaatgaaaacggaaaatattgcccgggacatgttgatctgaccattaccgttaagacaaccggtctgaaagagaagcataatctgtttgcactcgatggaacgggaaatcaggctgtcgggaactggcagggttggacggaagaaaaacagacagccgcccagacactcgctgctcaggattggcagggaatgtacgggcttgccagttcagagtttgcactcgggaatccgctgacaccggcagaaattgcatcttacctggatttacttccagaggatttatcaccggagcggcgtgccgttatcacatgcgcgctcaattccgttggcaagattccatattattatggaggaaaaccgagtacagcaggactttccggcaatcattttgccagcgtgacaagcccggattacaagggacggattttgtcagggcttgactgttctggatgggtcaactgggtatactggaccgcgcttggcaatagaatgggtgccgccagcacctacgagattgtgcggacaggacgggcgatcaacagcgcagagcttcagccgggcgacttgcttgtccagcttggcggtaattcgcacgttgtaatgtttttaggctggaacgcagacggaaccatactgggcgtacatgaatccggcagtgcaagcaatgtaacggtcggaaaggtccatacggtctggccgtattaccgggcgtttttggattaagagttggatggatgttacctttgttttttggctggagtgtttactggtaaagggcaaaggcggcatccattttgcgtttaggtttatttgtttatttacaaataaagggaaacatggtatgataggggacaaataaaactattcgtgaaagcctactttatcgaatagtttgaaatataaatatgtgtatgcacttaatctgtttgctaaactattcattcgttatatttgaaaggatgttctcatgaaacttcaacgtcttctaagtttaacccgccaggcagttgatgactatcgtctgattcaatccggcgataaaatagctatcggtatttctggcggtaaagacagcctgacacttttatatgctttacaggggcttcgccggttttacccggaaccatttgaactttgtgctattacagttgatctgggctttcaggcgctttctccggaggtttcgaaccggttgtcgccgacgctttcatcggatgcggctgcatttgatttaaaaccggttcaggagctttgtgatgaattaaacgtgccctacacggtcgttccgacggaaatcggcaagattctctttgaaacccgtcaggaatccaatccatgtgcgctctgtgccaagatgcgaaaaggcgctttaaatgaagcggctctgaaacttggctgtaataaaatcgcctatgcacatcaccgcgacgacctgatcgaaaccatgcttttatccctgatttatgagggacgtttctattccttctcgccgaaaaaccatctggacaaaacgggattgactctgatccgcccgctgatgtatgtccaggaagccgatgtgatcggatttaaaaacaaataccatcttccagtctgtaaaaatccatgcccggtagatggaaaaacaaaacgcgagtatgtgaagcaattaacaaagaaactcaaccatgattcaccgggggtaaaagatcgctttttccatgcgattattgatggaaacaatcccggatggccggaacggaccgatcgccatctgaaaaatttgatacattcggacctttcatcatcaccaaaggaggaattgtgatatggctgtactctcctaccacgaacaggaagacatcgaaaatacaaaacgaatccgaggcattctgaaagagctgccaccgttctgtaccgatttcttccgcggcattgaaccacgtacatcggcgcgcactcggcttgcgtatgcctatgatttaaagacattttttgatttcctgaaacaagcaaatccagagcttaaaacaaaggagctgcgtgattttccgctttctattctggatgaaatcaagttgatggatctggaagaatatatggagtatctgaaatgttattcgaccgaaaaacgtgaggatctgatgaatacagagcggggtatcatgcggaaagtctcgacggtcaagagcttttacaactacttttaccggaccgagcggattcagaataaccccgcttctcttctgcagcttcccaagattcatgaaaaagaaattatacgcctcgatgttgacgaggtggcgcgtttcctggatgaggttgaggatggcgaatgtctgaccgaaaaacagaaagcctaccatgcaaagaccaagctgcgagatctggcgatgatgacgcttctgcttggtacggggcttcgtgtatcagaatgtgtcggactgaatatcaacgatgttgatttccgaaacggtggtcttaggattcatcgaaaaggcggaaaggaagtcatcgtatattttggtgccgaggtagaatatgcgcttcaggactatctcagcgagcgtgaacatattgtcccagaggaaggcagcgaagaagcactcttcctctccatgcagcgtaagcgcattaacgtacgcagtgtggaaaaaatggtcaaaaaatacgcacagctcgtcacaccgctaaaaaagatcacgccacataagctccgcagcacctacggcactaatctgtaccgtgaaaccggcgatatttacctcgtcgcggatgttttgggacacagtgatgtcaatacgacgaagaagcattatgcggcgctggaggatgaacggcggcgaagcgcaaggaataaggtgcagctgagagaaaaagagtaaagggcaaaaaaggcaaaaagtaaaaaaatttttaggtaaaaaaggctaatttcgtactttatttccgtgtaaagtgaaaatagtattttgctaaaataaagttcaaaattcatatttgccaagaaaaccgatgacctcgactgcttatagtctatgccatcggttttcctagttcaagcactctcactctgcttcatctgtgtctcaataactttgtctaagttggctgctgtagtttgttcactcatagccttctgcctctaataataaacactgcaaaggtttaaaatatcctgcaacagatcatactccatctttgccttatcattcatttgataatttatcagagcattttgcgagtacatcgcatctacgctttgcgttttcgttgaaaattccatcaaagtatccgggccaatgcccaaactggtaaaaattttattcaaatgcttatcgaatgagcttttactatctatctcgccatttaaaattttatctaaagtaggtcgagaaatttctgcctttttgcagaacgataccttagagaatccattgccactgatgtagtcctttaattttattcctgtcagttttctcatttcaaaaagttcatcaaaacgcactctctatctctcccagtaacaaattgtcaatagttttttaatcacttttcttaaaaaggaaaaaaatagaacgtatagtaaacgctatggtgcgttgacaacgtatagattatttccatacgctctatctctcatttcgtaaacgctccatagcaagtaccttgccagcccaaagtgctgcaacatggttttgcaagcaataatccgcaacgttcgctcctctagtattcacctgtaatctccataccgccatcttctcatctccccgctttcttctttagtgcttatccaccttccgcttcgggaaccatcctttttccactcttttttcctgttctttcagttccttaatgctccaaaag

SEQ ID NO: 11056 - DNA, 63113 bp, Unknown
  gut microbiota DNA sequence
ctgggcacgtatgcgtgaacagtaacagtactcaattttggggattgcctataagcaggagaaaacggtataattggggaagacagttgggtataaggggtacaagtggtggagatgaaaaatattgtgaaaacggaaagaggggctgttgcatgcttgtgagttagtgatttatgggtatcatgataaaacaaaaacaataattggagaacctcattggaattttggaaaatattgttagatgatataaaagaaccggtttcgtaccttcccatgggagtcggagcggcgattatgatgcttttgttattgcggctggttgccggggagaaggcatggaagcgaccgcaggtgtattattattttttattgggtgtatatgaaacggttgtgtggattcaggcgtttttttcgcgggagtcgggttccagaacggggattgactggcagctgtttgagacatggggcagaacctggcagtccagggcatatatggttgagaatgtgattatgtttcttccgcttggagttttgttgccgttggcagaaaggcggtgtgccaaatggtggaaaatgcttttgatcagtatgctgttgtcgatgatgatcgaggggatgcagcttgtgacagaaagaggatattgccagctggacgatgtagttatgaatacattgggcggttgtctgggatatggggggatgcggataatcgatgcggtgcatcgccgtttgcatcattcatagagggctgcggtatttgtttcaaggttatggcaaattcatatctttggggaaggcaatacgagaacaacagcagtgttcttcatcaaatatttgcctgataccatttaaggcgaaagcgtggctggatttaaaagaacgcaagttgaatggagatcaggttgacagcaaaaatataaagaaacataaaaacgatgagttccgattagcactattaatcacagccaatgggctgcacactcagcgcaagaagtattgagaatttgctggcagtcggctataatgagatcgagaacatatgcgtgcagagggggcgatgaatagtcatcgactgtgtgcataaataggattcattttgggggttttatgggggctgaaagcaaaacgaggatgacagagggaagtatctctaagaagattattttatttgccataccattgtttctggggaatctgtttcagcagctgtataatacagcggattccctgattgtaggtaattatcttggcagcaatgcgctggcagcagtcagttcgtcgggaaacctgattttcctgatggtaggttttattaacggtattgccatgggagccggtgtggtaattgccaggtattatggggcgaaaaacaaggattatctccagcgggcgattcatacaaccacagccttcggtctggtggccggaatcacactgacggctgcgggaatgtatctggcaccgaagattctggtactgatgggaacaccggcagatgtacttccggaatcgattgtatattttcaaacctattttgcaggttctctgggtgtagtcatgtacaatattttcgtgggaatcctgcagtcggtgggggacggccgccatccgctgatctatctgattatttcctcctgtgtgaatgtggtgctggatatcttctttatcgcaggacttggcatgggagtgggatcggcagccctggcaacggctatatcccagtttgtcagcgcgattctttgtatggtgcatctgatgcgggtgaaggaagattaccggctggagcttaggaagattcgttttgacagacatatgctgaggcagattattcagaatggtgtaccttccggtttccagaactcagtcattgccatagccaacgtgtttgtacagtccaacatcaatgcattcggtaaaatggccatggcaggctgcggagcttattctaaggtagaaggttttgccttcctgccggtgacctgctttactatggcgataactacctttgtgggacagaatcttggggcaaagcagtatgacagagcaaagaaaggtgcgaagttcggtatcctctgctccatctccattgcagaactgattggtatcaccatatatacgacggcaccggtgctgattgcagcattcaaccgagatccggatgtggtacattatggggtgatgcaggccagaaccattgcgttgttttattgtttattggcatttactcactgtatcgcggctgtactccggggttccggcaatgctgccgtgcccatgatcgttctgctctgtgtatggtgtctgttccgtgtcagctacatcacactggcagtgcgtctgattccggatatccgggtcatattctgggcatacccactgacctggagcatcagctccgtgattttcctgtttttgtttttaaggggaaattgggtgcatggatttgagaaaaaagtgacagggagggaaccagattaatgaattatgcagaatgtttagaactggcaagaggaaaaatgggcaattactgtaaggcctgtccggaatgcaacggaagagcctgcaagaatcagatgccgggtccgggagccaaaggaatcggagatacggcgattcggaattatgacaaatggaaggaaatccgcgtccagatggatacactggtggagaaacgtcccatcgatacatctctttcgttgtttggaaagaattttcagtatccgttttttgcaggtccggtgggagccgtgaatatgcattacggcgattcactgaatgatgtttcttacaatgatatattagtttcttcctgcgcagagtttggaattgctgcttttacaggagacggaatggacagcaatgtgatggtggctgccacggaagccatcaaaaaggcagggggactgggaattcctacagtgaagccatggaatgtggagatgattcgtgaaaagatggcgcttgtcaaggatgcaggtgctttcgcggctgccatggatattgatgcggcaggtcttccatttttgaaaaatttcaatccgccggccggaagtaaatcagtggaggaacttcgtgagatcgtgaaggcagcaggagtaccttttattgtaaaaggaattatgacggtaaaaggagctttgaaggctaaagaggccggtgcagcagctatcgtggtatctaaccatggaggaagagtcctggaccagtgtccggcaacggcagaggttctggaagaaatagcaaaggcagtggacggttccatgaaaatcttcgtggatggcggaatccgttccggtaccgatgtatttaaggcattggcactgggggcagatgcggttatcatagccagacctttcgtcacagctgtctatggcggaggccgagaaggggtcgaagcttatattcagaagatcggaagtgagtttgcagataccatggctatgtgcggagtatcttcccttgctgaaatcacccgcgactgtgtgagagtgtaaaaaagtaaactatcaaatatagcaaaaattagtagaaagggtgagtgatatgcgttttaatcgtgtatttgtaatcgtactggattcccttggaatcgggcccatggcggattcagccagatttgatgataccggtgcggatacgctggggcacatctcagaaacagtggaacatctggatattccgaatctgcagagattgggacttgccaatctcaaggcccttaagcaggttaagccggcagaacatccggaaggatatttcatggcgatgaatgaggcgagcaatggtaaggataccatgaccggtcattgggagatgatgggcattcggacagataagccatttatcacatttacagagcatggctttcccaaggaactgattgacgaactggaaaagcgctgcggcagaaagataatcggcaataaggcagccagcggaacggagattctggaggagctgggtgaacaggaagtgaatgaaggaaagctgattgtctatacatcagcggattctgtgcttcagatctgtggcaatgaggaaaccatgggacttgagaccttgtatcattactgtgagattgccagagaactgactatgcgggatgagtggagagttggccgtgttatcgcaagaccctatgtgggcaaaaagcgcggcgaattcaaacggacaagtaatcgccatgattatgctttgaaacccaccggaccgacggcgctgaatgccctgaaggatgccggatatgatgtgatttctgttggaaagattaacgatatctttgtgggagaagggataacagaaagcaatcattccgacagcagcgtgcatggcatgcagcagaccatcgatatcgcaaagcgggatttcaagggactttgctttaccaatctggtagattttgatgcgttatggggacatcgcagaaatccagtgggatacggggaagagatcgaaaaatttgataaaaagctgggagagcttctgccgctgctccgtgaggatgatctgctgattctgacggcggatcatggaaatgatccaacctacaagggaacggatcatacgagagagcaggtcccgtttattgcgtattcaccatcggatacggaaagtgggaagcttgataccagtgacacctttgctgtcatcggtgcgactattgcggacaatttcggtgtcaagatgccggagggaaccatcggaacttctattctggatcagataaaataaatgacattggacttgaagttaaaaacagaaaggcggcgattatatggttgattatacagaaggaacgggaaaacagtaccacacaggaatcggtccggaggatatcggcggatatgtcatcatgccgggggaccccaagcgatgcaagaagatagcagaacattttgaaaatccggtgttagttgcggataatcgtgaatataccacatatacgggaaccatcgatggggtaaaagtcagtgtgacgtcaaccggcatcggtggtccgtcagcggctatcgctatcgaggagttatccaagtgcggagcccatacttttctgcgtgtgggcacctgtggcggtatgcaggaggatgtacttggcggagatatcgtagttgcaagcggagctatccgcatggaaggaaccagcagagagtacgctcccattgagtacccggctgttccccatgtggatgttatgaatgccatgatccgtgcagcgaagaatctgaagttccgctgtcatgcgggcgttgtacagtcgaaggattccttctttggacagcatgagccggaggtgatgccggtcagctacgagcttgaaaataagtggcaggcgtggcttcggatgggatgcctggcatcggagatggagtcagcagcattgtttatcgcaggcagcttccttcgggtgcgtgtaggtgcctgcttcctggttctggctaatcaggagcgtgcgaaaaaaggcctgtccaatgaacaggcccatgatacagaggcagcaatccggacagcggtggaagccatccgtatcttgattcaggaggatgcgaagaatgaataatgagaggatagaaacactcatcgaggaagcattcgcagcacggaaaatggcctatacaccctattctcattttcaggtgggggcggctctgctgactgaaaaaggcgggatttactgtggctgcaatattgaaaatgcggcctatacaccgacaaactgcgcggaacgcactgccttttttaaggcagtcagtgagggtgaacgcagcttcacagcgattgcagttgtgggaggcccggaaggagcttcggaatttgactggtgtgcgccctgtggcgtgtgtcgtcaggtgatgaaggaattctgccaggatgatagatttcagatcattctggcacgttccgtgaaggaatataaggtctatacactggcggagcttctgccaatgggattcggaccggataatttgcagtaggaatgccgattgcctcataaagctggtatgcaggtgtcaaagacccgcgcactgtaatcttacagtttcattaatataacttaatatattggaacaccttttgacattgcaaaaaaaacagggtacactgtatgacaggcggggatggattcaccatttccgcctgtattcagaagaaaaagcggacgcaggtccgatgaaaaatagaaaaagtgtggggagtttggacggatggctcagaaagagtggaaacgggaagaaatgaaacagaatcagggaagaacagagcagaaccagagaaaaaaggttcagaaaaagacagggtatagggcagtgctggcggcctcgatgtttttgattgctgcttcggcagccctgtcagcgtgccaaaaatcaccggcggctgagacaacagcgcagacacaggcggcagaggaaacggagggcgcggtcagcacggcgctcggagcggcggatcgggtgctggaggagaatggcatgctgtacctcaaataccgcacggagatccgttccctttcgaaggagacaggcgagatgaagacgctctgccagtttgacacgggagatgaaaacagcaccttctgggtctacggaggcgggctgtattttgatcggatacaggcggagagtggcagcacacagggcacggagctttatgggctgtaccggctggatttggagagcggtgtggaagagcatttagcggatctgacggatcagccgtcggtgctctatgcgtcaaagaaccgcctgtatgtcaagggttacaacatgaatgtcatttatacgctcgatgagaatggcaaaacagcgggagagttgtcaccgtcagacacgatctacggggagattccggcaggctgcagcgagctgtttaatgggattcttccatattatacggaacagtttgggtatatgccggtgcagaatgaaacctgcctggtgattgcggatgtggacggcagccatccgagggagatttcggatattacgaatacatcgtcggtgctgtttgcgaaggacgcattttttgccctgcttcgggatggcaatggaaatacgcagtgttaccgctatgaggtctctgacccggagaaacggacgcttttatatgagacggcggaaaatatcagcctggtgcagtatcaggacggatatttgtacctgatggaaaatcaggcgtcccagatcagcacgggaaagtattcgtttaagcggattgcggcggatgctaaggcagatgcagcggcaaatgccgccgaggcgcagaatgcgctttttacggtcgaggaagagccgggcatgacgaatgatttttctatgtatggtaatttttatgtgacgggaaatcaggcatactgccagcagtttaaggattacggcgtttatctgggcgaaaaaacgctggatgatgcggcaggcggggaagtgacgttgttagagccggttctgttccagtctccgatccgggagctggggcatgtcgaggcgcagtcggagacgttaaagagtgcggatggaagccgggagctgggaagtgtgtacgcagaacggctggtatttgacggagagggcgatgcggtcgaggcgatgaaccagacgatgcaggagctgcaggcgtcggttctgtcggcggcgcggacggattccatgaatcttgatacggagatgagcattgatacagcggaaacggacggatcggaggaagaggtacttccgcaggaggcggatgcagcgcagccgatctattcgatggctcttacgatcgacggagatgacgcgattacgtatctggatgatcattatgtctgcgtccgtgcggatggatacgaatatacgggcggcgcacacggaacgccgttccgccagtattttgtctttgaccgggaaacgggggcacgcctgtctttgagcgatgtggttgagaatccggtggaggagctgcaggcgaaggttggtgcggcattccgggagctggcggaaaagacaaattttgcctttgaatcaccggaggatctggaacatacggtggcagacggcatcagctacgaatcgccgttttatctgagcgagacgggcgtggttttctattatgcgccgtatgagattgcatcgtatgcggaaggattcccggaggtaacaattccgtacagcgagttagaaatgcggattgaacttagcaagtaggaattttctgaactgaaaattccgtacgaagtattgaaggcagcagattttgccgatttggaatgcgaagcatcggcaaaatccagttgcagtttgcacaaagtgtgaactgcaacaaatgcggattgcccttaagtagagagcttgaagttgaggaaaaaatcgcttataatactccatagaaaaatagtgtcgaacgaatctgaaagaatggcacaggatgaggaggaagcagcatgaagacagttgttaaggaaaatgcgaacggcggtaaaggacaggtagttgtaaaatacattctggatgacaatgagttaaatgcaaaatgtaagatgtttgccgaggtaacgatcgcaccgggatgttctctgggctatcatgagcaccacggcgagagcgagacgtattatatcatcaagggacagggcgagtacgatgataatggaacgaaacgtccggttaccgtcggcgataagaccttcacgccggatggctgtggtcatggcattgccaataccggagatgaagatctggtctttatggcattgatccagctggattaagagtgaagaacaaaacagaaaaaggtaacggttcacagtaaccaaaaaaggcgctggcacgggaagtggttcgatgtgtcggcgctttttgccatatatgtccggaaaatgtctatatgtttaagcggaaaaaattggaaatcaaaaaaaacagtggatcaaagaaagaaaaaggaggtgtgcctgcgtgaaactatttcatctttctgatctgcatatcgggaaaatgttaaatggctatagcctgcgcgagagccagaagaatgcgtttttgcagatacttaaatatgcggaggaagagaagccggatgcgattctgatatgcggagatatttatgataaatcggtcccggcgggggaagcgtatacgctttttgactggtttctgaccgagctatccgggcgctgtccggggacggagatcctgatcattgcgggaaatcacgattcaccggagcggctggcgtatggcgcatcgtttctggcacgccaccggatccatatcgcggcgctgtcgccggcagatcggacggagtatttaaagcaggtcacacttacagatgagtggggaccggttcatttttatctggtaccgtttatccgtccgggtcatgtgcgccatttgtttgacaccaatggttataccgatgcattccagaaactcctagcgcgggagacgatccggaagcaggagcgcaatgtggttctggcgcaccagttttttgtctggaacggtcagaatccggaaacctgcgattcggagacggcggtgctgacctccggcggattggatgcgatcgatgcgtcggtgctggaaccgtttgaatatgcggcgttagggcatatccatggggcacagaaggtagggcaggagcggttttgctattgtgggacgccgtacaaatattcgatcagtgaagaacaccatcagaaggggatcacggtggtggaactgggagaaaaaggaagtgagcctcagatccgccgtctgccgattctctgccatcccgatgtaaagcgcgtgcgggggacactggaagaactcaagctgctttcagatacgatggaaaagatgccggatggaagcggacgcgcggacgcgtatgtgagcgtggtcctgacggacgaaaaagaaatgtacgatttccgggagcgcctggaggagttatttgcgcatattttggagatccgggtggacaatgagaggacgcggaaacgactggaggaagaaccggaggaaacaggggcggtgacgccgtttcaggcatttgcctctttttatgaggcggtgcgccactgcccgatgacagaggaacaggagacgattctggcgcgcatggtggaagaggcagaggaggaggaacgcatatgaaaccgaagctgcttacaatgtcggcgtttggctcttatgggggcgtgacgcagattgatttcgaacgggcggggacgggattgttcctgatcacgggcgatacgggggcaggcaaaacgacgatctttgacgcgatctcgtttgcgctctacggggcggcgagcggcgtcgggagagagggcgcgatgcttcgcagccagtatgcaccggaggacgcggagacctgggtggaactgacgtttgaggataaggggcaggattatacgatccgccgcagtccggcatacacgcgcctcagcaagcggaaaaataaggacggcgcatacacggcgacgagtgtggcgccgaaagcgtctctgcttttgccggatggaagtgagatgtccggccggatccgtgagatcgatgagaagatccgggcgatcgtgggcgtggaccgcgatcagttttcgcagatcgcgatgatcgcgcagggcgaatacatccgtctgctccatgcatcctccaaagaaagaaaagagatattttcgcgcattttccataccgggatctacggtagaatccagcagaagctgcgggaggcagatcggacgctgtatggaaggctggaggataacaagacccggtgcgaggaagtcatccggcaggtgacggttcccaggacggaggaggcggtagcttcggagtggaaagaaagatggcagtctttgaaagagcggtaccggacaaatggagcggaactgcttgcatttctgcatcatttgtcggaggaaagccggaggctcgaggaagagacggggagactggaagagaatgcaatccagaagcttgctgccggacagaaccatctggagcttgtgaaaaaggaaaaacgggtactggaagaaaagagccgtttggaagcatttggacgggagatggaggctaggcgccgggaagctgccgcagcctatgagagccggaaaccggagctggaggatcagatccggcggatgcaggatgcgcttccgctctatgcggagcaggagaaaaaacggcaggcatatgaaactttggaacatcagcggacggctctgacccaaaacctgaaaaaaatgcagaatcagctggaaacgtgccgtacacaggaagaaatacttcgaaaccaggagcgggaggcggtagaggcgcgcgctgccctggcagaatgccggggacggcgggagcagatggaacggcgccaggcggttttgcaggagttagggaaatgctgtgaagcggagcggacatggagaaagtcactggaaaaacgccaggaaaaatttcaggcagccgcgcgggcgtaccagcagtcagatcagttgtatcaggacgcgtcctgccgctttctggcgatgcaggcgggacttctggcggcagagctgcaggaaggaaaaccgtgcccggtctgtggctcgctggaacacccggctccctgccgtctggagacagagccgatccgggaggaacaggtggaagcgctgcgtgccgggcgggatgatgccgatcagaagcagaggacagccgctgaggcgtgccaggaggcgcagatctcgctggaacatgagagcagacggcggatagagatccagggaaaactgtacggccaaaatcaggacagcccggcagcccagccggatgtggatgctctggagaaggagctccggcagatggcacaggaaatccggcgatgcaggcaggcggaaaccacttatactgaccggattgccatggaagaaacgatccggcagaaacgggaggcgaacggagccggacagaagaagctggaagctgcgctggagcttaaaagaagtgaggtgcagcaggcggcgatcgagagccagacgagacgtaatgagctggaggaactctcgaagcggctggagtggaaagacagccggacactccgggtggagcttgagaagcgcagccgggagctggaaacacttgcagaggcggtgacagcggctgataagaaagcacaggagtgccgggaaaaatgccgggagctggagggaagcttatcttcgctccgggaacatatggaagcagattcggaaacagatccggaagaaaaaatccagcaggcgatccggcactgggaagaggaaaaaacgcgctggtcgcggcttcaccgggaacatatgtcggtgcggacgcgcaacgaggatgcatatgcggcacttcgggtgtatctgcaggaacgggagcagcttgaccgggaaaaacagcagatcagcgagctttaccagacggcggacggaaaactgagcggcgcggcgcggatcgatttccagacgtatgtacagcgccagtatttccgccagatgatacaggcagctaaccgccgcctgcgccggatgacgaaaggaacctttgaacttcaatgccgcggtctggctgatctgggaaaacagggagaagtgggacttgacctggatgtctatagctttgtgactgaccgggtccgggacgtcaaaacgctgtccggtggagaatcctttctggcggcgcttgcgatggcgctcggcatggcggatgtcatccagaatgcggcaggcagcgtgaaggtggatgcgatgttcattgatgagggattcggttccctggatgaggaatcacggacgcgggcggttcaggtgctgcaggagctgtccggaggaagacgcttgatcggcatcatttcccacgtgacggagctgaaagaggagatgggacacaagctggtggtaaaaaaaggaaatggtggaagccaggtgcattgggagatagaagattagtaggacggcgcagagccgttgtgtgacgaaagaaaagaggctatttacatatgacaatcgtaattccagggatggtgacgatatcgctcttatctctgttttactgcagtatgctgccggagacggggcggaaggcgagaatgcaggcatttgagcggcaatacatcgcccaccggggatttcatgacaaccggagtgaatgtccggaaaattcgctcccggcgtttgagcgcgcgatccagatgggatatgggatcgagctggatgtacagctgacaaaagatggggttccggtcgtatttcacgactgggatctgaagcgggcggcgggcgttgaccggaagatacgcgactgtacctttgaagagctgcaaagctatcgtttgtttggttcatcccagacgataccagcctttgagacagtgcttgaactggcggatggacgcacaccgcttatcatcgagctgaaagcggagattgtccatcgggagctgtgcgagaaatgtgcggcgcttttagaccgttatccgggtgagtactgcatcgaatcgttcagtccgctggcactcggctggtttaagcgccatcgtccaaatgttttgcgcggacagcttgcgaccaatcaccgcggcgagggattgaaaacgccggtcattgtgcgggagatgcttacatactgtatgctgaacggattttgcagaccggatttcattgcgtacaactgccagttcagcaacacgcttccggtggaaatgctgcgttatttctacaaatgtaagatggcggcatggacgattaaaaaccagggcgaattaaaccggcaccggaaacagtttgatgtttttatttttgacagtttcgagccggatcaattcgtaaatttcaacaaaaaacatcctaaaagatagtgagaaagtcctaaattatgctggaaaagttgattttctatgaaaatctgctataatggctaggacaatttaataatgagagattattacgaattcgagaggacaaagatatgaaaaagaaacagcttctttcaggcgtaatggcacttttgttatctgcttcactctgtgcatgcggaggcagcaagacagcagaaggtacctcagaagcagctggcgagtccagcgaagcagagaccagtaatactctttcagaaggaacaccagtaccaggcggcagcgttgtgtatggcatgacgcaggacctggctagtcttgacccccatgtagatacggacgcaggaactagagacgtggttttcaatttgtacgaagggcttgtaaagcctacttccgatggcggatttattccggctgttgccagcgattacaccatttccgatgatgcaaagacttatactttcacattgagagatggcatcacattccatgacggcacaccggttaccatcgaagatgtcaaatattccatcgatcgttatgcggagattcagggcgaatcctccgctttttcttcgcttgtagatagtgtagaggtgcaggatgacaagacactggttgtaaacctgaaagaaagttattcagagtttcttccgatgatgacaattgccatcattccgcagtccaacgaggacccggcaggcaatccgatcggtaccggtccattcaaatatgtttcctacacaccgggacagaacctggagctggaaaaatatgacggctactggcaggagggcgttccgagcctggacagcgtggaatttaaatttattgccgatgtggacaccgcatttgtagagttgcaggcaggcaccatcgacattctgaaatatttaaccgccgcacaggcggagacactgggcgatgaagattacaacatcgtacagggaagcatgaacctcgtccatgcgatgtacttaaacagcgcttacgagccgctttccaagccagaggtgcgtcaggcactctgctatgcggtagaccgcgatgcgatcaacaactttattttcggcggaaagagccacatcatcggctcccatatgatcccggcaatgtcgaaatactatgagccggaagcagagaccgtatacagctacgatccggagaaggcaaaagagcttctggcagatgccggatacgcagatggctttgatctggaaatcaccgttccgagctcatacagccagcacgtagacagcgcgcagatcatcgcggatgagctgtctcaggtcggcatcaacgtgaccttaaatcaggttgagtggagcacctggctgcaggatgtatacaagggaggcaacttccaggcgaccgtcatcggttttgacggaacgctggcaccgagcgactggctcaagaaatatgtgacagacgatgtgaagaacttcatgcattactccaacactgagtacgacgatgtatttaatacagcatacacaaccgttgatgacgatgtaaaagtagaaaactacaagaaggcgcagatgatcctggcagaggatgcggcagccgtttacatcgaagatccggcgaacctcgtagcagtcagcaagaagtttggcggctacaccttctacccgacggcagcagaggatatgtccctgttatatcaggtagagcagtaaaatgtacagttacaatccagcaaattcctgttgctaccacgttttcttacggcactttcggttccagaagtgcctgcccgtgaacagtaaccaggaaataacaacagaataagaagcggtaaacgcaggagggaattatgaaattctttataaaaaaactgataactctcattatcacattgttggtcatatccttcctgacgtttaccgctttttctgtgattccgggcgatgcggcactttccaggctgggaaaggacgcgacggaagagcagttagagcgggcgcgggatgagatgggattaaatgatccacttctggagcggtatggaagatgggtgaccaatgcgatgcagggggatttcggggagtcctaccggtatgagggaacctcagtccgctcccttctggcacagcggcttccggtcacggtgcttctggcagtcatttccctgctcatcatcacggtgatttcagttccgctcggaatcctgagtgcccggtttgccgggaaatgggtcgatacgctgacgaactgcctgacgcagattctgatggcggtgccgtcattctttctcggcatgatcctgacctacgtgtttggactgattcttcatatgttccagccgggtaaatttatcgaaccgtcggaaaatttcggaaagtctgcacagtaccttttatttccggcgctcgcggtggcgctgccgaagattgcgatggtggtgaaattcctgcgaagctcgattctgaccgagatgaaccgggaatatgtgcggactgcctacagccgcggcaatacggaaacggcggtattgtacgggcatgtgctgaaaaatgcgatgattccggttgtgacgttctttgcgatggtaatcgcggagatccttgccggcagcatcgtggcggagcaggtgttcagcgtgccgggaatcggaagacttctgatcagctcgatctccaaccgcgattatccggttgtgcaggcgatcgtgctgtatatcacatcggtggtcgtacttatcaattttgcggttgatatgatttatcaggttttggatccgagagtccggacgacggaagaatagagggaagacgaatgaaacgaaagaattataatctgatgatagggggcgcgatcacgctgttctttctggcagttgccctgatcggacagttctggacgccgtatgggacgacgacgatggactccatggcagtcaatctggcgccgtgtgcagcacacccgctgggaacggataacttcgggcgcgatattttgagccgtgtgatggcgggaagcggcagcaccttttttgtggcagtctgcacggttttgatcgggtgtgtgtttggcacgatcgtcggtgcgctgaccggctatttcggcggctttttcgataacctgatcatgcgtttcaatgatatccttttatcgtttccgagcattcttctggcgcttatcttcatcagcctgacgaagccgggaagctacaacatcattctggcgctgggaatcctttttatcccgagttttgcccggatcgtccgcagtgaggtgatccggtgccgggaactggattttgtcaagagtgcgcggatccttggcgcagggcatatccggattattttcgcccatattctgccgaatgcggcggtcagccttttgacggcggcggcgatcggatttaacaatgcggtgctggcggaggcgagtatgagttatctgggactgggaatccagccgccggagccgagtctcgggagaatgctttacgaagcgcagtcgtacctgttcaatgcgccgtggtacgcgatcggaccgggcgtgacgatcatcctgattattctgggattcagcatggtgagcgaggggctgcgctcgatgcagcagtaaggaggcgaaaagatggaaccattggttgagataaaaaatctgtcgatccgttttccagaaggaaattcgacctttgaggcagtcaagggcatcagcttttcgatcggaaaaggcgagatcgtcggagtagtcggcgagtcagggtcaggaaaatccatgagtgcgcttgcactgatggggctgcttccgaaggacgccgagattgcctccggatcgctctgttttcagggagaagatctggtgaccatgaaaccggaaaagcggagacagctatgcggcagcaaaatggcgatggtctttcaggagccgatgacctccttaaatccggtattgaaaatcgaacggcaggtcggggaaagcctgcggatccatacgaaactcggaaatgctgagatccatgaacgggtcgtgcaggcactctcagaagtcggtctgccggacccggaggggctgtgcggtaaatacccgcatgaactttccggcggcatgcgccagcgtgtgatgatcgcgcaggcgatgatcaattctccgagtcttctgattgcggatgagccgacgacagcgttagactgtgtcgttcaggcacagatcctggagcttctgcggaatatccaccggaccaagggaacgtcgattctctttatttcccatgatctgaatgttgtgcgtgcgctctgcagccgtgtgatcgtggtttataagggcgagatcgtggaagaagggcagacggaagacgtccttctgcatccgaagcatgaatatacgcgccatctggtggcgtcgattccggagggagaaaaaggggaaagctccggcggggagatcctgcgcctgacggatttgaacgtattttacgatgtgcgtggcggtctgttccgcaaaaaaggaaaaaaacacgtaattcacgatctgaacctgtcggcaagagagggagagattgtggggatcgtgggcgagagcggctgcggcaaatcgacgctcagcaagacgatcctgggacttcacgacaattatacgggtgaggtgaaggtgcgtgacggcgtccgtccgcagatggtatttcaggatccggcgggatcgctcaacccggcgcggacgatcggatggattctggaagaaccgctgcgcctgcgcggcatcagggaccgcgcagagcgcaggcagctagtgaaagaaatgcttgaaaatgtcggactggacgagtcctttgcggcgcgccatccgagagagctttctggcggtcagaaacagcgcatcagcatcggcgtggccctcctcatggatccgcgcctggtgatcgcggatgagcctgtttcggcgcttgatgtgacggtccagtcccagattttgaacctgcttttgaagctgcacgccgaaaagcagatgaccatcctctttatttcccacgatctgaacgtcgtgcgcgggctctgcagccgtgtcatggtcatttacaagggtgtgattgtggaagaaggtctggcagaagagatctatgagcatccggcgcacccgtacacgaaacttctgctggaagcggcgatcggcggggatacaatggaactggatgcggaggcaggaaagcagagtgcggagccggagagagacagccggatggaaaaacctgagcggggacagacgaaagagaaccttttggaaaatcaggaaaaagagcggtccgtccagaatgcaccaaagaagatagcgggcagtggggagaagtgtatcttttatgagcgatgtccgaagagaagagagacgtgtgcccatgtgccgctgtcaccggaggcagtacaactttcaaggacacactgggcgcggtgtattcagatagaagcataatctgataagctgaaatagagaaaaacgaaatagcagccgaaaaaagacagacggttcggcctatgccagggaaagcggcatggctcgaatcgtctgtcaatgttttttcctgcggtgggaaatcaaagtgcgcggctgctcactggaagaatcctgctgcccctgctgtgcctcaccggaaagctgcagcggctcccggcggtgccggagtgaatggtaaaaaagccagatcagatccaccagggcgatcagaaacgcacatccggctaatagatgaaatacctcatgcgtcagagcgggatacggcagagcggatatgatataaggagaagtcatgttccgcagggagctcaccgtccaggagagactgtccgccatcgtctggagaagcgattcataggtatcctcgttcaggcggatcaaacgcccgtttaatgaaagtgctttgcgttcgggcggctctggatagccggaagacggatcgagcagatagaaatggcaggttccattttccagagagtaataataatatccggtctctttctttccatcgtaggcagcgcaccctgtataatataaggaaggagcgttcaccgagacatagggctgagccgggttataaaaatcttcaaacttgcactggctgtttatcggccgcggggagtgtgaattttccccggcattctgccacaggagcaggatggacgcgatcagcaccagcgccggaagccacatctgccggcggtaaaaacggcggcttttgatgggggaatgtttttgtttttcagtcaaatttttcatacgctctagtatagtcagttctgcgtggaacgtcaagagttagtgtatacgacaaaatcctgctgccaccacgttttcttacggcactttcggttccaaaagtgcctacctgtgaacaattactccattcctagtcatttgcgtgtgctttttcaattattcttgcaaacagggcgaaaaattgctatgatgggagtgctggcatcggaaggagattgtgcagtaggggaaagctttcggtgcatggcagtcatttttgcatcggcaatatagaaggagaggctaaatggacgcttacacgagttttgcggaagtatatgatatgtttatggataatattccctatgaggactggtgcgggtacctgacttctcttttaaaggaatatgggatcaacgatggtctggtgctggatctgggatgcggaaccggcacgctgacggagcttctggcaaaggaaggctatgatatgatcggcgtggatgtctcggaggatatgctgcaggaagcaatcgaaaaacgggcagaatccgggctgccaattttgtatttattgcaggatatgcgtgaatttgaattgtacgggacggtccgggcggtcgtgagtatctgcgattcgctgaattatattctggattatgacgatctggcgcacgtattttcgctggtcaacaattatctggatccgaagggaatgttcattttcgacctgaacacggaggcaaagtttcaggcaatgggaagtgagacgatcgcggaggtgcgcgacgaggggagcttcatctgggaaaatgagtatgatgaagaggagaaaattaactcctacgatctgacgctctttatccgcgaggaggatgacttataccgccgctatcaggagacgcattttgagcgcgcgtggtcgttggacgagataaaaaaggcgctcacagaggcgggcatggaatttgtggcggcgtatgacgcatttacgaagaatgcgccgcgaaaagagagcgaccgaatctatgtggttgcgagagaacatggaaaagaggtataaatgatggaaaagataaaagcaggtgaaataacgggacagaccggagattatatgctccgtgcgacggcggcgaatggtcagatccgcgcatttgcggcgacttcccgtgatctggtggagaaagccagacaggcgcacaataccagcccggtggcgaccgcagcgctgggacgcctgatgacggcaggggtcatgatgggatcgatgatgaaagcggacagtgatcttttaaccatccgggtcgagggcgatggtccgatcggcggtctgacggtgacagctgataagaacggcaatgtcaagggctacgcgttccacccggaggtaatgctgccgccgaatgcgaagggcaagctggatgtgggcggtgcgctgggagtcggcgtcttgagcgtaatccaggatatcggtttgaaagagccgtatgtgggacagacgatcctggtaacgggtgagattgcggaagatctgacttattactatgcgacctccgagcagactccgtcctccgtggcactgggtgttctgatgaataaagaaaatacggtgcgccaggcaggcggatttatcatccagcttcttccgggagcagaggaggcgacgatcgcggcacttgaaaagacgatcggtgagctggagccggtgacgacgatgttaaataagggaatgaccccggaggacattctggagctgattttaggacaatttggtctggagattctggataagatgccgattcagtttacctgcaactgcaccaagagccgtgtagaaaaggcgctgatcagcatcggcggcaaggagctgcaggagatgatcgacgagggcaagagcatcgaagtcaactgccagttctgcaacaagcactatgaatttagtgtggatgagctgaaaaaattgtacgagaaagctaagaagtaaaaagaaatgagataatagatatggctgctgtgcggaaaaaggatatttggatatgttccgcatggcaggacagaaaaaaaggtcactgttcacacatgtgtgagcagtgacgaaaaaagggatactgccgaagcggtatccctttttataatcactttacttagatcaatataacgtattcgcaaaatatatatcaaacatatttggaaaacaggtacactggaaagttgatgattaaagcttggttacgttagtagcctgcggtcccttagcaccgttaacaacttcgaactctacctgagcgccttcctcaagagacttgaagccttccatgttcagtccggagtagtgaacgaatacatcgttgccctgctcgtcgcagataaatccgtaacctttctggttgttgaaccactttacagtacctctgttcatatgatacctccaaaaaaatataaaaaatagtgatggtcgcatggatttacgacctgttccaagaatagcatagtttcatattgatgtcaaacgttttcgcataaaatttctggaaattcagacatttaaaaatagttaaatttttgtggaaaataagggcatttgttactgtacacacatgtgtcccagtaacgggtattttccagaaagccgcgaaagaaagtggggttgtcaaaccagaatacggggggtaaaataggaggaaagaaaaggggaaagaggtaggaaaatgaattatatttacaatgcgtatcatcattttttgacgatcacgaaacataaatgcgaggtcatgaaaaactgctttgcggtagggctgtaccgccagggacttctgcacgacctctccaagtattcctgggaggaatttgcgaccggcgttaaatattatcagggaaaccgcagcccaaatgcggcggaaaaagaagaaaagggctattcggcggcatggctgcaccacaagggacgtaacaaacatcatttcgaatactggatcgattttgcaccggacaagtcctgggggcttgtcggcaataaaatgccccttcgctacctgatcgagatggtaatggatcggattgccgcgtcgaaggtttataagggaaaagattacacggatgcgtgtgcgtgggaatactttgaaagaggcagagattttgtcgtgatgcacccgaggacgaagtaccagctggaatatctcctcacgatgctgaaagagcagggcgaggagagaacctttgcgttcatccgggcgctgcttgcgcgggagagggcgaaagaacaggcagtccggagaaaacggatgggacacgtgatccgggagataagagagcgtggacgggtgctgtaatttataaggacaattctctcagataattatgtaagtacagcactgccgtctctggatctgtgaaaagctgttctgaatacggcacaaacagctgcttactcttatagtctgctttcaggcattcatgccacatcggagtgccatctgcaagaagcggctgcggcacaaacagcccggctgcgcgggtgtagcacgttttggcggttgccttcttgcgggcggagcgatccacatactgaccgacacttttgtggatggcgcagtcctcgtagatcatatagtaataattctcataatcgttgtaaaatcgtttcagctccccggaatataatggaaggtcgagcgtcaggcggtttccttccgccgacagctccagatcaccgatggaaaactggaatccgcttgtcagagagaagggactttcatagtgaagcagcaggtgcttttctgagtttccgtccgcatatgggatatcacggctttctgaacctttgaaagaaaaatcgccggtcagaaagtccgggtaggcgagaatcggcagaatctgcggcattccctttaagtcatcctcgttatggagaatcagaaggtgcttcagcagttcagagtgcgtctgtaaatattcaccgtaaacctcgatgagctgaccgccgttgtacttatcttcgcgggcaatgccgaggaactgctcgatgcttttctgtttcagattttcaagtcccagcaatttctttaatgggcgtattttcttataaatatcaaaactttcaactgcttcaaaattccagtcctttttataaaaaacacagcgtttcgtcagaaatggaatgtcaaacccgtcgccgttgaaatggacgaggatgcgctttgtccggagaagtgcaaaaaaagcgtcgagaacctcttcctccgcatccctcgtctcggcaaaatactgggtcagaatccaggtgtttccgtcgtgccagacgcagccgatcagatagaccgaggcgtagtcgccggaaaagccggtcgtctcgatatcgaaaaagagcagatcggagatagctcctaaccgtttgggcggataagaggaagtaaaggtcagcggattttgaatggtgatcatttggcagtatcctcctgtgtcagtttataatgtccgcccctggtccgcattgcgtcggggattggtttcagactgtaacctatggcgttattataaattcatcggaagtgaaaagcaaccgtttaaaaagacaaaacaataacacacccggtatcgtgaaatatccgttctggcagttgagtaaaaagaaaaacaatttgtaaaccttcagtggtacaagtttggcaatctttttaaattccgatatactagaaaatgtcggaagtgacagcgggaaatgtggttgtaccaatatggcaatttgggaatttttggcggaaagactggcagattatgagatcccgcgcaaatttgccttgctaaaggagttttcaaagactgaaagcggaaagattcgtaaaaaagaactgtgaaaattgctttttcttgtcgaaaaaagaaaatgatttattgtgcaaaatgacaaaagcgacgttgacaaaaatggaaaagagtggtatatttacatacagcaatcaaactatttaatgtaacggttgtgaacgtgaccggagagctgctttctgtgggggaaaagcggctctctttttatatatgtttgactttttgtatagtgacagctacaataaattcgtaactgttcagtaccttcacagtcacgtgcaaaaatccatttaaaattgcctacggcaatgggatttttgcctgctggcccatgttttcgtacggtcagcgcagtaaatgcgcagacctactgaacagttgctatgtttttaaaaattatttataagggagacaaaccatatgataagagatggctttatccgggttgccgcgtcaacaccggaagtgaaggtggcagatgtagagtacaaccgggaacaggtttgtgaacagatagaggaggggagcaaaaagggcgcttcgattatggtatttccagagctggtgctgacgggatatacgtgcggtgagctgtttatccagaaatcgctgctggcgaaggcaaaggaagagcttaggaagctgatcgcctttacagctggcgattcaatgcttgtatttgtaggacttccgtgggaatacaacaataaattgtacaatgtggcagcggcgatccaggatggaaaactgctcggtctggttccgaagagatggattccaaactattctgaattttatgagggacgttatttcaacccgggctgggaaaagacaatcgaggtttcctgggacggttatcaggtgccaatgggaatgaagcttttattttcctgtgacaatgtggaaaatctcgtcgtgggggcggagatctgcgaggacgtctgggttttaaatccaccgagtattgcacacgcgtcggcgggggcaacggtgatcgtcaactgttctgccagcgatgaggtgacaggcaagagcgagtaccgcagaagtctgatcagcggtcagtcggcgcggcttctctgtgcgtatatttacgccaatgcgggcgagggagagtcttcccaggatctcgtttttggcggccagaatattatcgctgagaatggcaatatcctgtcggagtcagcgcgatttgagaatcagacgatctacgcagatatcgatttggaacgtctggaatgtgagcgccgccggatgacgacctatcagacagaaggccgtgaggattaccggtttgtaagctttacgctggatcggaaaccgcttgcgctggagcgcgcgatcgatccgaccccgtttgtcccacacgatgcgggcagccggaaccgccgctgcgaggagatcctttcgatccaggcgatgggattgaaaaaacgtctcaaacataccggatgccgccatgctgtcgttggtatttcaggcggtctggattcaacgctggcacttttagtaaccgtgcgcgcctttgatctgctggggattccgcgtgaaaatattctgtctgtgacgatgccgtgctttggtacgactgaccggacgtaccagaatgcctgccagctcacgaaaaagctgggtgcaaccttgaaagaagtcgatatccgagaggcagttactatccatttccgcgacattgagcaggatccgtcggttcatgatgtaacgtatgaaaattcacaggcacgccagaggacgctggttctgatgaaccttgccaataagatcggcggtcttgtcatcggtaccggcgatatgtcggagctggcgcttggctgggcgacctacaacggcgatcatatgtcgatgtacggtgtcaactgctcggttccgaagatgctggtgcgccatctggtgcgctattatgcagatacctgtggcgagaaagagctttctgatattctgctggatgtactggatacgccggtcagcccggagcttctgccgccggaggaggatggaaagatcgcacagaaaacggaggatttggttggtccttatgagctgcatgatttctatctctactacatattaagattcggctaccgtccgggcaagatttaccgcctggcgcgtcaggcatttgacggtgcttatgataaggaaacgatccttaaatggctgaaggtgttctaccgccgtttcttcaaccagcagtttaaacgttcctgcctgccggatggtccgaaggtaggttctgctgcagtatcgccgcgcggcgacctgcgtatgccgagcgatgcgtgcagccgcctgtggctggaggagctggaaacactggatgaggattgcgtttacggagtgccggagacgaaagcggcaggaggcagcctgtgatcgcgagcgcgggcaacgcccgtgtcagagcggtgacggcgcttgcaaagaaagcaaaagcaagacgggaccagggcgtctttttggtggaaggtccgaagatgttcggggaactgccggtggagagacgccgcgaagtctatgtgtcggaaaattttctgcgccagcagggggaaagagcagaaaaactgctggctggctgccggtatgagacggtgacggatgaggtcatgcgccatatgtcggacacccagacaccgcaggggatcctggcggtagcggaacagttttcctatcagctctcagatgtgctgaaaaatagcccggacggaaaggcaccggagcttgtgattctggagacactgcaggatccgggtaatctgggaacaatcctgcgtgccggagagggggcgggtgtgacaggcatcattcttgaccgtggttcagctgatatttacagcccgaaggttatccgttccacgatgggctcgatctaccgggtgccgtttatctacacggacgacctgcatcagacgatcggggaagtaaaaaagcagggaatccgcctctatgcggcgcatttaaaggggaaacataactacgaagaagaaaattatacaggtccgtccggctttctgatcggaaatgaggcaaatggtctgaccgaggagacggcggcgcttgctgacgcgtgggtgaggattccgatggctggaaaagttgaatccctcaatgcagcggtggcggcttcggtgctgctgtttgagacggcacggcagagacggcagtaaattgcattttttgaaacaatgttttaagccggatagtttgtgcaaatagagagctgtgaagaaataaattgaactgcagatcgatatgttccattaagaagtttgtaataaaaccgtaagttcaaaaacagagctgattggttgataaatgtcagaaaatatcgtatactagttttaagatatcagggtcaaaagacctatatggaaggaggggatgacatggcagtatggtgtgtctggctggcggtgtttgtagtgtgtatcgggctggaagcagcgtcgatggcgctgacttcgatctggtttgctggaggcgctctgattgcgtgtgtcctgtcgatcgcgggagtgaatctttacattcagctggcagtgtttgtcgttgtttcattccttcttttgtattcgacaagaccattggcactccggtatatcaatcagaagacggtgcggaccaatgtggacgcgctggtgggtaaaaaagcgcgggtaaccgcagagattgataacgacgaggcgagaggaacggcgatggtgtccggccaggaatggacggcacgctcggcggatggaagccggattccgagggatacgatggtacagattcaggcggtcagcggcgtcaagctgattgtcagcaaatgtaaggaggagtaggaaatatgggagcagttatcagttttcttgtcattgcgattgtggtacttctgattttgtcatcctgtatccggatcgtgccgcaggcacaggcattagtcgtagagcgtctgggtgcttatctggagacatggtcggttggcgtgcatttcaaggtgccgttcattgaccgcgtggcaaaaagagtcattttaaaagagcaggttgtagattttgcaccgcagccggttatcacgaaagataacgttacgatgaagattgatacggttgtatttttccagatcacggatccgaagctgtttgcttatggtgttgagaacccgatcatggcgatcgagaacctgacggcgaccacccttcgaaatatcatcggtgatctcgaacttgaccagaccttaacctcccgtgagacgatcaacacgaagatgcgcgctgcactcgatgtggcgacagacccgtggggaatcaaggtaaaccgtgttgagttgaaaaatatcattcctccggcagctattcaggatgcgatggagaaacagatgaaggcagagcgtgagcgccgtgagtccattctccgtgccgaaggcgagaagaaatcgacgatcctggtagccgaaggtaagaaagagtccgcgattctggaagcagaagcagagaaggaagcggcgatcctgcgtgcagaggcacagaaggaaaagatgatccgcgaggcagaaggtgaggcggaagcgatcctcaaagtccagaaagcggaagcagacggacttcgtttcatcaaggaagcaggcgcggacaatgcagtgctgcagctcaagagcctggaggcatttgccaaagcagcggacggcaaggcgacgaagatcatcatcccgtccgagatccagggcattgccggtctggtaaagggtctgacggaagttggtacggatgttcaaaaggcagagtagccgggagtgagcggctctaagttataaaaaaaggtataagaagaggctgatggttatgtaaagcaggaaccgcagcctttttcgatttcttttttgacaagcctgcggacattcggtataatatcccatagtgatatgtatacccatatatgttgatgaaagggtatatgcaagaagctatgtgctatatgaagaatgaggctgttgtttgcgaatataagtaaggagtggatgcgttgaacctgcaggaaaaaagaaagaaaagcgcgaatatcgcgtttgccctggatatgcttcatatcgtagtgggtatattgatcgtgatatttgcggttcttgcgtttctgaacccggatgaaaaccggattttgtttccggtaatctttcttctggcggcggtactgaattttgccaatggctatgaccgctatcgccggggaaggggaagaaagcatctgcggaccggcggaatgatcctgatggcagtgggagcaggattgttccttttatgtattgtcagtacacttacaatatggtgggggtaataaaagtgaaaacagaagttttgcgaatgttaaaagaaacggatgattacctgtccggacaggagatctgtgagcgtttaaatgtatcacggacggcagtctggaaagttatcaaacagttggaggcagaaggatatgagatagaggcggtccggaaccgcggttaccggctgcgtttcctgggcgatgttctcagccaggcagagctggagagcagcatcgacagcgagtgggctggaaaaaatattttatattttgacgagacagattcaaccaataccgagatcaagaaagcggcggagaaagatgccccgcacggtacgctggcagtcgcggattatcagtcgatgggaaagggacgccgcggaagaagctgggcggcgccgcatggcgtcggcatctggatgagcctgcttctgcgcccggagcttcctccgacctgcgcgtcgatgctgacgctggtggcggctctggcagttgccgacgggattcgggaggtttgtgatctggaggcaaagatcaagtggccgaacgatatcgtcgtcaatggaaagaaggtctgtggtatcctgaccgagatgagcacggaattagagtgtattaattatatcgtgactggtattggtatcaacgttgcaaatcacgagttcccggaggagattcgggatgtggcaacgtctctgtatctggagacaggaaaagaagtgcgccgcagccagcttatcgccgcgatcatgcgtgcgtatgagggatattatgataaattcatggaaaaccagaacctgaaatccctgatggacgtttataacagccgtctggcaaactgcggtacacaggtgcgtgtcctgtctccgggcaatgagtatactggaatggcgctgggaattgatgagatgggcgaactgctggtccgcacagaagacggaaaagtgtgcaaggtgatctcaggagaggtatctgtccggggcatttacggatatgtataaagatttttatgcgtcgttgaagcctttagagggggaaataccttatgcggaagaagagaggctggcggcatccggcgctccattgctctcctggtaccggaaaaaccggcggctccttccgtggcgggagaatccggaaccgtattcggtctggatttcggagatcatgctgcagcagacgcgggtagaggcggtcaaaccgtactttgcccgttttatggaagcactcccggacatcacctcgctcgcgcaggtggacgaagagcggcttttgaagctgtgggagggacttgggtattattccagagcccggaacctaaaaaaggcagcggtctgcctgatggaagactacggcggtcagatgcctgcgtcgcgggatgagatattgaaacttccgggcatcggaagttatacagccggggcagttgcgtcgatcgcgtatgatctgccggctccggcgctggatggaaatgtggtgcgtgttctgacacgcctgtttgctgacccacaggacagcacgaagccggcgcttcgaaagaaatatgagcggcgcctggaggcggaacttgtgcgccggacggaggaaagagattcctatttgttagccggtgaggtttccacggcattacggtcagaagagctatttcatccaggtgaatataatcaggcatggattgagctgggcgcgcttgtctgcatcccgggcggacgtccgctctgtgagaagtgcccgctggaatccctttgtctggcgcaccggcggggagaggaggagcaatatccggtcaagccgccgaaaaagccgcgccggatcgaggaaaaaacggtctgcctgattgagtgggaggatacggtggcgatccgcaagcgcagcagcaagggattgttggcgtccctctacgaatatgtcaatctggacggaaaaaagagtgcggcaaaggcagcgaaagaactggggatcgcggaggcggatatcaaggaaaccgaggatctgccggatgcagtccacattttttcccatgttgaatggcatatgtgcggacgcagaatccgcctgaaacgggcatccggttatcaggataaagcagttttgatggtgcgccgggcacagctgcaggatcgctatccgatccccaatgcatttcgcgtgtatacaaatatattaatatgaaatactgttagtgtgggggagcaggagaaatggcgattatgaaaaaaatgctttttatcatcaatccgagatctggcaaagaacagattcgaagtcgtcttcttgaaattttagatagttttgtaaaggcgggctatggaccgtctgtttatattacgcagggcccgaaggacgcggagtatcaggcggcacgtgcgaaaacgaaggaactggtcgtgtgcagcggcggggacggtacgctcaacgaggtggtatcggggctgatgacgatcaccccggaaaagcgtccggagttagggtatatcccgtcgggttccacgaatgatttcgcatccagtctgggacttccgaaaaatatgcggaaagcggcgcagacagctgtgcggggaaaaccatttctggtggatgtcggtgtattcggtaaaaaccgatatttcgtctatgtggcggcgttcggagcatttacggaggtatcctattcgaccccgcaggagacgaaaaatattttggggcatcaggcatatatgctggaagctatcaaacgcctgacagggcttaaatcctaccggatgcgccttacgtgggaacatctgggggagcagagagaattggaagaggaatttattctgggaatggtgaccaatacgacctcgatcggaggttttaaaggactggttggtatggacgtggcgctggatgacggggagtttgaggtgcttctggtccggaaaccgcgcacgccgcttgacattgcaagtattgctgcttatctgattcagagagagggcgaaaatgaatgcgtattcaagttccgcacctcgaaactgacggtacagtcggaggagctggtggactggtcgctggacggtgagtttggtggaagtcagacagaggtcgtgattgaaaataaaccaagagagattgcgatcagggtgcctgaagttacggttcgcggataggcacttttggaaccgaaagtgccgtaagaaaacgtggtggcagcaggaatttgccgtatttaaatgcgaagccacggcaaattgcgttgctgggcacgtatgcgtgaacagtaactgcctaaatagaaatagatcgaaaaatttcgaaaattgttgaaaaatagaatttaatcgtatataatgtactttcgggatattgcagggaaaggtgcagggaaataaaagcacacaaacaatcgagggacaatatcacgttagatataaagaaacttctaagcgaaataaatcgaaaggacgttaattcgtggagaaagaaaattttttaggtaagttaaggaaactggtagagttagcaaagtccaagcagaacgcgctggacgtgacagagatcaataacttttttatgggcgataatctgcagacagagcagatggagcagatttacaattatctggagcagaataatattgatgtcattccggaggtgatcgatgattcgatcctcaaggaaaatgattcgatgctcgatgatgatgtggatgatgaattcctcaagaacgaggaagaggatatcgatctggatgcgatcgatctgttagagggaatcggcacggaagatccggtccgcatgtacctgaaagagatcggtactgttccgcttctgagcgcggaggaggagatccgccttgcaaagcgcaaagcagagggtgatgtgaatgcaaaagagcgcctgattgaggcaaacctgcgcctggttgtcagcattgcaaagcgctatacaggacgcggcatgagcttcctggatctggttcaggaaggcaatctgggtcttattaagggcgttgagaagtttgattatacaaagggttataagttaagtacatatgcgacctggtggattcgtcagtctgttacaagggctctggcggatcaggcgagaactatccgtgtcccggtgcatatggtagagacgatcaacaagatgtccaagatgcagcgtaagctgacgctggaactgggctatgagccgtcggtggcagagctttccgaggcgcttggcatgtccgaggataaggtcatggagatcatgcagatcgcacgtgagccagcttccctggaaaccccgatcggtgaggaagacgattccaatctgggtgatttcgtagcggacggcaacgtggtaacgccggaaggaaatgtagaatctgttatgctgcgtgagcatatcgatgcattgcttggagacctgaaggagagagagcgtcaggttattattctccggtttggtctggaggacggacatccgagaaccctggaagaggtcggaaaagcattcaacgtaacgagagagcgtatccgccagatcgaggcaaaagcacttcgtaaattaagaaatccggtccggagcaagcggattcgcgatttcctgtaagagttgtatcattttgataaaaagggaaatttgtttggaatttcctgaaaggtttaataaaaagataaagcagtttgtacccgtccgtgggtacaggctgctttttcaagttttgaagaatatgaattattgtgcatatcttcatatgacgtctaaggatggaaatgatgtttgtcaggaaagaagcgtttcggatagaagtattgtgtgctggatggaaaatgcacggacagatgggaagttatagaaagaggagagaaaaatgtcagaaccaatgaaaaatccgccagccagaaatacacagacggcgaaacggaattatcagaaagaaatggaaaaagtgctggatgcagcagtccgggacggcagagttccgactttatttctccacagctgttgtgcgccgtgcagcagctacgtgctggaatatctgtcgcagtatttttcgattacggtgttctactacaatccgaatatttcaccgaaagaggaatatgaggcgcgcacggaggaggtacagcggctgatccgggagcttccagcggtgcatccgatccggtttgtagaaggaaaatacgacccggaatgctactatgaggcagtccgggggcatgagaaggatccggagggcggcgagcgctgcggtatttgttttgagatgcgcctacgggaagcggcgaagctggcagccgagggcggctatgactggttcacgacgaccctcacgatcagtccgctcaaaaatgccgggcgcctcaatacgatcgggcaggcgatgggagaagagtatcatgtggcatttctgccgtcggatttcaagaaaaaagagggatataagcgctcgatcgagctgtcggcgcagtatcatctataccggcagaattactgcggatgcgtgttctcgaagcgggagcgtgaagagcagatgcagaaggagaggcaggaaacatcgtgatttgcggggcgatatgtttggttgaagatgagtttgtatggatgattgcctgtagctgtgaaagtatgaaacggctgtgaggggaaaaagtggtactgttcacaggtaggcacttttggaaccgaaagtgccgtaagaaaacgtggtggcagcaggaatttgccgtatttaaatgcgaagccacggcaaattccgttactgagcacgtatgcgtgaacagtaacaaaaaagttacaagaaaagatggaaacagaaaggaagaaacgcaatgtaccgcttatgtatatttgatttggatggaactcttttaaatacggtttatgcgctgacttatgtgacaaatttaacattggatgcattcggactgcgccatgttacaccggaggaaacgaaacggatcgtgggaaatggataccggatgcagatgaagcgcgcgctggtgctggcgggggacgagaagttggttcattatgaagcgtcgcttccgatttatatggagaatttctctaaatactgcctgaaagacgtagagccatatgacggtatccgggaactgctggcgtcgttaaaagagatgggtgtacatgtggctgtcctttcgaacaagccgcatgatcaggcaattgtgaatattgagacattctttgggaaaggatattttgatgtggtgcgcggcgagcaggcgggaacgccgaaaaaaccggctccagacggggcgttcgccatctgccgggaactgggtataaaacaggaagagtgtctgtatctgggcgatacgaatacagatatggaaactgggctgaatgccggaatggacacggtcggcgtgctctggggcttccgtgaccgggaagagctggaaggctgccatccgcagtatattgtggcacatccgtcggaagtagcggagattgtgaagaaaaagaatgagtcacatggaagaatggagtagtgtctgtgtttgttcatagctgtgaaaagagaaacagttgtgaaagaaaatgatatttgaaagagtaattcgaaatgtttattgaaaaacatttactgaaatagaagaagttaagggtaaaaaagaaatatggtaaaacacaagaatggatttaaatgtaaatggatatcatggatgcttgcttttttgattgccttttcctgtgttcttacagcgtgtacgccacggcggggaactgcatcgtctgattcatcgtcgaatccgttaaaaggggcagatgcgtctggtgatacgcgcttaaacgttgtgacgacgctatttccgtattacgattttctccggcagattgccggggattcgatccggctgacgatggttgttccggcgggcatggacagccattcgttcgagccgacgccggcggacatgatcacgatccagaatgcagatctgttagtctgcaacggcggtacgatggaacagtggctttcgcaggtgcttgattccttcggggaaggcaccggaccgaagcgcgtcgtgacgatgatggactgcgtggatgtagtgcaggaggagatcgtcgagggcatggaagatggagaggcgcacgatcatggacatacgcatgttcatgcggatggaacagttcatgcgggtgatcacgatcatgagtcggaagatcatgctcacagtgaagaagaacatgagccagaagaccatgtttacagtgaagaagaacacgacacagaagagcatattcacagcgaggatgagcatgatatggaagatgtggcgggtcatgatgaagatcacgctcaagagtatctggatgaggacgatggtcacggcgtcgagattgaatatgacgagcacatctggacgtccccggtcaatgcgaaaaagctggccggcgtgctggcggaggtgctggcacaggaagatccggcgcacgcggcttcctatgcggaaaactgcgcgtcctatcaggataaattgacggaattggatgcagaattcagagaagttgtctcccatgccaagcgccgtctcgtcgttttcggtgataaatttccactccggtactttttcgatgagtatgggctggaatacagggcggcattttcaggatgcagtacggatacggagccgagtgccaagaccatcgcctacctgatcgataaggtgcgggaggaacagataccagccgtctattacctggagctttccagcccgcgcgtggcggagatcatcggggaagagacgggcgcggaaccactgttgttccactcctgccataatgtgacgagacaccagtttgattcgggtgttacctatctggaattgatggagcagaacgtaaagaacttgaaaaagggattgtcataaaaagaatagatgattatgggaaaaagtctttagccatggtgaatgtttatgacaatagaagagtagagcagtagtgaaaggaattatagatgggattactcttaaaatgtgagcatgtaggttttggttatgaaaaccaggatgcggtgctggatgtgaacctggaggtaaatgagggcgattacatctgcattgtcggcgaaaatggttcgggaaaaagtaccctgatgaagggcattctgggacttttaaaaccgacttcgggcagaattgaatattcggaagaattaaaaaaagccggtattggttacctgccgcagcagaccgacgcgcagaaggactttccagcgactgtgtttgaggtggttatctccgggtgcctgggaaaacgcggcagccgcccgttttattcgataaaagaaaagaaagaggcgcgggcaaatctggatcgtctgggaatccgcgatctggaaaaaagctgtttcagagagctttccggcggtcagaaacagcgtgttctgatcgcgcgggcgctctgtgcgacggataagctgctgattctcgatgagccgatcacgggactcgatccgtcggcgattctggacttttaccagctgatccggaaactgaatcaggaagaaaaggttgcaatcctgatggtttcccatgatatggcaaatattgtgcatcagggaggaaaaattttgcagatgcggcagaagccgctgttctggggtacgatgaaagaatatgtgaagagtgagattgctcattctttcctgggacgggaagagctggcaactctggggcacagatgcggagtgccgatgcagaaggatggaatcaggaagatgcagaagccggaaatgggttcggaaactgattctgaaacgaaacagcatttgaaagacaggaatgcggagaaggaggtgtagaagatgggaattatatctgaaatgttatcatacccgtttatggtgcgggcgctgatcggcggtcttttagtctctctttgcgcctctctgctgggtgtcagcctggtgctcaaacgctactcaatgattggagacggtttatcccatgtttcgttcggatccctttcgatcgcactggcggcaggctggtcgcctttaaaggtttcgattccggtggtcgtgctggcggcatttttcctgctgcggatcacggaacatggaaaagtaaagagtgacgctgcgattgcgatgatctcggccagtgcgcttgcaatcggtattatcgtaacttccctgacaaccggtatgacgaccgatgtcagcagctatatgtttggaagcattctcgcgatgagccgggaagatgtccagtttgcggcggtgctttccatggtggtgcttggattatatcttttttgctataacaaagtatttgcggttacctttgatgagagctttgccaaggcgaccggcgtcaatgtatcgctctataacgtgctgatagcggttctgaccgcgatcacgatcgtgattggaatgcggatgatgggcgcgatgctgatctccagtctgattattttcccggctctgacctccatgcgggtgttcaagagcttccgaggcgtggtcgtcgcatcggggattctgtcgctgatctgtttctttggaggaatggtgatgtcctacacgtactcaacaccggcgggcgcgagcgttgttgtggtggatctggcggcgtttctgctcttttcgctgatacagagagggatagctgctactgcccgcaaataggatgttttttgtagaacatacacattctgtatgctcatgtttctgttcacgggtaggcacttttggaaccgaaagtgccgtaaaaaaacgtggtggcagcaggaatttgccggggagtggttgacaaataaaatggcttgcggttataataatattcagttgccggaatgggcagatcgccagcaaaagcttgcggagttgctggtcggcgatagaaaacgaaaatcgaatagcttgtctaagcgttaaagagactatagggtttgtactgtttctgagataaacagtaaagtccgtagtctcttttttatttgataagaaatgctttgcagaagaaccccaggtgttttttttctgcgaagaatgtgtcagaaacgctcatgaaaagtgaaaaataaaaaaggaatggagatggaaaaatggatcagacctacatgaaagaaaaaccagttgtcccgctgctgctttcgatgggaatcccggtcatcatatcgatgatcgccggggcactctacaatatcgtggacagcattttcgtggcaatgatcagtgaggacgcgatgacggcggtttcgcttgtctatccgatccagaacctcgcgcacgcagccggggttgggtttggcgttggtatcaatgcgatggtggcgagacgccttggcgaaggaaaaacacggatggcgaaccagacagcatcgcagggagtatttttaagtgccttacatggaatgattttaacgattttaggaatggcggtgattccgtatttcctgcggatgtttacgagcgatgaggtaacgatttcctacggactgacgtatttttgcaatgtgtttctgttttcaacgatcgacacgatgggaatggcatatgaaaaggtctaccagtcggttggaaagatgaaaatatcgatggcagccgtcttgattggatgcgtcgtcaatatcgtgctggacccgatctttatctttggattaggccccatgccggaactgggaatccgcggtgcggcgtgggcgacaggaatcgggcagacggcgtcgctgctgttttatttgattttaaaccatgtgaaaccgttaaatgtggagatttcgctgcgggaaatgcgtccgtcgaaggagatctgcggcggtatgtattcagtcggaatcgcggcaacactcaatatggcgctgacatccctgcttctgacggcgctcaatgcgattctggcaccattttcgcaggtatatattctggtgctgggtgtttactacaagctgcaggcactgctttatcagggagccagcggcgtggtgcagggaatgcgcccgctgatcggttacaattacggtgcaggcgagcaggagagggtgaaaaagatcttccgcgcggccttcatgattgttggcattatcatgacagcgggaaccctgcttggcgagctggtgccggatttcctgatggggctgtttacgcagacgccttcgacggtggagatcggcagaacggcgctccggctcatcagcccgggctttgtcatgtcaacggtttccgtcattgcttctggcgcgtttgagggacttggaatgggacttaaatctctgaaaatttccctgatgcgctatgctgtgattatcattccgatcgcatttgtgctcagccggatcatcggtcctatcggtgtctggcacgcgttctggctggcagagcttatcacggcagtgtatgctggggcgagctggaagcggacgattactgtgtctttatagggcgtttttggtctcaaaaaggctgcatatatgtgaggctaaaaacgttactgttcacacgcgcccagtaacgggattttgccgatgcttgactttactaggtatttgtgtaaaataataagtggctgatcggaacttcggcagattcgggcgatgtaaagctatgcattgccgggatgccaggtaccgggcggacaatgatttacagtcagtacacatttgtacagaaaagaaggtaagtaaaatgacaaagattgatattatttccggtttcctgggtgcaggaaagactacgtttattaaacagcttttaaaagaagcaatttcaggcgagaaagtcgttctgattgaaaatgaatttggacagatcggcattgacggcggttttttaaaagacgctggcatcgagatccgtgagatgaactccggctgtatctgctgctctctggtcggcgattttggacgttccctcgaggaagttctgaccaaatatcagccggatcgtgttatcatcgagccgtcaggcgtcggcaagctgtctgatgttatgaatgcagtaaaaaatgtagcttctgagattgaggttatgttaaacagtgcggttaccgtggtagatgtcaacaaatgccgtatgtatatgaagaacttcggtgagtttttcaacaaccagatcgaaaatgcaggcacgatcgtgttaagccgtaccgatgtagcggatccgaagaaggtacagggcgcggttgagatgcttcgccagcacaatgcaaaggcaaccatcgtgaccactccatgcagcgagctgaccggcgcacagcttcttgagatgatcgagcaggaagatgatatggcagaggagctgatgaaagaggcaagagagcatatgcatgagcatcatcaccatcatgatcatgacgatgactgcgattgcggctgccatgaccacgatcatgagcatcaccaccatgacgatgactgcgactgtggctgccatgatcatgatcacgagcatcatcaccatgacgatgactgcgattgtggctgtcatgatcacgatcatgagcaccatcatcatgaccatgatgacgagtgtggctgtggctgccatgaccaccaccacgatcacgaaggacaccatcatgcagatgatgtatttacaagctggggcttggagaatgtcggcgtgatgaagaaagaagatctgcagaagattctggatgatctggcttatggtgataaatacggcgaggttctgcgtgcgaaaggcatggttccgagtgaagaaaagggcgtatggctgcattttgatatggttccggagcaggctgagatccgtgagggagcaccggattttaccggaaaggtgtgcgtgatcggtgccgagctggacgaagagggtctgaaggcagcgttcaacgcgtaaatacaaggagaatgaactatgaatgaagataagatgccgttgtttctcatcaatggttttctggaagctggaaaaacccagtttattaaatttacaatgcagcaggattatttccagaccgaaggaaaaacacttctgattgtctgcgaagagggcgaggaagagtatgatgaggagcttttaaagcagactcatacagcggttgtttatatagaggaagcggaaaagctgacgccggaatacctacaggatctggagcttctttacaatccggagcgagttctgatggagtggaacggtatgtggaatctggatgccctgaaacttccgaacgattgggatctgtatcagcagattacgatcatcgatggttccacatttgatttatacctgcagaacatgaaaccattgattggtgccatggtccgcaacacggaaatgattatcatgaaccgttgcgacgagatcgaggatttggatgtataccgccgtactttaaagggcatgaacccgcaggttcagatcgtgtttgaggacgcagagggcgaaattgaggaagtgaccgaagcggatcttccatttgatgtcaatgccgaagtgatcgagattccgccggaggcatatggtatctggtatattgatgcgatggataaaccggaccgttaccgtggaaagaccgttgaatttaccggcatggtactgaaaaccccggatttcccgaagaacaactttgttcctggacgtatggcgatgacctgttgcgaggcagatatgacgttcttaggtttcatgtgcaaggcaaaaaatgcccgtctgcttgagacgaaagactgggtcaaagtacgtgcccgcgtagaatatgagtatatgccggagtatgagggtgaaggtccgatgctttatgcagattacgtggaaaaggcagagccgattgaggagattgtgcagttctaagatttgcaacggaaagctgtgtttgaaagaaaaggtgtgccccggagtgtggaagactccggggtttttaaaaaagaaagagaaatcgaacaaatgctcgatttctctttcttttatttaaaattggattacagctttatcttactccgtcatcttcggcaccggagtaggtcttgaccggtcaaatacctcgttgacatcaaacaggtcactcaaatggtcgccgccgactccactttccggaaggtcataatacatccggtagccgtcgaggttccggcgcccctgtcgcatataatcgtcgccgatctggacgaaatactgggaggaatctacgttacagaagtaacggaatcccttgttgtacaggtactggaagcgctcgctgcttgtatcatacggatgccagtccccaatatcgcttccaaacgggaagaggatgatatcacacggaccggtcagcgtttcgacttcatttgcccatttatcggtatcttcacggaatttatccattgggatcgtacccatgttgcggtggccccagctgtgggaggcaatttcaaaaccgtcgtcgcgcaggcactggacgacttttgctgcgttggcgcgttcttcctcaaagttgaaatccgggtgttccgctttgtactcgtcagtattgtaggcggaatcggtgcggtaacccaggatgccattgtaaccggtaaaagcaatgcacgcttttgcgccgcggtaggagaaatccgggtgctctttgatgaaatcatccagtaacggcaccagatcataggaaccgacggaaacagaaccgtcgtccatcttcatctcgttcgttggcttgccatcctcgccgataatcatacgggaggcaaagccatcgccatccatgtattcgtagtagcagacatcatcctgtgacatgacgaacggtttcttaccttccggaagcatgatatcgccctcctggaaatgcctggaaccgtcctctgcggtcacctcatatgctacatcgtgcagacgtaccagaacgaaaccgcgctcatacatcgactggagaatcttcataaattcatccttggtcgtcatgacctgattataacccttttcgcggctgtcgccgtcaaatgctttcgaggtatccataatcagtgtatggaagaatacatgcgttaccttacgcggatcagcgcgcaccagtgtttctttggtggcgttgtattcgtcgatcgctgccgtcacggactcgtcagatgcgtatgtactgctggacaggagattgattgccccgtcatagtcataaccgtctgccagaagctttgcctgagcgatgacaccctcgaggctgtcatcagcaggtgcagatgcattatcaagggaaattactccattttcagaatccgtttcggttgtcgctggaaccgaagatacatgtgctgccggagagcggcgcacccagaggaacgcggcaattccaagcagtacaatcagaatgccgattaaaattaaatacggaagtttagaggaaccgccgtgccgtcgcctggaacgtccgccacgtgcagaaaatccaacgcttccaagggaggaatttcttctcatcatagttttcaccttttgtttattcatatttatctgtcgttttttgcgtcagatagtaataacaggccgagaaagtttgccaccgactcgacacagcaagaaagagagcggaaaacgtttttataagcctgtctgtgttcttatagtataccataaaaaggaaaggtggtctatgacagtttcttacaattctctttggcatagggacgggcggatatgccatatcttgagaagagagtatgtgcagacggaggaagatatgaatgaaaaatgtatcatgcagggagaggcgtggtatttgaaatggaagcgtgtggaaaaatggtgttggtttgtgaaaaagaagctgtttcgggaaaaagaatgtatgtgttgggacaaagggggcagagacaggagaagagagtatttaaataaaaatgcttggagagggctggcagcgattggtgtagcggttgtgcttacgatgggagaatgtgtgtcaggcatacagcttggaattggtaaattggggggaagtggtatgctcacatcttacgcggaggaactgtggattcccgtttcagtaaccgcagagacagcgcaggcagcagaaaatgccgctgagcttcccatccgggcaccggaggcgatccttatggaggcgtccaccggaaccgttttgtatgaaaaaaatgcggacgaggcgcgaaatccagccagcgtgacgaagattatgacgctgcttctgatttttgatgcgttacattcggggaaaattcatttgcaggatgaggtcacgaccagcgcgcatgcgaaatccatggggggatcccaggtgtttttggaagaaggggaggtacagacggtcgaaacgctgatcaagtgcattgtcattgcatcgggaaacgatgccagtgtggcgatggcagagtatatcggcggcagcgaggaggcatttgttgcgatgatgaacgagcgggcgaaagggattggaatggagacagcaaggtttgaggattgctgcggtctgacggcgtctacgacgcacgcgatgtcggcgcgcgacattgccctcatgtcgcgggaattgatcacgaagtatccggaaatttttcagtattcaacgatctggatggaaaatataacgcaccggaccaagcagggagagaaagaatttggactttccaatacgaataagctgttgaaaatggtgacaaattttgaggtgacgggactgaaaacaggttctacatcgctggcaaaatattgcctgtccgcaaccgggcggaaagatggcgttgatctgattgccgtcattctggcagcaccggattataaggcgcggtttgcggatgcagtcacattattaaattatgggtttgcaaattgccatctttacaaagatgagaatccgggagctgtgccggaaacgacggtggcgggcggcatccaggaacaggttgaaggacgtctgcggggaaccttttcttatctttcgatgggaggagagaatctggatggaatcgaaaaagagtggatgatggaagaatcccgcaaagcgccgattcaggagggcgatgtgatcggacatctggtctaccggctggatggacgggaattgggaagtgtggagatagaagcggcagaaacggtggagaaagcggggctctgggactattttaagaaggtaatgggagtgtttgcggcatagaaataaagagctgtcatgtttgaatagtgatacatgacagcttttttgtgtaataggaaattccttggaatttcctattacacaaaaaggcactaacgtgccaatgatgcgcactcgcgcgaagatgtaggttgtcgcaagcgaccgcgctcggcgcgagaatgtgccaaggcacattcttttttgctggttattcattctgcaatccagccgctttttcagaatacgtggtcgttaccagtttttcataaggaatccgttccttgagttcacctgcttcttccagaatattttccagaagctcaaagctgtccctgtggaaaatggtatcatttttccaggtgtcctgcgctttgtagcggtcaacgatgcgggcgattgccgcgcggtctgtttccggaaactgaggttggattgtctcggcgatttcatccgcactgtgggagttgacgtaagctaagcccttctggatggcattcgtgaacgactggataatttccggatgcctatttagatagctctgctttgcacagtaggcggtgtaggggacataaccggaatcgacgccgagcgaggcgacaacggtgccatttccttcggtttcaagggtggtggcgaagggctcgaactcgaccgtgtaatccgcatcattactcgtaaacgccgccgctgtcagcccgaaattgatactctgatcgatggtcaggtcattttttggatcgatgccatttttctttaaaatatactcaaagaccatttccggcattccacccgcgcgcccgccaagcacctttttgcctttcagatcctgccaggaaaagtctggttcggcacttcgtccaacgagaaagtttccggcacgctgggtcagctgggcaaaattgacagcataatcggcggaaccttcctggtagacatagatacttgcctctgagcccatgaatccgatatcggcatccccggagatgagcgaggtcataaccttgtcggcaccggcaccgtttacgagtgtcagagcgatgccttcatccttaaaatagcccagctcgatcgcggcgtactgcggcgcataaaaaatcgagtgggctacctcattgagtgtgaccggttcaagcgccccgtccgcctccttcgcctgtccacacccggtcagggtggtaagcagagtgagcacagccagggcagctgcaaatttagttcgtttcatggttgcctcctgcggttcgttcatactattaagatatggggaatacaggaaggtgtgagcggtctgctgatttttctttctgtctccagagaagtccaatacaaagcccggcaagcgacggcagaatccatccgaggttcaaatcaaacagcggaagcgtatgtctggcaaatgcgatgacgggttccagatgtagggcagactgcatttcgtacggcagagctgctaaaaagtcaaagatggaagctgcccaggaacaaatggtaacgcagacatagacttttttgttatgctggaatgcatttccaagcagcgcgaggagaatcagcgtgatggctggcgggtaaatcagcatcaaaacaggaaccgagtaagtgatgatagcggacagtcctatatttgacacaatgagtgaaaaaagggtaaaaacgaccgcccatgcacggtaggaaagggcatggggaaacagtttcacaaaggtttccgcacagctggttacaagcccgatggaggtcttgaggcaggcgaatgtgatcgcgatggcgaggatccaggagcccatccgtccaaggtagtagtctgcaatctgggagagggcaatgccgccgttttctgaaagttcgaattgtcccagtgactgtactccaatcaggatggtaagcagatagataaatgccatcagaagcccagccagcataccggaatgcagaacctcttttgcaatggttgaatcttcccgcacgcccatctggcggataaccgaaatgaccacgatcccgaatgcgagtccggcaatcgcatccatggtttcatagccctgggagagcgcggaaaagaaagctccattctgataagaggcatcgggaactgccgctgaaacctcgatgctcggatgaagcagggcagtcacaatcagaacgcctagaaacagaagaaacagcggattgatgatttttccgatccagagcgtgatgctgcctggacgaatggaaaatacaaacaccagcgcaaagaagatcagcgaaaacaaaaacagcatagtctgttcggaaagctgtgttcctaaaagaggtctgactccggcggtaaaggaggtcgtagcgcaccgcggaatagcgaaaaacggtccgattgtcaggtagagcagacaggtaaagaaatagctatatctgtgtccgacgcggcgggacagatcctgaagtccctccgaatgtgtgcttccgatcgcggcaacacccaggatcggaatgccgacggcagtcagaataaatccaatcgctgccgggagaaactggtgtccggcaagctgaccgagatgtaccggaaaaatcagatttccggcgccaaagaacatgccgaataatgttccggcaactaaaagccgctgcttatgggaaagacaggtctgcgtcatagatattcactccttttacatgagaattgaaagttactgttcacgcatacgtgtccagtaacggaatttgccgtggcttcgcatttaaatacggcaaattcctgctgccaccacgttttcttacggcactttcggttccaaaagtgcctacccgtgaacagtaacaattgaaaactcttttctaatcatcattataaagccttccttgtggtttgtgaaaatctagtttataatagaaatatgacaaaatgtaatattctaaaaggaggtgcggcatggatgccaaaaaactggaaatattgatgacggcggtagatcttggaagtttttcgaaagcatccgaggtagttggctacacgcagtcggggctgacccatctggtggacagcctggagcgggagattggatttccgttgatccgccgcagttacagcggcatcgcgctgacggaggcgggagaaaacctgttgccggatatccgccagtttttgcaggcaaatgccaccctggaaaataagattcaggcggtgcgggaacagcaggaggagtcgatccgtgtggcggcatatgcgagcatcgcgatgtactggatgccggagattttataccggttccgccgcctctgcccgaaggtggacgttgatctccgcatggtcgatcatgcgctggaaccatttgaattattacagagcggaaagacggatgtcatttttgcgagcagacagaaagaaccgaaatgcgagtggattccgctgtatcaagaacttttgtatgcgattctgccaaagcagtatcccttaaatgggcgcaaagaatttccgctgcgtgaatttgaaggaaaagatttcctgatgccttacgggcggtttgacatcgatgtacacgccgcatttgcaaaagagggagtcagggcaaaggagcagtccgtctatgtggatgacgagacggtgatccgcatggtgggaaaaggactgggcatttcaatgatgtctgaactgatgatccgcggaaatacggaagatgtctactgcgttccggtttccccgacctgcatccgggaaataggaatgggtatgaagccgggggcggaggaaagtgaaagcattgcgaagctgacgaaatgtgtgatgcagtttgtgagtacgttaaataaaggaagaaacgtctctttgaaataaccggaatcaaagtccaaacagtcccagccttgccattttcccggtatagagtatataattattaagaagaaacgactgagactgtcggcttttcgttttttggaagagctggtagttaggtgttttcagatattgaaatattcaggaaaatcagaaacataaatacagataaatatatggaaggaatacaccgtgagtataaataaaaacctttttgatgctctcccaatcggctttttcaactgcctggcaagcggcagcagcaaccgcatttattcggactgtcttctgctcatttatcatgagtatgatcgggagattacctaccgcattgcccgcagccgcatccgggatgcgcttgccatctatcttctggaaaatcacattgattatttggacgatgagatgacaaccgaccggaattacaaccagcttgctaattctgtgatccgcaaattctgctcgaaagaggtcggatggctggaggaggacacggacgatgcgacgtatgagaagcatatcatgatgacggagcagggcgtctttctggcagaatttctccagaagatgatgaagccggagtgggaagaattttcaagttatattttcaatatttataatattttgcagaatcccgaccagtgggaaccggatatctatgtcaatgcgctgcgctcggtctaccgcaacgcgaaacagctctccggtgcgctcaagcgcctggcgacctttatcaaaaaaatcatcgagcggatggtgcgcgaggaaagcctggaaagtctgaccgagaacgtcctcgaatactgtgagggcgattttatccgcgagtacgcgcgtctgacaaaacagcagaatattcatatgtaccgttcctttatccggtcaaagctggaagcgatgcagaaccggcaggagctgtttgagggcctggtggcgggatgcgcgaaggaagaagaactggaacacattgaggcggagaataaggtgctggatatgatccagacgattctgcagtttttctcagtcgattacgaccagatcatgcgggatatcaagcataaaattaatatctatttacagattgcgattggacgcgcgagatttcttcaaaaccgggacagcgatgtgcgcgggcatgtcgagcagacgatccgcgtgattgcggcggagatgaacacactcggttggaaggaagaactgccagagtcgatgaacgggttgtttttgctggaaaataatgagtttatcgataccgactcgatccgctatccgcgacgggagcagatgatccgcgaggcaacctatgcaaagctggaagaaatgacacaggaggacatcgaccgtgcgagggaggcacaggagcgggaggcagagaacccgtattcgaaggataagatgaagaattatctggaggagcttttaggagatcggacggagatatccagcgaggaggttccgatgaagagcaagcgggatcttttaagcgcgctctcggcggttgcctatggttcagaaaatgggtatgagatacaggcggaggatggttatctggaaacgcagcagatgcttctgcggcgctttaaaatcgaacgccggaaggagaaataaaacatgggatttgaagaaatatggaatgaatatacatcctctgagaaggacatgttccagaaaagtgtcaggcgtcttctgaagcagacctttatcgtgcgcgaccgtgacgaggacagcaaaaaagcgtactattttgtctccaagcgttcggaaccattttcagcgtacctgggatatatcggatatgatattgtaattgaccgggaaaatggcgtgattatgctgcagaactgccgggatctcggcgagaatggaaaactgcagatcaaccatgtgacactcaaaaagatggagagtgtggttttatgctgcctctggactctctatgcggaccgggtgcgttctggaagtctttcgaaaaatattgagatttcggtgaccgatctgcgctatgagatggaaaaatacggcattcgggatcagattgacaagagcagttttgcatcgattctgacgctgtttaccaaatatcagcttctgcaggtgattggaaagctcggcgaggaggactgccggatctgtctctatccgtcgatgcagtttgtgctggaaccacaggagtttggcaaatttgtggaaaatgtcaaccggcggatgcaggaaaagtggagccgtgaggacgaatgtgaaacggagctgacaaaagaggaggaagacggcgatgaagaatcagacgatcatgaataggaaatcggcgaaaaaacttttgatggtccagtggtcgcgtttccagcatgtctgtatcgagctggaaggttcgaccctggtgaccggtgtcaacggaagcggaaaatcgacggtgcttgatgcgatgacctatctcctgacgggcaacacgcagtttaacaaggcggcgaaggaccgagaccggacggtgcttggctatgtgcgcggcgacacgcgcagtaatggcgaggcgcgttatttgagaaatggcagtgttgtcagctatattgcgatggaattttccgatccgacgctgggagtgccgctcacggtcggagtatgcattgagtctccaagtgagtctggcaagccggtcagcagctggtttatctgtccaggggcggcgattgacgatatcgattttacacggattgagggaaatgcactccgcatcacgccgaaaaatgagctgacagtgaatggcgaggcgatgaagctttcctcttttatgggacgggaccgtggcacggaggcggtactccgggcgctgggactccgcgtggacgcagccaaataccggacaaagcttctgaaaatgatggcatttaacccggaaaataatatcgatcagtttattcaggactgtgtcctggaaccgggaaaagtccagtcgctggaggaactgcgcgagcagaagcgccagtttgagcgcctgcgggaactctatgagagtctcagacagggcaaaatccagctcgaagaggtgcttcgccagagtgatgaatacgagaagaaaaagcgggtactccgcatccgggagctgatgctttcgtaccaggcgctccgggagaaggaagaggaagaaaagcagacgaaaaaccgttatcaggctttaaaagaccagtacgggcgcctgaccgagcgggcgggagagctcatccggcagcaggaagccgcacaggaacgcctgcgaattgcagaaaataacgatatggtcaagggaatgcaggaaagcctggattccctgaaacgccagatcgaggaagcggatcgtgagaaaaagaactgggaggacaagctggcgcagattttgaaattgaagaagaagataagcgcgcttatcaagcttctggaagcagatcttccgtccttatcctcggaaaacacctatctggagacactggaacaggcggatggggagacggcgaagaagcgggaggcgtttgacgcattccgcgagaaggtgcaccgtcaggacggcatctatgaggaaaataagatccacctgcaggatcagtgtaaagagcgcgaaaaagagataggggcgctgcaggagaagatccgccgtctggaatcgaatatccttgtgttcccggcggaggtggaaaatgcccggaataagattcagagagggttggaaaaacagggtatccagaccgaggtccacatttttgccgaattggtccaggaggtgaccgctccggagtggagaaaggcggttgagacatttctgggaagaaagcgtttctatatcatcgtggacggcgcgcactgccataaggcgatgcagattttacagaaagagcggatctatgatggaaatgtcgtgatcacggataagcttccggaaacagaggcggtggaaggttccgcggcggagattctgcggatcccgaacgtctatgcgagacgttacgccaattatctgttaaacggcattcatctctgtgaaaatctggaagagctgcatgaatacccgaagggcggactcatgcgggatggcatgctggcgaagagctatgcggttgcgatgatggatatgagacggaccgagctgtgtctcggcgcagacgcgatccgctgccagctggaacagtccagaaaagaactggaagaattacaggtggttcagcgggccgataaagaggcactttcacaggttatcaaataccgtgatgcgatcaaggagatcgactgggacggcggacactacgatttcggcgcggcatatgggctgaaggactgcaaaaagcgcagggacagcctggtaaaggaccgcgaggagatcgaggcaaatccggactttaccgcagtcctgaaagaactggagacggcgggacggctggcacgcgaggcaaatgagagtgtgaaccagaaccagagtgagcttggcggctgtaagaatgatttaaagggctgcgaaggaacactgggccgtatcagcacggagatctatttatgccagaaggcatatgaggaaaaatgccttgtcaacatggaactcaaagaggcgatgctggaggaatataaccgcgaaagcgagaagcgcggcacgatccgcgtgacgacacagctttccatcgacaagagcaaaaatatgctggcagagcgggagcgccagctggaggacgcacagctggcgtattgccgcctggcgggaatcgacgtcggaaagcgcggcattggttacatcccgtggtaccgggaagaataccggaacctggcgcacgtcaaggtggaggaagcccagcagaagctgcaggagcaggcaggacggctggagagcgcgtttatgaacgatttcgtggcggagattgacgagaatgtccgcgaggcaaaacgtgagatggacgcgattaaccgtgaactgcgccatatgccgtttggcaacgatacctacaagtttgtgatgaaagaaaagccagaccgcgctctcttcttccgcatctgcaggcgtctggaaaaatatatgagttccccgcaggtctatatgaattcggcgcgcgacgacgaggagatggagaatgatattcaggagtttatgagtatcattctggcggaagaagatgagtgggaatacacggattacaggagatatttctcttacgatatggagatcagcagccgtcagggacagaccgagatcacggcagagttatcaaaaaaacagggttccgccagcaacggcgagaagcagaccccgtattttatcattctggcggcgagtcttttgcagtgctacccggcaaacacctgctgcgcccgtctggcattcatcgacgaggcattctcggcattgtcgagagagcggatcgagcagatggtccgttatttcgaagaaaatcacttccaggtattctatgcagccccgccggagaagatcaacagtatcggtcagtttatcgattcaaccgtcagcctgatcgtgacaggacggtatacgaatgcggtagaaggattggtgaagcaggcataggaaacgaggagaaaaaatggcggatcggaaagagtggaaagaacagcttttaagtaaattgctggatcaatacgaaaaaagcgtcacctacgtcggtgaaaacaaggtaaaacaagtgttttcggtcaaaccatccgatattttcaagggctacaacaaagattttctcccgccggaacagcttttccaggaaaaagaatttgaacgactgatccgtcagatggaatcggagggacttattcatgtagttcctccgaatactggtattctccgtcagatctgtgctgtcccggaacgctgggaagattactatgcctgcctgaaccggacagaaaagaatattctaaaaaaacggctggaagaggtttatcatcgcttctgccaatgcgatttattggaggcatatggaaaagaaaagcttcagacactgaaaaacagccgtgcgagaaagctggatgaaaagaaggtagaaaaagagataaccgaggcagaagctatctggaatctggtgcaatttttaaaagaaaatcaggaaaagcagagaactacgctggagcgggaaatgtcagaggcagttctgcatgacagtaaacagtgggaaaagatatatcggaaaaaggtgtgtgggattttggagcacacaggacggtatgatgaaccgcttgcggagctggaagaagaacgggagcggcagacggcgcttctggaggaattttacatttattccaatccggcgtatatctatctgaaaggggatgcgcggatctgccttgaagatggacgcgaacttcggatttatcacgatctgccgatgtcgatcccttttgagacattccagaaggcaaaaagcatccacatccgggatgcggcgctgatgacggtggaaaatctgacctcgtttcatcggctggagcgggaacatatattttacctgtttctgagtggttaccatacccgcacgaaacaggcgcttttgcagcggatcgccagagaaaatccgggactttcctggcatcattttggcgatctcgatccagacggtctggcgatcgcggggcatctgatccgaaagacgggactgccgtttcagctatgcgcgatgggtgtgcaggaattgcagcggtttcagacatatgcgaagccattggaagcacccgatcgggcgaaggcggaagcgatgataaaacagggcagcagctatgcgggaatattgcggtatatgctggagcacaactgtaaattggagcaggagattataagctggcaggagacgagattggagagttttctgtaaaaagaatcttttcggttcaatccggatttttatatatgatatgataaagacaaagtgaaaggaatgcagtgtctatggaaaaacaggaaaaagcctacaaaggcgtcattgaatatttcaagaaccgcatcatggcgggcgagctgcgtccgggggagaagcttcctccggagcgggagattgcgcagatgctggaagtcagccgcaattccgtccgggaagcgctgcggatcatggatatgacgggagtgatttcctcccagcagggatcggggaattacatcacttgtgaatttcagaaaagcattgcggagacgatggggatgatgtttgctatgtcccagattaattatcagcagatcagccagatccgctatgcgctggaacagcaggcgtttgccctggcggttgaacatgcgtcggagagccagatggacgcgctggaagaactggtaaaacgtcttgaccggagcatggacgagcaggaaaacgcccggattgacaaacagatccattttacactggcgctggcgtcgggaaatgtgctgctgctcaatattttagaggcgtgttccggcgtgatcgataccttcatccggaatatgcgcgcggaaattctgcggacaaaagaggcgaaagaagcactgaatctctgtcaccggcagattgcggaagcgctgcggaacaaagataatgcagcggggaaggatgcactggaccggcatttccggatgatagatgaaattttggaaaaacatgaaaaaacacattctatgtgaaaagataaacaatcgttgacaactagaacgcagcccactatactaacgaataaagaaaattggttctaccaaaattctttttcttttcaataaattggtagaaccaatatgcggattaaaaattctttacatccatcatttaaagatttttacaaagcatccatatgaaggaggaaacagaatgaagattcttgtctgtatcaaacaggtaccggaaagcaataaagtagaagtcgatccggttaccggcgtgctgaaacgagacggcgcggcttcgaagatgaacccatacgatctgtacgcgctggagacggcgttccggatccgggaagaagtgggcggaagtgttcacgtcatttccatgggaccgccgcaggcgcagcaggtgatccgcgaggcatttgcgatgggcgcggacggcggaacgcttttatcggatcgcaaatttggcggtgcggatgtactggcgaccagctatacacttgctcagggcatcaagagctgcggcgattttgacctgatcctctgcggcaaacagacaacggacggcgacaccgcgcaggttggtccggagatctccgagtggctgaatatcccgagtgtggcagatgttgtcaagatcaatcagattgatgaggacggcatcaccgtcagcatggatctgccggaagaggtcgaggtggcgaaagtgcagttcccgtgtctcttagccgttgacaaggacattttccagccaagacttccttcatatgtccggaaaatgaacacgaaagaccgtgaaatccggattctttccctggcggatatggatgataaagacgcgatgcactatggactcaatggttccccgacgcaggttcagcgcattttcccaccggctgtcaatgacaaaaaggaaatgtgggacggaagcggcgaagagctggcggaccggctgtatcagaagatcgtggatatgaaattcgtgtaggaggtggaatcatggctgagttaatcatacatcaggacaaaatcccggataatcaggaacttatcaagctctgtccgttcggggcgatggaagaaaaagacggaaaggtgacgatcagcgccgcctgtaaaatgtgccgtctctgcgtgagaaaaggtccgaagggcgcggttgaatatgtagaagacgcggtaaaaccgagcgtcgataagagtgcatggaagggcattgccgtttacgtagatcacgtggatggaaaggtgcatccggttacattggagcttcttggaaaagcgagagaactttccaaggtaacgggacatccggtttacgccctgtttatgggaaatggaatcgaagcggctgcacacgaactgcttcattataatgtagataaagtattcgtctatgatgtaccggaactggcacgtttccagatcgagccgtacacggctgtttttgaaaactttatccagacagtaaaaccatcgtctattctcgtcggtgcgaccacggtcggcagacagctggcgccgcgtgtggctgcccgtatgaagacaggtctgaccgcggattgtacgatcctggaaatggatgaaaatactgatttatcccagatccgaccggcttttggaggcaatatcatggcgcacatcaagaccccgaaccaccgtccgcagatggcaaccgtgcgctataagatcatgaacgcaccggagcgtgccgagaaagagagcggtgagattgtggtctgtacaattgagaaggaaaaactgctttcccacgtgagggttctggatatcgtagaaaagccgaaggaaacctttatcgaaaatgctgacgtcctggtggtagccggacgaggcgtgaagaagccggaagatttgaaaatgctggaaaaactggcagatctgctgggaggtcagcttgcctgcacccgtccgatggtggaagccggatggctggatgccaagtgccagatcggtctgagtggccgtacggtccgcccaaaactcatcatcacctgcggcgtgtccggtgcggttcagtttactgccggcatgaatcacgcggagacgatcgtcgcgatcaataaagatccgaaagcgccgattttcaagacggcacattactgcctgactggtgatctctatgagattctcccgagactgattgagaagattgagatgggaagataaagattcacaggaaggagagcaggatatcatgggaaattacaagaaaatagataaagatgatattttatatataaaaaatacaattcaggatgacgagcgtgtcctcgtaggcgaaaatatcaacgaagagtacagccacgatgagctgagcggcaccagcagttatccggatgtggtggtaaaggcaaaatcagccgaagagatcgcggcgatcatgaaatatgcatacgaaaatacgattccggtgacaccgaggggcgccggaacgggtctggttggttcttcagttccgatggagcatggcatcatgatcgataccaccctgatgaaccagattcttgaattggacgaggaaaacctgacggtcacggtggaaccgggcgtccttttgatggaattgtccgcctatgtagaagacaaagatttcttctacccgccggatccgggtgaaaaatcagcgaccattggcggcaacatcagcacaaatgcgggcggtatgcgtgcggtcaaatacggtgtgacgagggactatgtcatggggctggaggtggttctgccggatggcacgatcactcagtttggaggcaaagtcgtaaagaatagttcaggctatgacttgaaagatctgattattggttccgagggaacgcttggcttcattaccaaggcgatcttaaagcttctgccgcttccgaagcgtgtcatcagccttctgatcccgttcccgaccctgaaacaggcgatcgacaccgtcccggttatcatcaaatctaagacgatcccgaccgcgatcgagttcatgcagcgggaagtgattgaagacgccgaggagtatttaggaaaagcgttcccggataaacagtcggatgcgtatctgcttttgaaatttgatggtaattccacccaggagatcgaagaaacgtatgacaaggtggccaaactctgcctggaacagggcgcactggacgtgctgatttccgatacccaggagcgcgaggaatccatctggaaagccagaggcgcttttctggaggcaatcaagggatccacgacttacatggatgaggtcgatatggttgttccgagaagccgcgtcaatgagatggtgacgtatctgcacgatctccacaatgagattgatatccgcatcaagagcttcggtcatgcgggcgacggaaatctgcacgcctacatcctgaaagacgatttgagtgatgaagagtgggaaaagcggatgtctgctgcaatggagaagatctatcagaaggcccatgaactcgaaggtcaggtgtccggcgagcacggcatcggatatgcgaaaaagccgtatttaagagaatccctgccggagaagaacctggatctgatgaacggaatcaagaaagtgtttgatccgaagaatattctgaatccgcataaggtggcgcagagatagaagaaaataactgcattgatattttttttgaacaccacgcggtaaggctgattctaggaactgcagaagatttttggcagaaaaacagaatagaacagcaggtttttgagaaagccacgatctgaatcaaagagttcaaatcgtggctttttagagttgttgaactattttatagtttatatctatcgacctatcttttcttcttcaacgcctgcatcacccgaaccagcggaatcgtcttcctgtaaatccgtttcccactcttattttccaaaaattcccgaaacgcgccaattgctttcaaattctggctctcatccgaatttgaacgggaccttgcgcttgcgtcaatcccctttttcggtaccatatacccgccgtaggaatcgcggaacagatagaaataatcgcggtcctcacccagcttttcaaattcattgtaagccagtgtgctttcgcgggtgtttttcggaagagaatagacttccagatgattttcacggaattcatagcgggacgccgggaacggcatgccgctttttttgatctgttcggcgagcttgtgggcggtgtggttggcggagctgtaggtgctggtcgtcagatagcagccgtaggcggctaagaggatgccccaccactcgcttagattgatgatacctccggcgatgaacaggatgcttaaaattgtccgcgtgatccggttggaagcgcagaagagatcgtactgcatccgggacagggattcgaaggttttttcgttgtggtgcatttctatcttatagtaaatcatggtaagccctttcatataaaaaatcaatcatcacctatataaaaacagtatatagaagcatagaaaatatcttaagaagtagtatactgtttcttccctgtttccgc

SEQ ID NO: 11057 - DNA, 1786 bp, Unknown
  gut microbiota DNA sequence
ttgcttttatagagaatcatagatattttaataagaactatatataaattatagtaattttaaaatgaattggcaagtgttataatgggcacagaaaaaggaatgttgttttgcgtgaaggagaactgggagagacaaaagataaaatagaaaaagggggaatggcagatgaaacagaagcatcaactgctggttttatttttaaaaacactttatatcagcgcatttacattcgggggcggttttgtcattgtgacatttatgaagaaatgtttcgtggatgagcttcactggattgatgaacaggaaatgcttgattttaccgcactggcacagtcctgtccgggcgcgattgcggtaaatggggcaattttggttggttggaaagtatatgggtttgccggaatggtggtggcagtcatcggaacgattcttccgccgatggcgattctggcggttttatccgtctgttacgccgcgtttgcgtcgaacgtctgggtggcagcagcactagagggaatgcgagtcggcgtggcggctgtgattctggatgtttcctgtgggctgggagtgaatgttatgaaggaaaaaaagctgtattcaattgcaatcatggtaattgcgttcctggctgattttgtgctggatgtgaatgtaatctatatcattgcggcgggtattctggcgggaacgattcgatttatctggatgagaaaacgtgagcagacgaccggtgcggtatagagggggagaatagatatgatctatatacaattatttttgagctttctgcagatagggcttttcagcgtgggcggcggctacgcggcgattccactggtacagagcctgattgtggaacgacagggatggatcacgatgacggagtttacgaatcttatcacgatcgcggaaatgacgccgggaccgattgcggtcaattcagcaacctttgtcggaattcggatagcgggacttccgggagcggttgcggcaacctggggatgtattttcccatcttgtatcattgtatcggtattggcatacatatatcggcgttaccgtggcggctctgcgatgggaagtattttaggcagtcttcgcccagcggtagtggcgctgatcgcaggtgccggactttcgatgctactggcagcagttcttccagaggtaaatggggaaaggatgatccagtggggcagtctggttcttttttcggcagcttttatagcgctccgtaaatggaaactgaacccaattcttgtgatgtgggtctgcggcggtgtcagcctggcagttaaattgattgagtatcatttgtagagaaggtagtataggaataggtaatagatataaatgagagtgtagatggagattgaaagctgtatttatgaatggatggaaatggcatcggattcttttgattcgatgccatttctgggattaggggaaatagatgcatagacttagaatagtaagaatattctaaaaaatcacaacaaaataaaaagaataacaaatatagaaaaatcgttgacaatccttggaaactctggtatcataacatacgtccttgagacaagggcaaatcaatcgaggaaataagagcggaaacgcaaacgggtttctgagaaagattaaaaataaaataaaaaagttgttgacaaagtcaattgcttatgataatataaataagctgtcgatgagacaacaacaaagaaccttgaaaactgaacagtatgtagaaccctgaaaattctaagaacaaaggcttttggttaagcct

SEQ ID NO: 11058 - DNA, 281 bp, Unknown
  gut microbiota DNA sequence
tgggaagaactttcagaaatcaaaaatctacaaaaacgctttaatgaggcggaacatctggtacatgagacaaaaaagaatcatgccagatttccgtttgaccgtcattttcctaagatgccatcttatctgagaagagcggcgattcaacacgcacttggagccgtgtcctcctatcaatcacgccttagtttgtgggaaaagggagaactgagggggaaaccgaagctggtctgtgagaatcatgcgatgccggtattctatcgggatgtcatgtatag

SEQ ID NO: 11059 - DNA, 753 bp, Unknown
  gut microbiota DNA sequence
tgccaagcacatgatacaaatggtctttatcactggagaaatttataaatttacgtcccaggatagtgccatctgcacgcatgatgctgcagaccgcatccgtattgattcctaaatcaacgctgcatatcacctgctcttttacatctgtttttgataagcttacttcctctgtgtatgaaaaccgaaggaaatatttatgatgtttcctttccaaagtaggggcagatgcctttttaccactccatttttttcgcagatattccatatcggtatgaagtaattttacttgaaaccacttccactcccgcccatcaaacagctttaaatgtgccgcatcttctcccggttctgcttccttatacatgacatcccgataaaataccggcatcgcatgattctcacagaccagcttcggttttcctctcagttctcccttttcccacaaactaaggcgtgtctgataggaggacacggctccaagtgcgtgttgaatcgccgctcttctcagataagatggcatcttagggaaatgacggtcaaacagaaatctggcatgattcttttttgtctcatgtaccagatgttccgcttcattaaagcgtttttgtggatttctgatttctgaaagttcttcccaggtctctgcatacaccggaatcagataggaaactgccttccgaaaaatatccagcgtagagcggagcggtatattcttttttttaatttctactccatagctggatacaatct

SEQ ID NO: 11060 - DNA, 654 bp, Unknown
  gut microbiota DNA sequence
ccgtaattgctgcgaatagcaatcgaggaaacgaacgcatccgaaaggttcatcaggataccttgaaagtcttcggagtccgaaaattccgatacgagtgtggcgttgggcagaattacataatccccggccgcgatgttataacgggtatcctgaaacgtgaaacccatatttcctccgctgcaaagaatatggattactcttcctgcatatcgtaaagcattaaattcctgcaatgtatcagcaaaaataatcccgtcgaagtctgtatgtgtcatttctctttcatttcctgcaaaaataacgaaaaaccacgaatagtgaaaattcttccccgaataatgaaacaataaaatgataggtaccctgtaactttgcatcagaattaaaaaccataaaggatatgaaaaatgtaagattaaacaatggagtaatgatgcctgctatcgggttcggtgtctttcagattcctgaaaatgaaacggaacgagccgtaaatgatgctatcgagatcggttatcggaaattcgatacggccgctgcttatttcaacgaggaacagttgggaaatgccatccggcaaagcggtatcaaacgggaggaattcttcataaccaccaaattgtgggtgcaggactacgagtacgacgatgc

SEQ ID NO: 11061 - DNA, 628 bp, Unknown
  gut microbiota DNA sequence
atctgcttgtagaaaacggcggtctatgatagcatgaaatcaaagaaaaacaggagggcttacacatggttttactggttgtggatacacagaaaggtatcgtggatgaacgcctgtatgcgtttgaaaagtttgtcagcaacatcaaggagctgatccggactgcccgcgaacagggaatcgaggtcgtctatgtccagcatgacgatggacctggcaccggtttctccatcggggacgatgaatttgaggtctattccgaatttgcaccgctgccgactgaaagacggttcgtcaagaccgtatgcagcgcgttcaaaaaagaaagcggtctgctggaatatctgacagaaaagggcgaaaaagatgtgatggtctgcggcatcatgacggacttctgcatcaatgcaacggtggaggcgggctttgagcatggcctgtatatgatcgttcctgcctatgcaaattccacgcaggacaacgagtacatgacaggggagcagagctaccactattacaatgaattcctctggccggaccgctatgccgattgtgtgcccatggacaaggcgctggagctgctcaaaaagtgaggtgtttacaatgatttctgaaaaagtaaaaaatc

SEQ ID NO: 11062 - DNA, 77845 bp, Unknown
  gut microbiota DNA sequence
ccccatatttccaactccttcagtactttcctgaatttttctccaatatcacttaatttgtattctacttttggtggaatctgctgatattctatgcgttcaatcaagccttcttcttccaactttttcagctgtcttgatagcgttgtatgtgtcatttcttctggcatttttctttgtaattcattaaaccggatgggaccatctgttaacaaatacataatatacatagaccatttacctgttaaaactttttgcgaagtcacatatgggcaaagcccaaatagatttttcttttccatatatacgttcctttctgataccagtatcgtaaaatatcgtacttgtttgtttgctcctatgatatataattatacgcataaaaaataaaaatacaatttgttttcaggaggattttgaaatgaatgacgtagtaaaatatttgcaggaatgcggaactttttatcttgccacggtagaaggagaccagccacatgtacgcccatttggtgctgtatgtgaatttgaaggaaaactttatattgtaacgaataataaaaaagatgtttacaatcagatgaaagtaaatggaaaagttgaaatgtgtggaatgaacaaaggtacttggattcgtgtgaaaggtgcagtaaaagaagatactcgccgtgaagctcgtgtagccatgatggaagcaaataaaaatgctctccagtctatgtatacggttgatgacaatttgatgacggtattcgtttttgaaagtggcatcgcaactatttattcattcacagaagaaccgaaggttatcaatctgtaaaattttgagtaatgtacattacggtttgtcagactggaaattccccggctgatgtttggcgctgcgggcggcggcacatattctttattatccggaagcgtggtatacgctgcacatagacgcacctgagggaggaacgaaaatggaaactgaaaaagtatatgccatgccatttgcaaaaatatatcccatgctggtggatgagctggctaagggcaaagtgatggagaagatcaagcggagaaacaaatcagggaggggaaagcagcctattacacaccgacagagaatgtggtataatccttgaggaaacattgtatggaaaggacaaacacgatgaacgctctggatattatgaaacgccctgccgcctacgtaagcggctatgaaaacacccccacggaggaacagaaccgtgcaaagcaactgtgctgggagtacaaccgcaccgctcccaacgaacaggaaaagcggcgcagcatcctgcagaccctgctgggcacctgctctcccatgaccggcattcaaccggatttccactgtgactatggcttcaacatccatacccacggcttggcggtcatcaactataactgtgtcattctggatacctctccggtaaacatcggagcaggtgcctttattgcccccggcgtatgccttgcctgctccggtcatgccatcgacccggagcagcgcagccacggcattggaacctcagcacctattacgctggaggaaaacgtctggatcggtgcaaattccaccgtctgcggcggcgttaccatcggggcaggctcggttatcggggcgggaagcgtcgtcacccatgacattcccgccggtgtcatcgcagtaggggtgccctgcaaggtgatccgccccattaccgaaaaagataagttcaagccggaggatattctgttctgagaaattcagatcagaaacgctgaaaaaacatacgcacaagctctccggggacatttttgtttttcgccatgcttttctgcggggagaaggcatggtatactgggaatgacaattcgggatttttcattacagtgttttgctaaaggaatccaatggagctataccctggatttttctgtattctctgggtgacattttgacgatagactgaaaagcgcttgaaaactttccctgggtttggtagcctacctgggaagcaatatccgcgatagtgtcatttgtttctcgtaataatttcatagcctgacgcactcgaaattccttcatataggtggcgataggctgaccgtagactgccttgaatatctcctttagagtggaggtatttatcaaatactgtttggaaagttctgcaatcgtaaatcgttgctccaagtgctctgtcaactgttgatgaatttcttttatcaattcggtttgctgggaaaagtattgagtcaattctttatgctccgatttcatgttgctcaaataaatcaaaatttccagcaccttcaatttcaagagggaaattcgaacggacacaggagcagaaaagagtggggcaaaaatatgctctaaatcggaacaagacgggattgcggatggctttccggagcaaaatcgattctgtaactggtctgcttccacatcggcattctttaaaacttccgggcaaatggaagagagctgtttcagatccacggaaatggaaattccctctgaatatcctaggggaaacatcatggcggaatccgcgcagcaggccatactgtgtgctgtcacatcacctgtacctaaatagacggcagtaccgccgtgcatattccaacccacgcgaccactgcgacaatagtaaatttctaaaacagaatccgaagcatcatgccgaaacttgacctctgaagcaagaaaaacattgaaggatacctctattccaggaaaagtttcatatgcctccatacacccttttccagcggtaaccgctcgaaactgttctccaaagagtgtagtacccgttccaccagcccggcaatgcttcaaggcgagggtgccgtttgggatcttttgaagtttttgagcgataactttggattcttcttttttcatggcgttcctttttgtttttctacttgcgacggacaggcgatttttacaagccactcaatcatgtggtggaaatttcgggcctgctcggtatcagctgctttataatagacctcttttccgtcccggcggttaacgatcagacccgctgatttcaactgcttgagatggtgagaaactgcaggactgctcatatttaccatggctgaaagattgataacacattcctcacagtggcaaagcaaccaaaaaatgcgaatacggctgccatctcccagctgcttgaaaatatcagctacggtttgaaagttttctacgctgggcatatattccagttcatgctcgatagtttgtccgtggtcgtggggtaagtggttctgaatcatttagcactcctccttgaagtctatcttatcatagaccggagagaaaagaaactttacttttgagatgtttctggttcagggccagcgtcatgggtgtaatccaagatacggacaccatcgcctacctctttctgcaccagctctcgcatacgcttagcaaaaggacaggggtaaccaatgggagtccctttgctgatgcaagaagcaaaagcaatggtgtcagcgccctgttctaccagagaacgggcccgcagcaccgctttttttccggggcagccgccgcagttgatgaagcccactaactgaatatcatcctctcccataaaagcgccttttctctctcggattgtccgaaaatcccggcttccggggcagtaatcctctgtctgcatacaacgaataatgccaagtttcatattagtttcctccttaatttagggcctgccattcagatttggccggtccattgtctattattatgtaaccagattttccaacagctggatggaaacgtcctcgtagtagcgatcctctttaatcattcacaaaatacgggttataggcctctccggttctcagtatagctccgcaaggaggttctgtatttcccgttcagaagaatttttgtcccaaatggaagagtttctgaaaatcaatccatcataaacgctgcaagagcgtcccttctaacttcatgtgatattgttccagtacatctttcagtgtaatttcttgcattctttgttccgctgttttttgaatgtccaagtaaaaatcccgcagcaccagttggatatttacacccacgccacaagcggggttggtgtggatgtcctgatggagcaggggcttgttgccctctacggcccgataggcatccagcagagtgattttctccggctcacgagccagagcgggtcggggatgtcccttcacgctgaccagcagtcctcccttccgcaaggaggacatgagctggcgcacataggcaggattcgtctgaatgctctctgccagcttgttactggttaggtcgcagtctgggtacagagcgataaaagtcagaatgtgaacagcatcgctaaggcgggttggatatttcatggacggatctccttttttactttgatgttatttttattataacagcatattgacagcgatgcaagaggatgctaagatgatttgaagtaagaataaaaataacacccactcgaaaggaatggtgaaaatgaacttctatgatgatctggtcatgcagacccagatgaattactccaggcactatcctatctatgcttccggcagtacgccttatcagctgactgacaaaaagccgctgccgtatagcgaacagatccatcgtttggtacaggaggtaaaggaagctgattgtgtggtagtgggcggggcctccggcctgtccgctgccggtggcggagatttttactacgaggacaacgactcctatcgcaaatacttccgaccttttgccgagaaataccacttcaaaggtgcttttgcagggatgatgcacccatggaagacaagggaagagtattggggatatctcgccaccttccttcacaccacccagaccgcacctgtgcgtcatccctatctggatctggacgctttgctgaaaggcaaggacttcttcatcctcaccactaaccaggatacccagtttgtcaaactctacccggaggagaaggtggcggagatccagggggatcaccgcttctttcagtgtgccgcctgctgtaccgatgacacctgggatgcggtaaagccggtggctgatatggtagctgctatgggggagggcacgaagattcctacggatctcattccccggtgcccccactgcggcggtgaggcattcccatgggtgcgaggatatgggaatttcctgcaaggaaagaaatatgaagaacagtacgaaaaaatttctcgctatgttctggaacacaaagacagcaagattctatttctggagctgggcgttggccgaatgactcccatgtttatccaagaacctttctggaacatgaccctcagctttccccatgctcgatatattgctgtcaacaacaagtatgacttcctgcccaagcagttggaggacaagggcatgaccattgtggccgacattgctcaagtgctacgggatgcacgaaaactctagctgccctccggcaggtgcgatccatcgcagcaaccataaaatagaaaggagcgaacgaatatgattgattggaaacccattgccgaaaaattcagagaagcggacgctatcctgatcggggccagtaacggcctgtccatcaccgaaggactgcatttgtttgcagataatgcagcctttgatgaattgtttggagatttcaaacaaaaatacggcttacattgtattttgcagggaatgatggccggatggcccagcgaggagaaaaaatgggccttctgggcccggctcatccatcattactgcgggcaataccagcctacgccggtgatgaacgatttgaaggccattgtgggagagaaggattactttgtcgtcacatcaaacggagaaggtcactttgaacggtgtggtttcgatccgacgaaaatctatgagattgagggcaactggtttacgatgcagtgtgcccgcccctgccacgacaccctctattcaagtttagaggtggccgaaaaattatcggttgcggaacagggcggccatgtgcctacagagttggtgccgcgttgtcccaagtgcggaggtcccatggacatccacatgggcgcgggtcagagaatgattccggataccgctgcccaggcacggttccaaaactttctgaaaacctaccacggaaagaaactggtggttctggagctgggcattggctggcgcaatcagctgatcaaggccccgatgatgcgcctggtggccggcgagccaaacgccacttatgtgaccatcaatctgggggagatctacattgcggacaatatcaaagagaagtccttcggactggacgggcggctggatgagctgctgcctgctctccgggaggcgtgcgaggcatgaagtttgtggggaccataatcatctatgcctatttgcaggcggtgggagctatcaactctcatgaatcaatttgctttctgaatcctttgcagcagtagaaaatgcagaaaataaaacgccgggaagttgactcaaattgtcaatgcctcccggctttttaccgggtactggaatgtgccgataaaagctgcattttgcccaaacagaagaacccttttcccgaatagcaggatatgggttcaaagcgttgacgaggacggttttcctgcgtatgatgaagatacaattaaacgatgacttaattgttctgacaacaggaacaaattaagagaggagattttcaaaatgaaaaagacttacaaaatcgatgtggattgcgctaactgcgccaacctgatggaagatgccgcccgcaagaccagcggcgtacagagtgctacggtgaactttatgaccctcaagatgaacgtggagttcgaggaagatcaggatcccaaggctgttatgcaggaggttcgcaaagcctgcaagaaggtggaacccgactgcgagatatttctgtaagccagcgaaacgaaatgccctgtcgagcggcagcttgcagggcattttttctcttagataaataaacgaataagcaattgtgaaaggggtaaaacgaaatgcaggagtatatcatcaacggtctgctgatcgtggtggctctgctggccgtgatccttcagatcatcggcatgcggccctccgccggtatgaccaaaaaacaaaaagtgatgttgtggcggattctgactgctacggttctactgttaattttgcaggtcctgggcgcaggcgcatttgaagtgtttggctcggcaggccgctgggtacgtctggctgtgttcctggtggattatctggttattggctacgacattctgaaaaaagccggaaaaggtatccgtaacggtcaggtgttcgatgagcactttctgatggcggtggctacgctgggggctctggcactggctgtatatgaaaacggcgactatctggaggccattgcggtgatgctgttctaccaggtgggcgaatggttccagtcctacgctgtgggcaagagccgccggaacatcagtgatctgatggacatccgtcctgattatgccaatatcgaacgggagggaaaactggaacaggtagacccggacgaagtgggtatcggcaccattattgtggtacagcccggtgagaaagttcctattgacggtaccgtagtgaagggagaatccactttgaacactgccgctctcactggtgaaagtttgccccgtgaggtcaagactggcgatgagatcatctccggttgtatcaacatgacaggtttgctccatattcagacaaccaaggaatttggcgagtccactgtctccaagattctggatctggtggagaacgcctcctcccggaagtccaagtcggaggacttcatttcccgctttgccaagatctacactcctgcggtgtgctatgccgcgctggcgctggctgtattgccgccgctggtacggatgtttgccatggggctggatgcaggctgggagacctggatctatcgtgcgctgaccttcctcgttgccagttgcccctgcgctttggtcatttccattcctttgtccttctttgcaggaattggcggagccagtaaggcgggcgttctggtgaaggggtccaactatctggagaccctgtcacaggctaagatcgtggtctttgacaagaccggtactctgacccagggcgtgttcgaggtcaacgccatccaccacaacgagatggacgaacgcaagctggtggagtacgcggccctggcagagagcgcttccagtcatcccatcagcaagagcttacagaaagcctatggcatggaaattgaccgcagccgtgtaaccaatattcaggagctcagcggcaacggtgtcatcgccacagtggatgatcatcaggtcgcggctggaaacgacaagctcatgaatcgtctgggggtccaggctattccgtgccacagcgtaggcaccattattcacatggcgattgacgggaaatatgccgggcacattgttatttccgatatcgtgaagcctcactccaaggaagccattcagacattaaagtcggctggggttcgcaagactgtgatgcttactggtgacgccaagaaggtggctgatagtgtagcctccgcactggggctggatgaggtttacagtgaactgcttcctgccgacaaggtggagaaagtggagcagttgattcagaacaagccggagaaagaaaaactggcttttgtgggagatggcatcaacgatgccccggtgcttcgccgggcagacatcggcattgctatgggcgctatgggttctgacgctgccattgaagctgcggatgtagtactgatggatgacgatccaatgcaaatttccaaagcaatcaaaatctcacgcaagtgccttggcatcgtctatcagaacatcgtggtggccatcggcgtaaaactggtctgcctcgtgctggtcgctctgggcttcgccaatatgtggctggccgtgtttgcggatgtgggcgtgatgattatagccgtcctcaacgctatccgggcactgtttgtgaaaaatctttaaagttcagaaataaacaaaaacaaaaggggggacccttcccgcatgaaggctttattttaaattggtccctcagaagcatgtgtcagtgaagttgcagacaaactgaataggtcagagtccgctgtttctcaccatatccgtattttacgcatgaaaggtttggttcgctggcgcaggagtggaaaggctatttactatgttctaaaacgcttattttcactacgcattatccggaactgctggatgaatatgaccgaaatgacggaatttgtattgtaagaaatcgtaatggcattacagcataaaatttgagctatgcggtgaatttgcggcagtagagaccttggcaaggatatgtaaaacgtataaagaaaaatacccactgattcagattgaacttcataccgcaacagcagatacggtttatgagatgatgaaaaaaggacttgtagatagaattcaatataagcattagacataataaaataatgggtataaaatagatgtataagagaaattcaaatcttatacatctatttttatacaagaaatttgcaaagaaaggggctttttattatgagtaaaaaattagtggcatttttcagtgcaagcggaacaacaaaaaaagtagcagagatgattgcagaggaagcaaaagctgatttatttgagattgagccaaaagttccatatacaaaggctgatcttgactggatggataaaaaatctcggagcagtgtggaaatgagtgataagaaatacagaccggagattatgaagaaagagatagatatgagctcttatgatgaaatccttctgggattccctatctggtggtatgtagctccaacaattatcaatacatttttggaagcctatgatttcagcggtaaaaagatcgttctttttgcaacatccggtggaagtggattcggtaatactgtaaaagaattgcagccatccgcaccagaggctgttatcacagaaggcagtctgttaaaccgcggaacaaaacagaaagtcagtgagtgggtaaattctttataaacagcagtgttatggaagtatacagaatatggaaaaaatggtacagacagcaggaagaaatgcgcttggcgaatttgcgccggagtttgcacattttaacgaaagggcataattttttcattcgttcttgacaagtaaccattcggtaactataatgtagttaccgaatggttattttgataaaggagataattatggcagagggtacaaaggaacggattttgagaacagcactggaactgtttgcgcagaacggctatctggggacatctatgaatgatattgcagggcagttgggaattacgaaagctgctttatataagcactatgccagcaaacaggaaatcttagataagatcgtggagcgaatgaacaagatggactatgagcgcgctgaggcgtatgaaatgccggaaacggaaccagacggctttgcggaagcatatctgcatacaccaattcaaaaaattcgcacatacagccttgcccagtttgaccattggacaaaggagccgttttcctccaatttccgtaaaatgctgacgctggagcaataccgtgattccaagcttgcacagcttcaccacgactatctggcgggcggtcctctggagtatatggcggccatcttccgcaaattggcagattctgatgaggaggctatgcagctggcgttggaattctatgggccaatgtatcttctatacagtgtctacgacggtgcggaggaaaaagaatcggtttcttccttattggcgacacacattgatcgctttattgccaaggttgaggctggttacagatcagaagctgccgggacagctgttttaagcaggaggaataacggatgaactatattcggatcaccaaagacaatattgacaaggaacatatctgctgcgccatgtccggtaagcagagtgttgtaaaaaaggaatggctgcggcagcgctttgatgatggacttgttttctatcgcagtgaggaacgcggtaaatgctttattgaatacattccggctgaaaacgcctgggtgccgattgcggcagatggttatctttacattaactgtctatgggtatccggctccatgaagggacacggatactcaaatgatctgctggaggcgtgtatctgtgatgccagggtgcagggaaagaaaggtatttgcattttgtgcgcggagggccgaaagcgggaattcctcgctgacccgaaattccttacttataagggtttccgtgtggcagacatatccgactgcggaatcaatcttatgtatctttccattgaatcgggggcacaaccgccgtatttcaaggaatgtgcgaaacatccggtgattgaagaagcaggttttgttctttattacaccgatcaatgcccatatacctattattgggtgccaagagtgcaggaggcggcgaaggaacatggtatcccgtttaaggttatccatatcactgataaagaaagcgcacagaatgtacctgcaccggtcacgacttatgcactgtttcgggacggtcagtttctgacacagagtatccagtcagataaaaaattcctggcgctggcaggtttaaaaaattgattttactccgctatttttgtgtcgcttttgagtcgcaacataaacgctccgcgaggatgcgaagcgtcggcacgcttctgtttgtcgaactttacggagatattggtgcgatcaccccaaagggtgttgcgaaggatacccctgaacgctttgcgttgttcagtgctccgtttattcgcctctggatttgggtcctgacaccgttgtaatacacaataaagctatcgcgcgattcacaaggagtgagtataaagccctgcaaaagtgctttcggatttaaaaaaagggattctgatactgacagaaaggaaaaacatggagaaaaaattgcaaaatccaacctctaacaaaaatgaaacacccgcaccgcagggaggcaaatggccggacgagacgatcattcgctatatcatccgtgcttttttgctgcttattgtattcgcatgggcgctggtaaacattgacgctgttttgtgttttctcggcaaggtgcttgcactgttcactccgtttctgatcggcggcgcgattgcttttttgatcaacgtagttcttcgaccaatggaatgctgctggaacaaggcgtgccgcaaagctcctgcaaagctgacccgccccgtgtgcttgacagcaagcaccgtgcttatccttggaattctatttgctgtggtatttatgatgctccccagcttgcgggaatccggcgatgagtttatccaaaacattccggtctatgtggaggaaatcgggcggtggtgggctggcgttgtccagtttgctgcaaaatataacattgtcctgcccgaatatgtcatagactctgacctgttgattgagaaggtcaccgccttgatcagtgacgagaaaagcgggattctcaccgtgacatggggcgcggcaacctctgtcctgtcggtttttgtagatgttctcttggggcttgtttttgcactttatttgcttgcgaagaaggaggtcgtcgcggcacatttgaaaaaactcattgagacagtccttccgcaaaagacggcgcagcggcttcttagtattgccgcgctgaccaatcagaccttcacaaattttgtcagcggccagcttaccgaagcggttatcatcggtgttctgtgcttctttggaatgctgattcttgggattccgtatgccggtgctgtctccgcgtttgtggctgtcactgcgctgatgccgatttttggcgcatggattggcggcggctttggtgcgtttttgattctgctggcagaacctggcaaggctctgtggttcattctctttctgaccgttttgcagcaggtggagggcaatctgatttatcccaaggtggtcggcaagtccgtcggacttcctggactgcttgtgctgatggctgttacgattggcggcgaagcattcggcatcttagggatgctgttcagcgttcccgtctgcgccgtgctgttcagcctttatctggagttcatgaagaaagcaagcaccctttaagttgtggtctattcaacaaagaccacggcaattatcgagcatattatttacgatgagatggatgaccattacggcgcagagccggaatatccctggaatgactggaaagctgtgctgaggcgcaacgacaataataaatggtatggtgtggttctgaaagtatctgctgataagttgggggcgtcggaagcagccggcattgatctagggctgccgttcgaggaaaaacgaagggttttcgagggaggcaagtcaaatggaagacgttcgacttgaattattcattagttcttgataagtaaccattcggtaatcatagcgtagttatcgaatggttactttaatgaagaaaataattatggcggaagtcacaaagaaactgattttgagaacagcactggaactgtttgcgcatacgtgcccagtaaaggatagagttgtatcttaacctgagtatagttataatacaattatgacagctgctttcccaggattatcaatgacggaaatgatgtatgacgatgataggcagcagggaattttctgggtataaaaaagcttgcgaagctaatgagaagggatgacatcatgggacatttttattttgtaagacacggacagactgtgtggaatgtggagaataaaatttgcggagcaacagacagtccgttgacggagcatggacggcagcaggcggctgaaaccgggaaaaatattgtaggaagcggaatcaaggcagatgaaattctctattcaccccttagccgtgcagcagatacagcaaaaattatttctgaaatgagcgggattccctgcagggaagaaccaagactcatagagcagaattttggaaaatgggagtctacgccgagagacgggaaagagtttaagaaggcgaaagagtcatttgcctgccgatatgaagggggagaatccatgctgcagcttgcgcagcgtatctataatctgctggatgagataaaacaggagtctgaccataagacatacattctggtggcacacaatggaatttcaaggatgattcagtcgtattttacggatatgaccaatgaagaatttgcatcctttggcgtaaaaaactgccaggtggtgcggtatgacttctaatatgtatgacctttccggtcaggctgtgctctcgaccaagggatatcgtttggaattatggagaatggagttttccagatttaacaacactttgcaagaattctcccatcctctctaggtggtgagatgaattgccttttgggaaaatcatgcaatatctggcatattaaaactgcgcatatctgtgcacatgaatgaaaacaaatatagaagaacaaatgttctgaaaagcatagacaaacaagcgttcctgtgttataatataatcagtcgaaagtaaaaagaaaggctgattttatgagaaaattggacagtaatgcacattcagtgtttctactctattatcatttgattttggttataaaataccgaaaaaaggtactgacggatcctgtttctgaccgtgctcgggagatttttgaatatatcgctccgaagtatcatgttacattagaggaatggaatcatgatcgggatcatgttcatattatgttccgggcccatccgaaatcggaactcagcaaatttatcaatgcgtataaaagcgcaagcagtcgattgattaaaaaagagtatccggagattcggcagaagctttggaaagaaatgttctggagccagagtttttgcctgttaagtgctggtggtgcacccattgaggttatccgccagtacatagaaacccagggagaaaataagagtgaacatcgtgtaccgttttcggatttacccgaataaatctcaaaaagaactatttgcaaggacatttggttgtgtgcgtttcgtgtataaccggatgctggcagagaagatagaatattatgagaaaaccggaaaagtattaaaggttacgcctgcaaagtataaggcagagtttccgtggctgaaggaggtagacagtctggcgttgtgtaatgcacagctgcatctgcagacagcctataagaacttctttcgggattcttcggttggttttccgaagttcaagtcaaaaaagaatccggtaagaagttatacgacaaactgcgtaaatggaaatattactttgcagaatggtaaactgaaacttccgaaagcaggttggatccgcataaaacagcatcggagtatcgatgatagttatactttgaagggcgccaccgtcagccaggaagcagatgacaaatattatgtatcattactgtatgcggcagaaaaaccggaacataaaatcaggccagtaaaaaccgcaatcgggcttgatttttccatgaatgaattgtatgtagattccactggaactcatgcagattatcctcattttttccgaaaataccaggaaaaacttgcaagggagcagcgcaggttgagtcattgcaaaaaggggagtagccgttacatgaaacagaaaaagaaaatagccagactccatgctcatattgcacgtcagcggaaagattatctgcacaaggaatccagaaagataaccaatttttatgatcttgtgtgcatagaatctttgaacatgaaagaaatgagccaggattcaaggtttggaaagagtgttcatgataatggatggggaatgtttactgattttctttcctacaaattagaacgtgccggtaagaaactggttcgtatcgataagtggtatcccagttcaaaaatctgcagctgctgcggaaaactcaaaaaagagctgaaactggaagaccgtatgtatagctgcacttgcggaaatcagatgaatcgtgatgagaatgcagctatcaatatttgcagggaaggcttgagaatattgggagttgaacttgatgcagaaagaaaaatctcctgattttccccaaagaacatagattttgtttgggactgcgtagatacgaaacagttccgctcataataacagaaccgtgggacacacggggatagctcgcctatgctttgcccaatagggcaatcgaacgagaagcccccacttcaagcgttagctaagtggagggagtatgtcacggagatattccaattgctgcctgagtattttgctcatgaaagtatttttaggaaaccaagagagaaggaacgtataatatgaaaacttataaagttggtctgattcgggtgctgaccacagaggacgaggaattgctgcagctgcatggaaagctgatagaatcgtatttccctatgttccaggtggtgtcacgatgtattccggatcaaccggagggaattcatgacgatgaaacattcgctgtaggtgtacctaaggtggtgaatcttgcagtggaactgtggaaggaaggctgtcaggctattattatcagctgtgccggtgacccgggagttccggaggcaagacaggccgtaccgattccggttataggagcgggatccagtactgcagcgttgagtctgttttttggcagtcatccggctgtgttggggattactgaagatgtaccgtcaggatatcagcggatattcggtgatcggatcgtagacaatgcaaagggagatggggtagaaaatgtcctggatttgatgacagacagaggatatgaggccaccatgaaagcagcggctgcgcagaaagagatgggggccgatgtgattgcccttagctgcacaggaatgtccagtatccgtattgctccctccatcgaaaagacagtaggaattccggttttggatcctgttttatgtgagggactgctgacattgtttgagctattgagaagagaaaatatggaggattaggagttagaataggaagcttcgtctatactaaaatataggcggagcttttttgtgtataatgattgtatcttaaatggaagatcgattataatataaatagacagaaaaactggcggtttatataaatattatgctgggtacacatacattcccagcagctgctgaacacagtaaaaggcaatggaggcaccggataaccatagctgcaactgtggcgcagaaagtgaatgagtgaaattatgaaacgaattaacaatgttatgccaattatttctggaccctgttttggttttgccggaatttttgtacacgaattacggatcgtacttgctaagcttgtgctttcgggtaaaaagcaggaagttgtggaggaataggatcatgtcaaaagatgagtatttgattaccgatgcgccgctgaaagcgttgacggtttttgcaatgccgatgattctcggcagtttttttcagcaggtatacaatatggcggactccattatcgtcggccagtttgtgggttcctccgcactggcggcggttggcgcctgtgcagcgctgacgaatgttttcatttgtgtggcactgggggccggtgctggtgcaggtgtgcttgtgagccgctatttcggtgccaaagagtatggaaaaatgaaaacgattgtgtctacatcactgatcagctttttgctactgagcatcatccttggtgtctttggcttttgtttttcccatgcgatgatgagcggattacagactcctgccgatattctggaggaagcagtgctgtacctgcgggtctattttgtgggctttccgtttttgttcatgtacaatattctctctaccatgttcacttccatcggtgaatcaaaaattccgttgggactgctgatcttttcatcaatcctgaatattgtaatggatctttggatggtagccggtctgggacttggcgtgttcggtgcggcgcttgcaactttgatcgcacagggcatttcggctgtgttttcacttttgattttcttttaccggatgcggcggtataagagtatctttgcctggtttgagggacaggagctgcgctcgatgcttcggattgctgttccgtcggttcttcagcagtctaccgtatccatcggtatgatgatcgtacaggcggtggtaaatccttttggaacacaggcactcgccggatacgcggcaacgatgcgtgtggagaatgttttttccctgatttttgtgtccatcggcaatgcggtttccccatttgtttcccagaatcttggcgcaaacaaaacccagcgcatcaaaaaaggctaccatgcagcattggtgctggatgtgtgttttgcggcgcttgctttccttgtcattgaaacgctgcacacgcagatttcatcactgttccttggaaaagatggaaccgccctggcttatcaggtgtctggggattatatgagatggcttggttacttctttatctttatgggaattaaaatggcgaccgatggagtccttcgcggactcggaatcatgcggccattcctcgttgccaacatggtaaatcttgcgatccgcctgtccgtggcgttgattggtgcaccgcgttttggcattaattttgtttggcttgccgtgccggcaggatggcttgccaactttttggtgtcctatgcggcactgagaaaatcctggccggctgagaatgtggagtcatcccgataaatttggatgtaccgaaacgaaatacatacttttgccttgtttgatttatgaatatcgattttgttaaaaatatgtatttgctttagaggaaaaaaacgaatataataacataaactgacagaaggagaaatttgtgatgaagagacgggaaggttttacactggttgagctattgatagtggtggttattattggaatactggtatcaatttcaattccgatttttacggcacagatgcacaaggcgaaggtggcggcagattgggcgaatctcagggcatattatgcggaaatacaggcagattatatgtctacccagcagagaaatccgaaggttaaactttattgggagacagataacgctgatgactggcactcggtgacttttttagatggacataaggctgagatgaaggctggaacctgtctagttaattttgaggatactgaggatcataaaggatattcaattgtatatgagtgtaataaagatcatgcaaaatgttacttaggcttaggagcggagcatacgaaaccgtaacaatgatatagcttgagaatacataaggaatttccggttctaatgctggacatccaccccaaagtcaagtataataaactagaacagttgtacgattataataaacgggtaatcagagcacaagcggacatctgatttcccgtttttgtgttgcaatgtatccggaagaagctgccggcggcaggttctgtaggtgaatagaaagacaaacagaaggaggtaccctatccgatgtcaagaaaaaatccgttcgtcatgcccatcctcaaatgggtaggcggcaaacggcagctgctggacagcatcaatccgctgatcccggaatgttcgacctattatgagccgtttatcgggggcggtgcggtgctctttgggagacagccgaacaaggcggtgatcaatgactccaacgaagagctgatcaatgtataccgtacgatcaaggaagatccggaagagctgattgcggcgctgagcgcacataaggaacagaattgcgaggagtattattatacggtgcgggcgtgggatcgtgacaaggagacgtatcagacgcggaccaacgtcgagcgggcagcgcggattatctatctgaacaagacctgctacaacggtctcttccgcgtcaacagctccggcgagttcaattctccgtggggcagatataagaacccgaatatcacgaacgaggcgactatccatgcgctgaatacgtatttaaataaagcgaatatcacgatcaaatgcggcgattaccgcgaggcgttaaagggcatccggaagggcgcgttcgtctattttgacccaccttatatgccgatcagctcgtcggcgtcgttcacgggctacacggctgggggcttcggggaggaagagcagatcgcattaaaagagcagtgtgacatgttgaatgcaaagggcatcaagtttctgctttccaattcgtcctgcaaatttatcgaggatttatataaagattacatcatcgaccacgtggatgccaagcgcgcgatcaacgtgaaaccggagaagcgcggggagattcaggaagttctggtacacaattatgagcttgattgacgataaatggagaattttatttgataaataccggattgagcgggaaattgagaaatatgggcggttttacattaccgccgaccagatccgtgaagtcaaggaaccgcgtctgatgacgaaatttgatacgcgggaatccctgccgcgggtgtttggaaagaaaatttcgattcttccggtgtcgcgcggcggctatgtgctgggcgagtttgacttatatcaggattttccggagattccgtccggtatcaagcgggtgacgagcgcgaagatacccgattactttgagtccatcgaccttcatgacatccgttcggaagccagcgcgatcaacgttatgagcatcacggggattctggatgattttctgggcgaagatcgcatggtgcagacggtttcggggcggatggggtctggaaattttgagttttatgtcagcgactatcaaaaatcagagctgattgagaaaaagccgcttatccaggtacagaattcgcaggtcgagatcgacggcggatttgaaaatgagaatgtatttacgctgatcgagggaaaaaacgtcgtccacagcaattttctgatccggcagctctattatccgacgagactctgggcggggaagatacacaagcggatccgtccggtgtttatggtgtattcgaataatattttccgtttgctggaatatgaatttacggatctgcgctattacaattcgctgcggctggtacaggagcgaaattacagcttagaggaaattgagatcacgctggatgatttatacgatgtctggacacggacgaaggtcaaaccggaaccgccggttacctttatccaggcggacagcttttacaaggttatttcactggtggaacggctgaacgagaatccaatgacgggcggggagatcgcgcagctttttggatttaaggagcgacagtcggactattatttcaacgcgtgccgctatctggggctggcggagaagcagacggatgaggacggcgtgaaagtgcatatcacggcgataggaagacggcttttgaaactgccgtatagggcgcgccagctcgaatacgtccgcctgattctggaacacccgattttccacgatttatttgaagctgcccttcagatcggagatgttccggacaaggagtatgtcgcaaagaaaatgcgggaataccaggtctgtggggagaatctgatcgtgcggaggtcaagttcagtgcgggcatggctgtactggattctgacgctggtgaacgaaggatagggaaatggtgcggaattattatatgtatccgttatcatgctaagggggtaatttcgtctcagatgcggcggcgtccgtgcatgttatgcctgaccgttagaaaaacagaccatttggacagagaataaaatatagaaagttacaggacagcatatgggcagacaagagcagacaaatcatcttttcagcaatcgcgatctgcggattcttctggttccgctgatcgtagagcagattttaaactccctgatgggtacagcggacagcattatggtcagcaacgtgggatcggcggcgatctcggcggtctcgttggttgactccatcaatattttagtgatacaggcattctatgcgctggcggcaggcggcacgatcgtctgctcccagtacatcggacagaaagataagaaaaatgcggaggaatccgcgagacagttatcttttgtggtggcgtgcatctcgtcggcggtcatggcagtctgccttctgacacgcggaccgctgctgcggctgattttcggcagcgtcgaggcggatgtcatggaggcagcgcagacctatttcttctacacggcgctttcgttcccatttatcgccctctatgatgccggttcctcgatctaccgggcgcaaggaaatacaaggcttccgatgacgatcgcggtcgtctctaacgggttaaatatcgccggaaatgcggtgcttatctggggcttccatcttggagttgccggtgcggcgattgccacgctcggttcccgcgttatctcggcagtggtggtgttcgcctttttgcacaatcccagccaggaaattgcggtgcgtgactatctgcatatccgtccggacggacgccggattatgcggattctctcattgggaatcccaaacggtatcgaaaatgcgatgttccagtttggaaaacttgcgattcagtcaaccgtctcgaccctcgggacgatcgcgatcgcagcccaggcgatgacgaatattctggaaaacttaaacggcatcgcggcgatcggtatcggaatcggcatgatgacggtggtcggacagtgtctcggcgcggggcgcaaggatgaggcgatctattatatcaaaaaattgacggcagtggcggaggtcgtcatcatcgcaagctgtgcgctcgtatttctggcgacgaaaccggtcacgattctgggcggcatggagccggagagtgcgaagatgtgtctctacatggtcggatggatcacggtggtaaagccgatcgtctggacgctcgcatttattccggcatatggaatgcgggctgccggggatgtgaggttttcgatgattctctcctgcatcagtatgtgggcgttccgggtgacgctgtgcatttatctctgccgcgtccacggcttcggaccgatcgcggtgtggatcggcatgtttacagactggacgatccggggcatcgtattcacattccgctttatgggccggagatggctcgcgcataaagttgtgtaaaaaacagagggagcaaaatgaaaatggagttacaaatactggattggattcagcagatgcggacgccggtgggcgatgtctggatggtgtttatttcgcggcttggaaatgcaggaatgatttggattctgtttacatgcctgctgcttatgattccgcggacgagaagatggggagctgcgctggcggtagcgctctgtctggatgcgatcatctgtaatatcttactaaagcctatggtttgccggatccgtccgtgcgatgtgaatcagacagttcagctgatcattgcccgcccggcggactattccttcccgtcgggacatacggcagcttcgtttgctgcggtcgcggctctgtactttgccggggcgaaaaaatggtggaaaatcacgttgcctctggcgatcctgatggcgttttcaagaatgtatttatatgtgcattacccgaccgatgttttgggcggcatgattgtggggtgcgcggcggggtattttggaaaccggctggcggcgcatctgatacggtcctggagacagaagatgaaaaaaccagaggacagaaaaaatagataattttatgtaagagatgccagaagttactgttcacgcatacgtgaacagtaatgccagaacacctgtaattaccccgtttttctcttgatatcctttatttccgatggtataatttataatcgaaataatttcttttatgatagaaaagggatgattatgatggggttagaccagaatcagtaattttattcattgttaaaaggtacggcgtgatctatcgactccaaagcttaggatgataggaactgcgttttttgatgatgaggtacctggaaagcgaccaggggtaatgtgctctcggaatctttctgtgcttgattttgtgagatgatttttttgtcagttgtgcccaaatttctgaggcgtacgcggtgcgtacgttgatgaaattcgggtgcggctggcggaaaatcagccacaaaagcaggtgcagaaaagactccgagagtacattatagagtgatggaggagaaagacatgttaaattacaagaaatataagagagttccggtggtagattacccggagcgtgagtggccgaataaagagattgagaaagcgccgatctggtgcagcgttgacctgcgcgacggcaaccaggcactggttgagccgatggtcgtagaggaaaagatcgagatgttcaatctcctggtaaaacttggatttaaagagatcgagattggcttcccggcagcttcccagattgagtacgattttctgcgccagttagtagagcgcaagcttatcccggacgacgtagttgtacaggttctgacccagtgccgcgagcacctgatcaagagaacctttgatgccatccagggtattccgaaggcgatcgtacatatttacaattcgacttctaccttacagcgtgaggttgtattccatgcagaccgcgaggaagtaaagcagatcgcgatcgatggtacccgcatggtaaagaaatatatgaaagattacgacggaaaagtaatccttgagtactctccggagagttttaccggaaccgagcttgattttgcactggatatctgcaccgctgtacaggaagagtggggcgcaactccggacaataagatcatcatcaaccttccggcaacggttgagatgacgactccgaacgtatacgcagaccagatcgagtggatgaacaagcattttaagaaccgtgacagcattattttaagtatccatccgcacaatgaccgtggtaccggcattgcagcgaccgagctggctctcttggcaggtgcagaccgtgtcgagggtacactgcttggaaacggcgagcgtactggtaatatcgacatattaaatatcgcttacaatatgttctcccagggtatcaacccggagttaaatctggaaaatgtaaaggagatcaccgaggtttgtgagcgctgcacaaagatggccgttgacccgagacatccgtatgcaggcaagctggtatttaccgcattctctggttcccatcaggatgcaatcagcaagggtatgcaggcgctgcagaagagaaacgacggcatctgggaggttccgtacctgccgatcgatccgagtgatatcggacgcgagtacgagccggttgtccgcatcaacagccagtccggcaagggcggcgtagccttcgtcatggattccttctacggattccgtcttccgaagggaatgcacaaagagtttgctgacattatccagaagattgcagagaagcagggcgaggtagctccggagcagatcatggacgagttccgtgcaaactacctggacagaaaagagccgatgcacttcaaaaaatgccagatcacagacaaggagtacgagggcggcgcattcgcaaccgttgcaactcttacctttaccgctcatgacaccgagcgcaccgttgagggcgtaggtaacggaccgatcgatgcggtacagagagcgatcgaggaggcacttggcatcgagatccgtgttctggactacaacgagcatgcacttcgttccggttccggcgcacaggcagcgtcctacatccatctgatggatgtaaagagtggccgggcaacctacggtgtcggcatcagctccaacattacgagagcatctatccgcggtatcttcagtgcggtaaacagattgttttactaaaaaataaaatgaatcaattcagagtgactgcttgtgtgtggacagtcgctggtttgggcggtatgcagaaatgtgtgccgctctttttctgcctgctcatcttctttaaaacaggttttagcggatactccgcattccaatattgacaagaacaaaattcaggtgttacgatatagaaaactgaaaaactgcgtgaaatgacgatattcgactgaaaatttcatgcttatgaaaaagagaaaggaagtccgtgaaaatgattctaagggcgaagtatttaattaccggagatggcagaacctgtttgcaggatcaggcggtgtatctggataaagagggaaaaatcggctggataggagacgctgcggaagcggcggggcgctacccggaagagatggtaaaggattacggcgaggcgacgatcctgccgggactgtttgatatgcatgtgcatttcggctactactacagccagccggatctggataattatgacgattatatggtggcatactatgcgctggagcaggcgaaacagtcgctgcggctcggtatcacgacggtgcgcgatctgtcctgtccgcccaatctgatgaagcagctgcgcctggcaggtcagaagggatatgtgacggtcccgcggatcatccatgcggacgcaggtatctgcatgaccggaggacacggacatcaggatggggtcgaggaggcggacagcccgtggggcgtgcgcgccgctatccgaagacagctgcgcgcgggagctgactgggtcaagatcctgacgagcaaccgcggcgatattccggaatttacccaggaagaactggatgcagcggtggatgaggcgcaccgccagggggtgaagatcgcggttcattcgggtacgcagccgtcgattcagatgtgtattgacgcgggatttgacacgatcgagcacggaacctttttaacagaggcgcaggcgcgccagatggcggaaaaaggaatcgcgtggacgccgacgatcacggcgtacacatatttgtatgagcagacaaagcagatgatcgaggcgggtgtggacatggacaacccgatcgccgccagagccgttcacgatcaggcatttttccaaccggcgtttgaggcataccgggataattttaaaaagctctatgacacaggggtcacggtgctggcaggcagcgatatggtactttacaaggcaccgccgcttccgattcatcaggaactcggctatatggtagactatggaatcacgccggtggaggcagtgagaaccgcaacatacaatgcggcgagcgtgcttggaatcgagaaggagacgggtagcctgaaagagggcctggcgggggatctgctggttgtaaagggagatgtctcaaagaatattcgtgcgctggatgatgtgctggaagtgtatctggcaggaaaaatggtgtatacggtgtaaaagatatgaaaaagctgtctttttcagaagtgcaggagtttttgtttcctgagatgggaaaaccaaaaagaaaataaaaacatcttgaaattctaaaagagacagcttttattatgtatctataccgcgcagactgtttaaaatacgacttcattcccatgaacaaacggattcggcgtgtgtacggtcagaatcttaacgacacggtttgtgttgttgacccagtcatgcggggtctgggagtggatctggatgctgtcgcccggattcaggcagtattcgctgccgtccagatatacggtcaggataccctccagaacgtagataaattcttcaccgtcgtgctgattcatctcaagctggttttcagagcttgtggtggcagacggcatcaggtggaagatacgcggaagacaggcaaatccctgtgcatttccattgaccaggtactgtacgatctgggggttgatctgggaacagtgcatggcaaaactccggctgaccggggatttctcctgatcggcggaggagtcaaagaacgaagacagactgactccgagaatcgtagcaagctttgccagagagtcgattgcaatcgaagagagaccgcgctccaactgggaaagaaagccgatggacagaccggactcttcgctgagctgtttcagtgtgtatttttttgcggtacggaaggcttttaccttggcaccgatggtaacattatgatccatagatatatcccccttgcggcatcattctttaatataatatattcactatacaggatttttgttggaacgtcaaccaaaggggtagttttgacgggtaaatttaattcgaaatggaacgattttttgggaaaagaccaaaatgggcggcggatttggagaagtgaatcagtgagcggatagatgggggagaaaatgggatagagaaaacaggtggacagaaaataaaaacagggggagaaacagaatgaaggaaatagtacgtgcttcgatcgaggattgttcccagatcgagcgcttccgtttggtgactcgtctggggaatgcgattctttccaatggcggggaggtattccgggcggagcaggcgatggagtatgcggcgcgggcgctgcgtctcgaagcattcaatgcgtatgtgattgcaaatgggattttttcaaatgtggtgattgacgggcggttttattccagccgtatctgccatgtgccgctggcacctacgattctatgccgggtggatgccttaaacgatttgtcgagaaagattgcggcgggtaaatgtggtccttatgagatgcggatgcgccttgagcagattgaacagatgaaagtgatcgaaaatcggggaaaggttctggcggcaggaattggaagcgctggattttgttacctgttccagggcagcctgcgcgatacggcggcggcatttgtgacgggcgtgctgctgtatttgttccttttatacgcagctccgcgcttttcctcgtcccggatgatgcagacgatcatgacgagcagcgtgcttgcattgtgctgttgttttctgtgctggatcgggctgggagaaagcctggatcatgtcatgatcggagctgtgttcacgctggcgccaggggtgccgctgactaattcgatccggaattttttggaaaatgattatttatccggtctgatccgttttgtagacgcctttttgacggcgggctgtatcgcgatcggagttggtgtggcactgcggttctggatgtttgcgatgggaggtatgctctgatggaaatggcaggggaaattctggggcagcttctggcggcctgtgtcggaactgccgccttttcggcgctgtttggagttccgaagaagtattggctggattgtggtatctgcggggcagtcggctggggcgtgtatctggcggtcatggcagcttatcagacgccgatcatcgggaccttcgcggcgagcgcggttttgacgatgctgtcgcgctgtctggcggtacagcggaaagcgccgacgctcctctttctggtctgcggcatcttcccgcttgtgcccggagcggcgatctattataccgcctacaacttttttatggggcaggaagcgctggcgcttcagtatggtatggatacaatcaagatggcggtcgcaatcgggctggggatcggagcggcatattcgcttccgggacatctgtttggatggaagtgggagatagaggtgtgggaacctgagaaagagggtaaaaagtagccgcggtttacttttcctttaaaatatagtagaataccctcatactattaagaaaaatatgatcagctgcggcaggcgtggggtgttctgcgggcttgatggaggggacagacatcgatatggacagtaaattttatgagccagaagttctgaaacagctgcagggagagattctgtcgattctggatgattttatccggatctgtgaagactatcatctggaatatttcgggatagccggaacgggaattggtgcgctgcggcacaagggatttattccctgggacgacgatatcgatattgcgatgccgcggcgggattttgagcgcctgctccggatcgtggaaaagaagatgagcgaccggtatctggttctcaatgcagagcgatatcccaattatccgctgatgacgacccgtctggtgaagaaggggacggtgtttgttgaggaggttatgaaggatgtggactgtccgttcggcatctttctggatctgtatgtgcttgacaatgtggcggacaacccggttctataccagattcagtcgtggacggcatggttctggagtaagctgatgattctgcgggcgattccgcgtccgacgctgcagcagcggggcatcaaggcgaagcttatctgggcggtctgcgggatggtctacaaggcgatgaagctgctccatatctcgcctcagtggctgcggatgcgctgtgagcgggtctgccgtaaatacaataaataccggacacgccggatggcatttctgccggacacaagcccatactggaatgtcgtggatcggacgcgctgttatccgctccggaagctggaatttgagggcagacgcatgaatttcccaggaaatatcgaggaaatgctgacaaaaatgtatggcgatttcatgcagcttccgccggttgaaaaacgcaaaacacacacgccgagccggctggaattttcaaaggaagagatactgtagtggtaaaatatttagcgaacgccctgatcggtggagacgggcagattgaaaaacgaaatatgagctggaatatgatagggagctttctctatgcactggcgtccatggtgctgacgatcgcggtcatccagattgtcggcgaggatgagggcggtatcttctcctttgcgtattctacatttggtcagcatatgtttatggtggcctattttggcatccgcccgttccagatcacggatacgaggcggcggtttacgtttggcgaatatctgcggctgcgcctgatgacctgcggcgcggcgctggtagccgggcttttttatgtgacggtgatcaaccgggactatgcctttgtcaaggcggcgacggtgtttttaatggtcgcgtacaaggtgatcgacggtttcgcggacgcttacgaggcagaatttcagcgtgatggacgcctgtatctgacgggcaaatcaaacgcattccggacggttttatcggtcggtgtctttttaggcagtttgaatgcgacccacaacctggttggctcctgcctggcggcggtactggcgcagctggcgggcgtgtgcctgtttgatttttcggtaatcggtcatctgccgcaggtggactgggaggtccgctccgggcgtgtcgggctgttgtttaaagaaaatgtagtcctgtttttatcggttattctggatttttatgttttttctgccgcgaaatatgcgatcgagggcaatatggcggacaagtatcaggcggtattcggtgcgatctttatgccgaccagcgtcatcaatctggtggcaggcttcgtcatccgcccgtatatcacgaaactctcggatcagtgggagcggaatgcgctcccggaatttgccgggacggtaggccggctggcggcaatcatcgcggcgcttacggcgctggcagtcgggggtgcctggattctcggaatcccggttctctcaatgttatatccgaagattgcgtatatgctgcgggaatgccgcctggcgctggcgtttatcattctgggcggcgcgtttaatgcgtatgtgaatctgttttattatgcactcatcattatgcaggagcagaaacgaatttttctgggttatgtcggtgtgacggcagcggcgctccttatttcttcgccctgtgtacgggcggcgggactgctgggaggatcgctttcgtatctgcttttgatggcggcactgactgcctgctttggactgacgtcgcttgtgatgtaccggagacgggtacgcgggatatagaacttgtttagaatgtactctcggagtctttctgcacttgcttttgtggctgattttccgccagccgcacccgaatttcatcaacgtacgcaccgcgtacgcctcagaaatttgggcacaactgacaaaaaatcatctcacaaaatcgagcacagaaagatttcgagagtacattagatagatttggaggaaatgtatgattaattttgcggtaggaccggttcagatggacgaggaaatccgggcgatcggggcggaagaagtgccatatttccgcacaccggaattttctgcaattatgaaggaaaatgagcgcctgatgaagcagttcaccggggcgcctgaggatgcacgggcggttttcctgacaggttcgggcacggcggcgatggaagcggcagtcatgaacctttttacagagcgcgaccgcgtgctggtcgtaaacggcggcagttttggcgcgcggtttgcgaaaatttgtgagatccatgaagttcctcatgaggagatccagctggagagcggacgggcgcttcgggcagaagacctggcaccgtatgagggaaaaggatttaccggatttttagtcaatgtccatgagacttccacgggcgttctctatgatatggagctgatttcggacttttgcagacgaaaccagctgattctggcggttgacgcggtcagctcgtttcttgccgatccattttggatgggaaaatggggcgttgatctggtgctgaccggttctcagaaagcgctggcacttccgccgggactctcgattctggtgctgggggcgcgtgcgatcgcgagagtgcaggagacggcggtccgctcgatgtattttgatctgcgcgactatctgaaaaatggcgagcgggggcagacgccgtttacaccagcggtcggagtgcttttacagcttcataaacggctgacgatgatcgaggaaaaagggcttgaggcagaacaggcacggatccgctgtcaggcggaggatttccgaagcaaaataaaagatcttccgtttgagatcgtttccaattctctctcggcggcattgacgccgcttcacccgacgggcgtggacaaagaggggaaagtggtctcagcgcatcggatttttgagattttgaaggatgaatacggcatctggatctgcccgaacggcggcgcgcttgccgacacggtgttccgtgtcggtcatatcggcgcattgacgccggaagacaatgacagcctgattgcggcatggaaagatatgcaaaggaggggacttctgtgaaagtattgattctggcagcgggacggggaacccggatctcgcgttatctgtcgggaaaaccaaaatgtacggtggatatcggcggcggacagtgcctgatcgagtacacgattgacctgcttcattcccgcggcatccaggatatcggcatcgtgctgggctatgaggcgcaggtaatccgcgaggtcttggcagacaagggagtttcctttttctacaacccgttttacgatgtgacaaacagcattgcgtctgcatggtttgcgaaggagttcctgacaggggacgatctgctgatcatgaacggtgacgtatacctggaggaaaaattgcttgaccggatcctcgcgcagggcaggagcccggtgatgtttgcggacgagagccgccgggagacagcggattataagttcttctatgaagatggaattttgaaaaaatatggaaaagagctgaccggggatgatgtgacgggcgagtacatcggaatcggacggttttcagcggcatttatgccggaatttatctgccggatggaggagatgatcgaccgccaggagcacggcgtctggtgggaaaatgttgtttacagcatgaccgggcagcagccggtctatgtcgaggacgtcagcgggcatttctgggcggaggttgattatattgaggattatgagcgcatcctggaacacaggggcgtggagaagatagtgcgctagagcgcttgatttgaaagacaaaacacggttcacgggtaggcacttttggaaccgaaagtgccgtaagaaaacgtggtggcagcagaaatttaccgaatttaaacgggaaaaataagggagaagtacagatgcagtttaacaggcattttatcaatcgaatagagaaaaaagatgtgctgcggctgcttctggcgcttgcggcagtctttgtgatgggtgttctgggcgagtttgtctgcaatttcccggcgctccgggcaaatggatggacgcggcaggcgacgcggacgatcgctctggacgaggtgcaggtgagcggatttgagcgggtagagacagaaaagaacggtttgggtgaaatcaccggagagccggggcaaaccattggagagaataggcggcaggtggaaaatacagaggtgctgcagctttcggatgcaagcggttatcttcacattccactggacggcagctacgtcagccagtttctttaccattatgattacgatggtctgttaaatgctaccgtccgcctcggttaccgcaacatctatggcgagcagcgggagcacaacgcaaagatggtcatggaccgcaactgccgggtgctgaaattttcttcggttccggtgaatgggaagctggactacgtggatcttctgattacgcgggaggatctagacgaagaagggctttcctacatgaattttggcgggatgccgcttgcactgaccgggtttgcgacggtggcgcgggcaggtatcaactggtaccggctgggacttttctggtgtgcggcggcggttttgatcgcacttctctgtttccgggatttcgtggcaaagcgcatcgaggttggatttctgctgatctccctgacgtttggaacaatattttcactgtcgctcccggcaaataaggtgagctgggatgaggaagtgcatttcgcgcaggcattctggatggcaaattaccggacgccggtgcaggcggaaccggcgcttttacaggagtttacgacgggcgtagatacctggccgtacaatcagccggagagtcgggacgagcaggcggcgctcacttcgtatctgaatcagaatgcgggttaccggcacggtgaacatctctggagtacggatctcaacaaaacgacgatgactggatatgtgggttcggcgctggcgctgaaagcgggagggctgcttcatatcccatttggaatcctgtataagctggggaggctgggaaatctctatgtctatgcggcagttttgtattttgccatcaaaaagacaccggtcggcaaggcgatcctggcatttctggcgctgatgcccgagccgatgatgctggcgggggcatattcctatgacccgaccgtcacggcatttttgtggctgtctttcgcgggcattctggaagcggcgcttggcgggcggaaaatggactggaaagcgtatgcgcttatcgtgcttacctttgtatggggctgccgcgtcaaggcggtatatgcgccgctcattctgctgggactgatgattccggcagaaaagttccgttctaaacgggaaatgtacctgatgaagggtggatttatcgtgatctgcggtctgatgatgttatctttcatcctgccggttctgatcgcgccgcgcgatatcggggatacgagaggcgacagcaccagcgagaaagggcagatggcatacattctgggacagccgcttgcctatgcatgggtgctgatgtgcaacctgttccggacgcttccgtcctatgtgctgggcgaaaattccctggggcttctgggacacacgggaacgatgtcatttccgtgggcgctgtatgctggttcggcggccgttatcctcacagccgggcagtcatcctgtggaaaacgtctgtcaaaaaaacagaagctgtggatatttatactctgcgtgggaacggcggtgctggtctggacttcgatgtacatcgcatttaccagaccgggtaatacctatatcgacggcgtacaggggcgctattacctgccatttctgccgcttgtctggctggttttaaacccggagcgggtgatggtgcggatggagaataaaaactatcatgcgctggtgttaggggcggcggcgctgattctggcggcaacggtttatctggatatctggatgaagttctgccggtaagcataagcaagctagaagaaggcaaaggttactgtatacgggtaggcacttttggaaccgaaagtgccgtaagaaaacgtggtggtagcaggaatttgccgtatttaaatgcgaagccacggcaaattccgttactgggcacgtatgcgtgaacagtaacaggcaaagatgtttgaaacgttaaaatctatcataagtctggtaaaaataaattcaagcaggtaccgctcttgaaaaacgagaaggcagaagtgcggcatgaaagagcgagagagaaagggaacgagatgcagcaggaaatcattcatacatttgcggtctgtgcatacaaggattcgccgtatctggaagaatgtctgcgttcggtgacgagacagacggtcaaatcggaggtgatctgctgtacctcgacgccgagcagctatatccgggagctggcagcgcggtatcaggtgccgctctatgtgcgggacggggcgagcaatatccgtgaggactggatgtttgcctatggaaaggcgcaggggcgtttcgtcacgatcgcccatcaggacgaccgataccgcagcgattatgccgaaaagcttttaaaggcatggaagaaatatccggatctgctgctgtttgcgagcgattatctcacgatccgcatgacggagaaagagggaaaaatgaaagccattccggagccatttaacatggtctggctggtaaaaaagatactgcgcctgccgctgcggcttcgtttcctggcaaaccgcacatggatcaagcggagcagtgtctggtttggcaattcgatctgctgtccgtcctgcacgtacaataaagaacagattggggacgatatgttccattcggagtatgattttgcgctggactgggacaacctttacgagctggcgggcaaaaaagggcgttttatctgttcagaaaaaccgctgattgcctaccgcgtccatgcggcggcgacgacgaaagcctgcattgaggacaaccggcgcccggcggatgagatggcgatgttccggaaaatgtggccggactggatggtaaagattctgatgcatttttacagaaaagcctataaggagtacgaaaaatgagaaaagccgatgtgattatacctacgttcaaaccgggggataagctggaaaaacttctgcggcggctgttggaacagagtgtgccggtgggccgtgtgatcatcatgaatacggaagaaaagtactgggatgctgagcggtttgagtccttatttgagggggaagatacgaagctgaccgtgtgccatatccgccagtcggaatttgaccatggaaggacgcgccatgagggaattttgaaatcagatgcggatgtctgcatctgcatgacgcacgactgcgtgccgtatgaccggaatctggtgaaagagcttctggaggcgctggatgcttcggaacgtgtggcggcagcatatgcgagacagcttccggcggcggactgcggtgtgattgaacggtatacgagggactttaattatccggcggtgagccgtctgaaagggaaagaggacgaggacgagctgggaatcaagacgtatttctgttccaatgtctgcgcggcataccggcggaatatttacctgaagcttggcggatttacgaagaaaaccattttcaacgaggatatgatttttgccggacacgcggtggaagccgggtatcagattgcctacgcggcggacgcgcaggtcatccattcccacaattatacggcgatgcagcagctgcaccggaatttcgaccttggcgtatcgcaggcggatcaccctgaggtgtttgggcgccttcattcggagggcgagggaatccgtctggtgaagaaaacagcgaaatggctggtggaaaatggtcatgtgcttcttctgccgcagcttgtgatggcgagcggaagtaaatatgccgggtactggctgggaaagcattataaaaagctgccggaggggctgattcgaagcctgacgatgaatccggcatactgggaaggagaagcgggcgatggaagataaggcgttattgtccacagaagaagcttctggggcggaaaaagccgaacttttgatagtcataccggcgtacaacgaagccgaaaatatagagcgggttgtgaaccatctgactgccaattttccgcagtatgattatgtggtcgtcaatgacggatcgcgcgatgagacggcggcgatctgccagagaaatggatataatctgttgaaccttccggtcaatctgggactggcgggagcatttcaggcgggacttaaatatgccgacaagtacggatatcaatatgcggtccagctcgatggagacggacagcaccgtccggagtatctggaatccatgatcaagaaaatggaagaaggttacgatatcgtcatcggttcccggtttgtcggggagaaaaagccatttacgatgcggatgcttggaagtaatctgatcgagatggcgatccgcttcacaactggtgtcaatatcaaggatccgacctcgggaatgcggatgttcagcaagcgcatgatccgcgaatttgcatcggggcttaactacggtccggagccggacaccgtttcctacctgatccgccagggcgcgcgggtggcggaggtgccggtcatcatggatgaacggattctgggagtcagttacctgacaccggtcaatgcgatgcggtatatgcttaaaatgctgatttcgattctgttaatccagaatttcagaaagaggaggtagcgccatgacgccaacactcagagttgtcctgatcgtcgtgtcgatcctgacaacctttatgattatgcggaagatccggcagtcaaaactccagatcgaggattcgattttctggctgggattctcgtccattctcattgtgttcagtatctttccggggctgccggatcttttggcggagctggcgggaacgtacacgactgccaattttatctatctggcggttattttccttctgattgtgaaaatgttccatatgtcgatcaaacagtcgcagctggagacgaaggtcaaggatctggcgcagaagattgcgctggatgaaaatgagcgggggaaagaggcacaaacatctgtaaaaaaggttgtcagccagaaaaacgaatgatatagttaaagatggcacagccgaaaaggatgatgccagttacgtattgaaaaatgaattgaaatacctgcataagaaggagatagaaaaatgggaaagattaaagtaacaccatgtgacatcaagggactttatgtaattgaaccgactgttttcaaggacgagcgcggttattttatggagacatacaatcagaacgatttccatgaggcgggactcgacatggtatttgtacaggacaaccagtccatgtctgtcaagggcgttctgcgcggacttcattaccagaaacagtatccgcagggcaagctggtgcgtgcagtgcgcggtaccgtatttgatgtggcggtagaccttcgtaccggttctgagacctacggaaaatggtttggcgtggttctttccgcggagaacaagaagcagttctacattccggaaggatttgcacacggcttcctggtactgtccgatgaggcagaatttgcatacaaatgtaccgatttttatcatcctggcgatgagggcggtatggcatggaacgatccggagattggcgttgagtggccgatcgaggaaggcatggagttgattatttcggagaaagaccagaaatggggcggcttccgggatgcattcaaattttaagaatggagttaggatagaatgcgggaactgatttccctgtttcgggaactgataggaaaaagaaaattggtcaccgagcttgccaaggcggatttccgcaagcgctttgtcggctcgtactttggaattgtctggatgtttattcagccgatggttacgatcgcgatctatgcgttcatcttcggtgaacatggcatgaaaaatgcgccgccggttccgggggcgacctatgtcatctggctgacgccgggtatcatcccgtggttttatttcagcgagattttaaatacgggcacaaactgcctgcaggagtaccattatctggttaaaaaggtagtattccaggtggagatgcttccggttatcaagcttatctcctgtttcctggtacatgcctgcttcctgatcattatggcggggctgtacctgattgacgggcgtatgccgtctgcaacctggattcaggtgttatactattcctttgcggcgtcgatgcttggactggcgcttacctattttaccagcgccgtgcaggtgttctttaaagatatggcgcagatcgtcggcatctgtctccagttcggcatgtggctgaccccgatcatgtacgacgaggcaatcttcaccagccgcgcatcctggctggagtgggtattcaagcttaacccattctactacatcgccgcaggctaccgcgacagcatgcttacgggaagctggttcttcgagcggccgacgatgacgatttatttctgggtggtaacatttattttgatgataataggactgaaggtattcaaaaaacttcgtccccatttctcagacgtactgtagatgggaagggagctgctgtagatggtgttgacggctattggattatcgagatgcgaacaacgataatctgagaagctgccagtgccgcctccggcagctcccttctgcgacaacttatcaataggagtttacataaaatggttttcagttcaatcatcttcctatgggttcttctcccctgcatcctgctcctctactacgtgagccccaaaccgttcaaaaacggcatcctgaccgtattcagcctctttttctatgcctggggcgaaccgcggtatgtggtgctcatgattttttcggttctgctcaactacggtttcgggcgtctggtggagaaattcgggaaaaagagatggcttttggcgctctgcgtgacgctcaatcttctgatcctcggctattttaaatattacaatttcctcgccgaggtgctgaatccgctgcttcgcgggtttgatatagcgcttccggcgattcaggtgacgctgccgatcggaatttccttctataccttccaggcgctttcctacgtggtggatgtgtaccggggcgaaaatcaggcgcagaaaaatccgctcaacatgatgctttatatttccttcttcccgcagctcatagcgggaccgatcgtgaaatatcatgacatcgaggagcagatcgaaaaccggaccgtcacgctggagggcttttcttacggcgtgaaacgctttattttcggtctgggaaaaaaggtcatcctggcaaatacctttgccgaggtggtggacgcggtctacgcgtatcaggcggcggatgtgagccaggcgatgctctggctgacggcgcttctctatatgctgcagatttatttcgatttttccggctattcggacatggcgattgggcttggaaaaatgtttggctttacatttattgaaaacttccggctgccgtatacagcgacttcgatccaggatttctggcggaaatggcatatttccctctccagctggtttaaagagtacgtgtacattccgctcggcggaaacaggaggggcacggcgcggacgtatgtcaacctttggacggtctttctgctgaccggcatctggcacggagcgggctggacgttcattttctggggcatttaccatggctttttcaacgtgctggagcgctgttttctgggaaaatggctgaagcaggagaaattccggccgttggcgcatatctatgcggtgtttgtcgtgctgatcggctggattttcttccgcgcggacacgatcgggcaggcattttcctttatccggtatatgtttgtgccgcacagcgcagtcgttttgatggaacgctacatgaaccggaaactctggatgtttctggcggcggcgctgctggcatgcggtccggtgcagtggttctggatgaaatggaaagggcgtgtgctggcgcaggatggctcggtgacggtcacaagctggatcggctacatggcgatcctgtggttttccattttgctgctcgtcaacaatacatacaatccatttatttatttccgtttttaaaagcggtgtagaaagcatgcttgcctgtgcgatgagaacataaaaatgaaggcatgggcggcagggcgtgaaagtacagaaagatggattcatgcagggagaagagaacgagagatatgaatcgagagacagggacaaaaatacttctgattggttcctttgcggcgagcctggtgctgccgacgcttgtctatccggcggtcaggagccatctggaccagcagaattatgaaaacagggaattggcatcctttccggaactgtcggctgccaattttgacaatattccgacggaatttgaagcgtattacaacgaccatgttccgtttaaaaatctgtttgtcaaggcgaagacaaagctggatctggagcttttaaatgaaagctcgatttcggatgtgacggtcggaaaagaaaactggctgttttacaccgtttcggaggacggcgaggatgcgctggcggattatcagcggacaaatctctatacggcggatgagaaaacagcgctggcggacgcgattaccttggtaaacgagaaaatgaaagagcgcggcatccggtttgtgatgtttgaggcacccaacaaggaaagtgtctatgcggaatatatgccggattcggtccgggtatacggaagtgagtcgcgtctggatgcggcgctcccggagcttgcggcgcagggacttccggtgtatgacatgaagccggagcttctgaaagaggcggacacgtatcagctttattacaaatatgatacgcactggaaccagatcggctcttttatcggaagccagcagattgcacagactttgcttggaacctctacaccgctcagtgcagtctcgattgaggcggcaggaccggcgtccggagacctggcgcggatgcttaacatggcagcagagtacagcgacgataccgaatatgtgattcagaattatctgccggaggtgacggctacgacggtggatatgaacgaggacaacagctttgcagtatttgagtcggattcgccgaatgataaaacacttctggtggtaggcgattcctttagccagaaccttaaatattttatgccgaagctataccggaaaacggtgtttgcgacctttgacacatacacggaggcgcttctggatgaataccagccggatgattttgtctatctgacggtcgagcgcaaccaggagctgtttgaggatgtggagacggttgtctggcgggatgaggtgccggagaaggacgggtaaggtgccggatgtccaggcggaagggggatgcaaagtttttttaaaactaaataaaaagaatcactcgtaaagtgctagttcgggtgattctttttttatgcctcttgattccatattttgttgcgcgagggttattataaaaaaatggaagaggatgtaaagagggaaattttgaaaagcgaaggtagaaggcttgaaaatcaggggtggatagattaaaataaatggataatatattatacaaaacaaataaaaaatagcattaatagataatatattatccatgatttaaatggaaaaaattaaaatagaatttccccaaagtttgtgtttatgggataataaaggagaaaggatagggcggatggagacaggaaagaaacttcaggttatgtatgaagacagactggtaggaactcttgcattaacagcgaatcacaaggtggcatttgagtatgatgatgcatggctggaagagggattttcgatcagtccgttttcactgcctttgaaaaagcaggtgtttattccaaataaggattattttgaaggtttgtttggggtgtttgcggatagcctgccagatgcgtgggggcgcctgcttttgcggcgtcttttgctggcgcataagcagcagccagacgattggacagtgttagaccggctggcggttgtgggaagatctgggatgggggcgttgacctatcgtccgcagcgggaactttcggttgaggagaaaaatgataatctggacgaacttgcggaggcctgccagaaaatattaaataccgaatactcggacaaactggatgaactgtaccggctgggcggtacaagcggaggtgcgcgcccgaaaattatgacgcagattcagggagaggactggctgattaaatttccggcacatatagatggaaaagatgcagggaagatggagtatgactatgcgtgctgtgcaaaacagtgcggaattgtcatgagtgaatcgagattgtttccctcaaggcgatgcaaaggatattttggaaccagacgatttgatcgggaaatagaaaatgggatggtaaagcgggttcatatgctgacggcagcggcgttattagaattggattttgaacagccaagtctggattaccatcaattgatgaaattaacgaaaatattgacgaacgggaaggcagaagatatagaaaacatgttccgccgtatgtgttttaatgtgtttgcccacaaccgggatgatcattcaaagaattttacttatatatatcgggaggaggaagagcaatggcgcctgggaccagcgtatgatctgacgtacagcaacacatattatggggaacatacgaccagcgtagatggcaatggacgaaatccgggtgagaaggagctgcttgcagttgggcttgcagccggaatgaaaaaaacgagatgtatggaactgataaaacagattcgtacatgtgtgcaggacatgttaggtcattatctttagagaggcaggagagcaatatggaagcacttatctgggaaactgcagatgaactggatcagaaactggcatcacggctgcgtaacatccggaaacgccgcgctatttcacagcagagactggcggacatgagtggggtgagttatggctcaattaagcgatttgaggcgacggggcagatttcccttttgtcactcacaaaaatcgcgatggcactggatttggcggaagagctgcgggggctttttacgcgggttccgtacaaaaatattgaggaggtaatccgcgaatcccgttaagccaccgttcacgcattgtgtaggcagcacccatccgcgtagccctgccagaaccgttcgcaggcgaccgcgcgagacgcccgaatgagccaaggtacattcttttttaggcgggatgcacaaatccgcaaatcgccgccggacgtttttgtttatatttcaagtatggctgtttttgtaacttttgtacatagtcagggtgtcaaaattggtacttattacatatattaacttatgtttatataattgcaaatgacttataagtttataccacttccggggatggtactttttgtttgacagtgttatattattgccatcgaaagaaacaagagattttcacagacggatatcgtaatagtatcataagaatattgcaatggatttccgcctatcatatgaaaaaatataattttatttgatggaggtaattatcatgatgaaagcaacaagaacattcaataacggtttatatcaggagaatttatatcaggcatattacaacacaccagcagaaaagcatgtagtttccgagtccttagagcaggaagcaatgccggtactggtacatcgtttagctgcacagttaggttataccgagtctgaggcagaagtagaaaaagagtttctgtgcgaaatgtaatggataatctgctcgcaagcttataaccatccggcagaattggatgagttaccaccaacctaaagcatttacgacagaacaaggcttctgaagccagaaaaagaaaaccgtctgagaaagaatgaaagattcttttacagacggttttctttttttaccgaatcgcatttttcatggatttcacgtattctgccacatacggcacacgggatatcgctttcttcttttatcagatttaccatcgcgccgatatcggtcgggatctcattccggacgccggtgacaccttgattcatggagtgattccatgcgctttgcgagatacctgcatatctccggcaactaacgtatgccctacgtcgcagagtactaggctgaaaatatatccagcttttggctgtgccctcagcggtccatttggcagcctgcatctcgacccggttctcagcctcccggactctctgtgcgcgcatatgctgctttgatctccgcttcaacggttttgatgtgttcgattttttgtcaatatactacgcatgatgtaaagtgtcaaatattttttgggaaaaattaaatttttttaaaattatgcgattctttggaagtatgttccagccttgccagcagcaaaatagcgaagaaagtgatcatttccgacgccaggaaagacagccagacaccgttcagcccaaacaggcgcgccagtgtgacagcgcaggggatgatagcgacggccccgcgcagcagagaaccggcgatggctggttttggctgcgcgacggcggaaaaataggcaaccagcaggatattgatgccagcaaagagaaagcccaggaaatacagccggagcccactgtgggcgtaatgcagaagttcggcgttctgctcctggttgaagatctggatcagtggatcggtcatgctccaggtcagcaccagaatgagcgcttccacgattaggcaggcgatgacgccccaggtcaggaactggcggctctgcgtgtgatcgccttttccgtagctctcactgatgagcggctgcgtgccctgcgcgagtccgttgaacaggcacatggcaacgacggagagattggcagtgacgccgtaagcagcgacaccgacatttccggcgagccccagaagcaggaaattaaagacgatcgcgatcacggcggaggatatttcgccgacaaaggcggatacgccgagctggcagcaggcgatcaggtggcgcagggatggagcgcggaaatggaatccgacctgattgtgttttcccaggtagtgcgtgctgcagatgatcatcgtcactagcgggcagaatgctgtcgccagcgccgcgccggtcagtcccagacctgccggaaacatgaagatgtagtcaaacacgatgttgaacatacttccggcgatggagccgagcatcgcgatcgccggagcgctgtcattgcgcgcaaacgccgtgaacgcgtagttggacataaaaaacggcgaggcagtcagaataatgtggagatactgctttccgagcgcggtcagccccgcgtctgcgccgagaagctgcaagattttatccgggatgaaaatgcctgccagcaccagcggaatgctgatgagaatatcccaggttacggcggagagaaaatagaagctggcgcttttgccctgcgcacggtcgatcgcataacgggtcgccgatccgatcccgatcatggcgccaatcgcatagatcagtccgtaaaccggtaaaatcagatttaagaccgccagaccatctgcaccggagtagaccgagataaaataggtgtctgcgaggatgtagacggaaattcccagcatgcccgccatgctttggaaaatgtatttaaaaaatttctgtaacataaaaaatctcccttgtatgtattctcataaacggtaacgaccattgtaccgaagaatgagaataaatacaagggagaatgtgttttttacagcgtcttggcccgctctttaatattctggtggaagttgatgatgtcatgctcatactcctcatccatcagcggcgaggtaatcataaaatcggcagtcgctttattgttggcgatcgggatatcgtaaacctgggcgattcgaagaagcgccttgacatccggatcgtgcggctgggcggtcaggggatcggagaagaagatgataaaatcaacctgtccctcgacgacttttgcaccgatctgctggtcgccgcccagaggaccgctgttatagcccttgaccggaagcccggtatattccgtaatcatgcgggcggttgtgccggttccgcataagaaatgttttttgaggatctctttgttcgcctcacaccagtcgatgagttcacgttttttattgtcgtgtgcgatgagtgcaatatttttttgttttcgaattgtcattgttaaaaaatccatagaatcatcctcctttgccatgatttttgcatagcatctggatattgtcaagaaaatacaaaacatttcacaaaaaaatacgaatgtttttcgtgagtacatagaaagaggtgtgtttttctgcgtacaggaattgcaagaaacatagaaaacatgctatactacgagaatagtggaacaggaggaacgaaaaagatatatgtctgctgaaaatacaacaaacacaggggcacaagaggcggagaacgcagagaagtacgcggtcgaagtgaaaaatgtgaccaagatatacaggctgtatgataaaccgatcgatcggctgaaagaatcgctgagcgtcagccataaagaataccacaaggatttctacgcgttgagcgatctttcctttacggttgaaaaaggtcagacggtcggcatcatcggtacgaatggttcgggtaaatcgacgatccttaagatcattaccggcgttctcacgccgacgaccggcgaggtgacggtgcgcggcaaaatttcggcgctgctggagctgggagccggatttaaccaggactacaccggtatcgaaaatatctatatgaacggtacgatgatgggatataccaaaaaagagatggatgcaaagctgccggagattctcgattttgccgagattggcgatttcgtctatcagccggtcaagacgtactcgagcggtatgttcgtgcgtctggcatttgcgcttgcgatcaacgtcgagccggagatcctgatcgttgatgaggcgctctcggtcggggacgtctttttccagtccaagtgctaccgccgcatggaggagatccgcaaaaacggcacgacgatcatcatggtaacccacgatatgggaagtatcatcaaatactgcgataaggtagtgctgctcaataagggcgaatttatcgcacagggttcggcgggcaagatggtcgatctctacaaaaagattctggcaggacagatggacgcgctgcgcgccgagctggaggtaatgaacgatttttccggggacaaggtaataaaagcggagaaatcaggagccggaagtgcggagaacggtgcatctgaaaatgaggttggaaataacgatgccggaaatgtaaacggctccgaggcagtggatggcaccgcagaaaatggagtcgcttcagcatcggacggcaccggaaatccggctgctttgaacggagaaacggcgaaaaagccgggcttaatgcgcgacaagctgacgatcaacgcaaaccgcgaggagtacggcgacggcagggcgcagatcttcgatctgggactggtggacgcgcgcggcaatatcactaacctgctcttaaaaggcgaagagtttaccatccgcgagcgcatccgtttcaatgcaccgattcaggcaccgatctttacttatacgatcaaggataagaaaggaaccgacctgaccggcacgaacaccctgtttgagggaacggatgtccatccggtcaaggagggcgatatttacgatgtcgcgtttacgcagaagatgaccctgcagggcggcgaatacctgctgtccatgagctgtaccggatttgaaggcggcgagcacgtggtgtaccaccgtctctacgatgtggcaaatattaccgttatttctaataagaacacggtcggtgtctacgacatggagccggatgtagcggtcaggttatcgccggccggagaggcagcgaagcaggcggagtcgcttagtgcggatgaggcggcacaggaagatctgcaggcatgataaaaggagaaataagatgaaaaaaatcaatcaggagctgattgctctgtttgataaatacggcagtgaccggcgccaggcgctgcgggaaaataagaagctttcctatctgtacgcactggcagatctgcgggaaaacctgttggactggtgtcaatttgacccggaacagcaggcgctgcagatcggggcggacgcgggcgcgctgacagggctgcttgccagacgtttatcatcggtaacggtgctggatgtttccgaagaaaatctggaggtagtacgccgtcgtttcaagacagagccggagctggcggcgaagatccgctatgtctgtgcggatgtggagacgtatgcgagggaagcggaaaagcgcggcgggacatatggatatgtagtgctgatcggggatttgacggcggcagacagggcgggacgcgcggcgcagatgacagccgcaaaacagcttctttctgctcatggaaccttgattgcggcagcttccaactggtttggcgtgaaatacatggcaggcgcagagcgggagacgggcgcactttcctggaacgaaatgaagcagctgcttccgggcggggaattttactatccgatgccggattaccggacggcgggagagattttttcagatgcctatctgccgaaaaaaggcgatctgaccggtgtgttaccggtctatgactgtccgcagtatatgctgatggatatgggggcggcgctcgatgcagcctgcgaagacggacggttcccggaatttgcgaatgcatttctggttttttggcagagacaggctgcgccggaagctgagaatgcttcacaggacgttatctatgtgaaatacaaccgcacccgcgaagaccgcttccagatccggacagagatccgtgaaaagaatggaacccgcgaggtctggaagacggcgctctatccggagggaaaggcgcacatccagtccttcgaagaaaaatatcaggtgcttgaccgtcagaatccgtccctgaaactggcaaaaccggagcttcaggacgagggaatgacagcggtatttccgtatttagagggaaaaacgcgggcggaacttctgggagaaattctgactgcccagggcgcggatgcggaggtttccgcgatccgggctgcgatggatgagatctacagcatccgcccggaggaacgcaaaccatttgcggtgacaccggaatttatcaaggtatttaatgcgctgggcgagctggattcctatcgggataaagagacagaaaatggcggcggatgggcttctttaggggcagttcttgcggacgagagctacagcgcctccaacattgacgccctttttgaaaatatgctggtgacggcggacggaacttatgcgatcgactatgagtgggtcttcttattcccggttccggctggttttgtgaaatacaggacactggtttatttctaccgccgttataagagtctgttgggcggtcaggccgagcgggaatttatcggacagttcccggagtatgtgaaggcggatgagaagctgctttcgctttacgaggcgatggaacgcggcttccaggagtacgtgcacggggaaaaccagcgcacttaccaggaagattacatggtaaagacgaagacattagccgatctttcccatgtggacggagaacttgcaagggcaaacgaacgtctggatgcgctccgggcagaaaattcggaaaaagatacggcactccgcaaagtgcaggaggtacagcgcctgacgaataaccacgtggcgaatctggacgttatcatttctgatctgcgccatgaaaatgcagagcttggcaagacgctgacctacttaaatggtcatgaggcggtcattttcaaggtgcgccgcaagctcggacaggcatttaaccggtgctatccaaagggcacggtacgccgcaagaagctcggctactggaaacggacgattctccatccgggtaaaatgatgaagatgtacaccacagaggaaggaaagaaccttatcaaaggtgattttgagatcggtgaggagtatctgacctacggaaaaatccaccttccgaaggaagaaaatccgacggtttccatcgtaattccggtatacaaccagattcactatacctatctgtgcctgcagtcgattctggagcatacgaaggatgtgagttatgaggttatcatcgcagatgacgtttcaaccgatgccaccgagcatctggcggagtttgccgataacctggtgatctgccgcaatcagaccaatcagggattcttgcgcaactgcaaccaggcggcgaaggcggcgcgcggcaaatatgtgatgtttttaaacaacgatacccaggtaacagaaggctggctcagctccctggtaaatctcattgaatctgactccaccatcggtatggtaggatctaagctggtatatccggatggacgtttacaggaggcaggcggcatcatctggagcgatggttccggctggaattacggccgcctcgacgatccggacaaggcagaatataactacgtcaaggatgtagactatatttccggcgcagcgatccttttatccaccgcactctggaagcagatcggcggtttcgacgagcggtttgccccggcgtactgcgaagattcggatctggcatttgaggtgcggaaagcgggctaccgcgtcgtttaccagccaaaatccaaggtcatccatttcgaaggcatttccaacggaacggatgtcaacggaaccggtctgaaacggtatcaggtggaaaacagcgagaaactcaaagaaaaatggaaagaagagttcaagaatcagtgcgtcaacaacggcaatccgaatccattccgcgcacgcgagcgcagcatgggcaaaaagatcattgtcgtgatcgatcactatgtgccgacctttgacaaagacgccggttccaagacaacgttccagtacctgaaaatgttcctgaaaaaggggtatgttgttaaatttatcggagataattacctccatgaggaaccgtatacgtctacgctgcagcagatgggaatcgaggtcctctacggacaggaatacctgaccggtatctgggactggctggtgaaaaatggaaaagatatccacgtggcatatctgaaccgtccgcatatcgcgacaaaatatgtggattttatcaaagaacacacggatatcaagatgatttattacggtcacgaccttcattttatgcgtgagttccgcgagtatgagctgaccggcgatgtgaagaagcgtcaggaatccgaatattggaaatcgatcgagttttcactcttccacaaagtggcggtgtcctactatccgtcctacgttgaggaagaggcgatccacgccgttgatgagacgattccggtcaaggcgatcacggcatatgtctatgaggagtttttacagaatctgaacaaagacttcgccaaacgggaaggacttctgtttgtcggcggctttgcgcatccgccgaacgcagacgcggtgctctggttcgcgaaagaagtattcccgaagatccgggaacagatcaaggtcaacttctacatcgtcggttccaaagtgaccgacgagatcaaagcgctggaacagcctggaaatggcatcatcgtcaaaggctttgtaagtgaagaagaactggcagacctgtaccggaactgccggattgtagtggtaccgctccgctacggcgcaggggttaagggcaaggtggtagaagctatctataacggtgcccccatcgtcaccacctccgtcggcagcgagggaatcccggatgtagaaaaagttctcctcgtcaaggatcagccggacgaatttgccgagacagtcgtagaactctacaaagacgaaaaacgcctggaagacctggcagagaaaacgcaggtttatatccgcgagcatttcagtattgatgcggcttgggatgtgattaaggaagattttgaataaaaaatagtaaaagatagaaaattatatataataaagaaaacgatcaggggaatgtgcttctgatcgttttcttgcgtaagggtaatttaaagttatccaaggaaggaaagagctagctacgccggtatgctgcaggctctttcctgtactaccgggtagagcactctatattaccgatcgttcttccgcagcgcttccacccgtccatacctccgatacatcaaaagctcaaataccaccatacaagcccatccaatcgtcgtaccaatcgctacagcctgaattcccagccgtccaaacagcgcataactgatcacaacgcggatcggaatctgcaccagagtcgcgaacagggtgatcatcaggtgcccgattccccggtaatatccctgaaaggtattggtgataccactgatgaagtaaaaaccagccatcggtaccagataggacatgccctgacgcagcgcctccgtttcgtttggttttaagaaaataccgagcagcgggtgacggcagaacagcacgaccaccgctgtcaaaataatataaatttctgcaatcaccagcattttccgaagccctttcggaattcgctcatactcttttgcgccgaggttctgtgcggagaacgtcgtgatagatgctgcaaggctgtcgcccggggcgagcacatagctgtcgatgatggagacggcattaaaagcggcaactgcatcgacgccgagtgcattgacgccggactggacgagcaggcggccgacgtagagaatcgtctgctggacggcggaaatggagctgaaatcgatcgtttttttgagcatcgaggttttcagtttcagatcccggatgccgagccgtaagaggggcactttcgcccagatatagacgaagagggcgagcgcagagaccgcttgcgagatgatcgtagcgattgccgcaccggaaacaccgaggcggcagatgccaaccaggaatacatccaggaatacattgacaacggtcgtcaggatcaggacatagagcggcgctctggaatctccgatcgcgcgcagggcggcggagaaaatattgtaaaaaaaggtaaaaataagacccagcgagataatctgcaaatacaaggacgcctgtgacgatatctcttccggtgtctgggtaaggcggataaacaggcggcttcctgccagtgaaataccggagaggacaatggttaaaagcagcccggagagcaccgaggtcgcaaattcatcctttaaatcctgatagtctttcgcaccaaaatagcttgccatcagaattgatgcgccgagcgacagcccgacaatcagaaaggtcagaatattcatgatcggacccgccgcaccgactgccgccagcgcctcttttccgtaaaactgtccgacgactaccgaatcgaccgtgtggtagagctgctggaagaggttgccgaacaccagcggaaccgcgtaggcgatcaggtgtccggttatattcccttttgtcatatcacgagccataagcatttcctccaaatcccaatttataactaagattgtagcacggaacagagtgcctgccaaataaaaaaatctgtcgcattatgccaaaaaatcaacaaattgttgcgatttccgcaaggaaacgctgcggatccgatgggaaagtggtaacagcataaaaccgtcctatttagtggaaatcactagggaaatgtggtaagatatataagttaaactggacttaatagcatttgacagattgacaagagtaaaaaatggatctttcgtaactgtgaaggaactgaacagttacaaaacagtaaaaattgagttggaaataacagacagaaaggaaatacagtatgcaggcaatcattctggctggcggattggggacgcggcttcgcagtgtggtaagcgaccgtccgaaaccgatggcgctggttgaaggtaagccgtttctggagtatgtgcttcaggggctgaaaaaaagcggaattgatgatattatttttgccgtcggttataagggcggcatggtggaagaatattttggagacggatcgcggtttggcatccgggcgcggtatgcgtatgaggaagagctgctcggcacggcgggcgcgatcaagaatgccgggaaatatgtgacggacgagcagttttttgtcctgaatggcgatacattttatcagatggatttcggtgatttgagccggatccagcaggaaaaaaatctggagatggcgctggttctgcgcggtgtgccggatatttcccgttatggggcggcgcgcctgaccgacgggctgctgaccgcttttaatgagaaaaacggcaatactggggcgggcacgatcaacggcggtgtgtacctgatgaagcgggcgctgctggatgagattccggagggaaaagtttcgctggaaaatgagtgcatccccaggtggatgcaggagggaagacgtctcggcggcatcgtaaatgacggctattttattgatatcggtgtgccggaggattatttccggttccaggaggacgtaagaaaaggagacattacatggtaatcagaggaagagcgccgctgcgcgtgagctttggcggcggcggtacggatgtagaaccattctgtgtagaacagggcggtgccattatcggaagtaccatcaataaatatgcatattgttcgatcattccgagggatgatgaccagatcacggttcattccctggattttgatatgacagtcaaatacaatgcgaaggaaaattatgtctgcgatggacggctggatcttgtcacggcagcgctgcgggcgatggatatcaagcagggatgcgaggtttatttacagtgtgatgctccggctggttcgggacttggaacctcctcgaccgtcatggtaagtcttctgaccgcgatggcgcgctggaaaggaattacgctggataattatgcgatggcggatctggcttacggcgtggagcggatcgatctggggatttccggcggatatcaggatcagtatgcggcgaccttcggcggctttaactttattgaatttcacggacgtaataacgtcgtggtaaacccgctccgcatccgccgcgatattatcaatgagctgcagtataacctgttgttatgctacacgggcaatatccatgtatctgcgaatattatcaaggatcaggtaagcaactataagaaaccggatgcatttcaggcgatgtgcgaggtaaaggcgctttcctatgcgatgaaggacgagcttttaaagggaaatctccacaatttcggccgcctcctggattacggctgggagagcaagaagcggatgagcagcaagatcacaaatccgcagattgatatgctctatgacgaggcgaaaaaagcgggcgctctcggcggaaagcttttaggtgctggcggcggcggcttccttcttgtgtactgcccatacaacgtcaaacatcaggtggcgcaccgtctggaagcggcaggcggacagctgatggattggaatttcgaactgcgcggcgcacagagctggatctgcgatgaggaccgctgggactaccgcgacattcaggtgcagatgccgaataaggagtatacattccatgtgtaaagataactgtaaagtagtattccttgaccgtgacggtacgatgaacctggaggtcaattatcttcaccgaaaagaggatttgaagctgattgacggcgccgcagaggcgatccgtctcctgaacgaggctggatataaggtgatcgtcattaccaaccaggcgggtgtggcgagaggttactataccgaggcggatgtaaaaatccttcatgattatatgaatgaggtgctggagcgtgacggagcacacgtagatgcgttctactattgcccgcaccacccggagcatgggattggactttataagaaaaaatgccattgccgcaagccggagacgggaatgtttgagatggcagagcgcgatctgccggagggcattgataaggtgcattcctatatgatcggggacaagcgcatcgacgcgcaggcaggaaaaaactttggcgtgaccggagtccttgtcggaactggctatggggcaaaagaacacgcggaagatagggcggctggacttataaaagaggacggaagctgtccggcgggcggttatgatgcgtatgcggagacgctgctggatgcggtgcgcgggattttaggcgggcgtatatagaatgcggctcacaaaaagattccgggagtacataaactagaaagagaggaaccatcgacatgcagaatcagagacaaaacggacgaccagacgcagccgtgcgcatggctggtctttttctggtgctgttctgtgtggcggcggttctgattccggcgaaaacgctgtttacgggaaatggtttttttgcggattacattcattttacggaatcgaaacggatgtatgtggagattgcgattctggcagtcttgatctttggggggctggcgcttttgaagcgcggacgcagccggatgtactggctgacggcggttgtgctggtgttttcctggattcatgtggtatttctgccgatggtggtgtcggcggtgtatctgattagcctgttgacgatcgggcggtttttgagaaaacaggtgtttttcaggggaacggtctgggagcggccttatttttctttttatatggacttcctttttggcgcctcctttgcaatcgttgtgtattgcctcctttctgcccttggcgttggaaaaatcgcctggatgcgcctgagcgtctatgctctgggtgtggcggcgctgggctttgatttttcctcgatttcctgccagtgcatcatgggatggcagacgctttcctggatgctggatggcagggacaaggtgtcggttcatgtgattgaggcagggaaacaggcgttactgttcacaggtaggcacttttggaaccgaaagtgccgtaagaaaacgtggtggcagcaggaatttgccgtatttaaatgcgaagccacggcaaattccgttactgggcacgtatgcgtgaacagtaacaaaccggctggcagcgggggatcgcgggaaataccgcgccgggtgcgccgggcatggacgctggcggctggctggtgtgccctgatgttcctgattcaggtgggacgcctgaatatcgcactcgactttgatacactctggtatggtgtgcgttcccagtacattgtggcaggcggaaccgggctgtatgagaatccggggctggtcggcatggtttatgtgtattcgaagggctttgaggtgctgactctgccgctttgcgatctggcaagccacagctacctgacgttctttaacctctggctggcagttctgggaattggggcgatggtctggaatgcggtgctgctgacgggcaatcgaaagcaggagacagagagccggaaggcgggaacagagaagaaactaacgtatcacagcgtcttgccgggaattatggcagctgttttgacggtttcggtgccgggcatcatgaatatggcgcttacagccaaggcggatttgattacgtggctgctgcagcttattatgctgggatgtttctttcagtatattcatgtgtatgaaaatcattggatattcctctccggggcagccggttcctatttcctgtccctcacgatgaagccgacctccctggtcttttccactgccgtatttggcatgatggggctgtaccttctgtggttctggtttcatgagcgcggggcggcggctgacctgtttcaccatctggtccgcctgattggctccttatgcctgccgtttggggcattggccggtatctgggcgcggacgatgaagatcacgggaatgccggtcacttcggtgtttacttcgatttttgcatggcttggttttaaaatgaaatacccatttgctacctcggagctgccgcagaattatcaggaggaatcaacgcttcatgtgctggcgcggcgcatctggcagatgctgatgcagccgcagggtgaagatatggggcatgtgattctggcgtggggaacctcgctgatggcggtactgattgtgatgctggtgctttatgggattttgtccaaaaagggagaggagcaatcccgtatctggaacgcggcattggtgatttttgttccatttgtgatcgtcagtctgatcagcctgtcgatgctttaccagatcgacggaaattattttatgcttctgtattctatgctgattctgggggcatgccgggcgatggcgtattttaagaaaatcggcttttatccgctcgcgtcgaagtgcctggcaccgctgctggtattaaatctgattgtcacggcgatcagcagctgggcgtggacggctggattttcggagatgcatcttctgaataaagggcgtgtcaaccaccgggcgcaggaacaggcgcggatggaggaaaagggaaacacgctgatctggcaggaggtgtcgcaggatccggaaaaccgggtgatcgcatttggaacgcatccgtactgtttgcagttcccgtgcaatgtggagtcgtataaggatattacatcgccgtggggcaacgtcgaactcgtcaactcgccggaggcgtttgaaacctatatggcgtatgcgaagacagattatgtctacgcagaagcaggttatctgggaccgggaagctgggagtggagtctggatcttctgcgggaactgatccgcagaggcagtttgaccgatctgttttttgaaaatggaaatatgcttgcgcgggtatccgacacagaggtgccggaggaagaagcgcagaacaatctggaaatgtttgagcgggagtatttattttacgatgcagaagctcaatagacatcgaaaaacctgacaggaggaaatagaaatcatgaaggaatacgagtacctagacgagctgatcagccgctatccggttcttgcaccggtaaaagcggatattcgcactgcgtatgagacgttgaaagagtgctatgagcgcggcggaaagcttctgattgccggaaatggcggaagctgtgcggattcggaacacatcgtgggcgagctgatgaaggggtttgtgaagaaacgcccggtttcggcggagatagaggcggcgcttaaaacggtagacccgcagatgggggcggaactttctgaaagactgcagcagggacttccggcgatcgcgctgaccggccatgcaggactgaccaccgcatttatgaatgatgtggatggcagcatgacttacgcggaacaggtgcttggatatggaaaagagggggatgtgttcctcggaatctcaacatcgggcaattcgaaaaatgtcctgtatgcagccgtgacggcaaaggcaaaggggcttaaggttatcgggcttctgggacgcgacggcgggcggatccgtggatactgcgacactgcgattgtcgtgccggagcaggagacatttaagattcaggagctgcatcttccagtgtaccatgcactgtgcctgatgctggaagaatatttcttttaagatatattttgtttcatggaaaggaagtaatgattcagcaggttcatgaagaaaactggatgattacgagggaaaagtatgttatttggaaacaggccggcagacaaaacggcgaaatggagagtcagtacccgcagctttgcagtgctgcttgcctatacgctttttatctggtggctggaagtgctggatcttctggcatggcttttacatgtaccacagggaacggttttgtcgcgggcggcagcgctcgttttatgtggcgctgtcatggtggcaatcggaagatttgaatgggaccatgcgggagtgagtccgctttttatagtgggaagcttgttcatcctggcgttcttttcggtcaagggatttgccccggatcagagctatgatacgcagaactatcacctgctgtcgcagatacccggatttgtggacaaccttcattatcatgtgataccgggacggttccagatgttcggtttccggctgggcgaccggatgttttatccattcagggcgctttttgggcttcggatggggacaatgttaaacgcactggcgatgcttgtgatttatcggcaggtaactgtgttcctgagcatggaggcagaccggctggaaagaaaatgcagctggtcgaagcatcttgcgccggtactggcatttctgattgtcagccgcctggagttgattcaggagagcggtagctacatggtcgagcttctggcgctgccgtttctgctggaaatggtatttctgcttctgcgcgggctggatgaggcgaagcgggagcgcgaggcggttttattctgcctgtttggtggaatcctgttctgcctcaagatgacgaatatcgtgtatctggtgccgctggtgctcctgtatctgtggaaaatccggaagtatctgacaccgaagctgtttctggggtgtctggtgacgggggtgattcccgtcagcgtgtacctgatttacaatgggatagcgatgaaaaatccagtttatccttattataacagcctgtttcattcgccgtattttggggaaacggactttaaggacccgagatggggacccagcaatataaaagagtttcttttgtgggcatattcgatgatccggcatccagattaccgcctgagtgagatcccggcgaaatacaacctggatctggcgctgatgtatctgggagcggcgggagccgggctctgctggatttggaagcgggttagcagcaggacgggaaccctatttctgctgtatgccgcatcctttattctctgggcggcaacgacgggacacagccgctattttatgggcggaatcttatttgccggaatgctttgcgggttcctggcgctgcagggaatggcttccgtttctcccaggctgacaggcggcgttgtatttgcaattatgtttatagttgtttacgccgggcgcgcttacgatgcttatacctgtgtctggaacggcggggaatgggcgatgcgggcggtgagccgtgagagtatccgcagcaacctgccttacgtatttcacgatcatcagctgtttacaccggaagaacgttccaagattgaccgcattttcctgacctggtcggatgtgggaagttatgcgcggcttgcgggcgaagatgtgccggtctggaaccggtattcgatcgtcaatgagctgtcggagcagaaagacgcctatatcgatgaaatcgaggcggcgatggagacaggcgagggcgtctatgacatgataccgcaggggcttgagacgttggaaggctatctggaatggatgaatgaggcgggatggtacgtgcatgatatggaatatcaggaaacaatcctgcagggtgtccagtcttttacgctggcagggcttgagatggcgcatggtcgcgaaaactgctggtaccgcacgcagaagacgttcatggatgcacaggaaacggaaaaagaagtaccagaatggcgctgggagaatgccagcggggacgatcatccgactatccgggcggttctgtgcgatccggactactggatgatgaagcagccatttgaagtggagatcatcgtctcggatgggacaaacagccggacggcagctgtgatccaggcggggcagaaggaatatgaaccgatggaagtacagcttgatctgacagggcttcagggagagataaaattggaactggtaagtacagctgagacaaaacgggctgttgtgatcaatccggaatggtccgccaaaacggtggaagagtgaaaacgggaggagaaaaatggacaagatagcggtattaattccgtgttataatgaaggccagacgattgccaaggtggtcaaggactaccgcgaggcattgccggaggcaacgatctatgtatatgacaataattcatcggatcacacggatgagattgccagggaggcaggcgcggttgtgcgctatgaataccagcagggcaagggaaatgtcatccgcagcatgttccgcgacattgacgcggagtgctatgtcatgacggacggcgatgacacctacccggcggaggacgcgagaaagctggcagaccagattttacagggaaaagcggatatggtcatcggcgaccgcctttcttcgacgtattttaccgaaaataagcgtccgttccacaatacgggaaatcgtctggtgcgtgggcttatcaacctgattttcaagagtaatatcaaggatatcatgacaggcgcgcgtgcatttaactatgaatttgtcaagagcttcccgattctttcgaccggatttgagattgagacggagatgagcatccatgcgctggacaagaactttaagctggtggagatcccggttggataccgtgaccgcccggagggaagtgtgtcaaagttaaatacattttcggatggatttaaggtgctacgcacgatcgcgagactcttccgggattacaagccatttgcgttctttggatggctgggactcatttgttttgcgattgcaacggcatttttcgcgccggtgcttggcggctatctggcaaccggcatggtgccgaagttcccgaccctgatcgcgtgttccgggctttatgtgatttcgttcctgctgtggatcagcggtgtgattctggaggttatcacgaagaaacaccgtcagttatttgaactttacttgaaccagctgagcattttaaagaggagagacggatgaaacgccgtgtatttttagggcttccggttattttggggattttattttatatctggtatatatttcatgcctcagacaatgtggcgtattcggattatatccggctgatcaattcatatctgccggatgtgacaaatccggcgaaattctttgtaccggatatcctgacgcgcgttccgatcacgtatctggggcgcattatcaatgtgaaactatttggctataatacgtattttgacatgattctgggtgttttgagtctgggtgcgggcgcggcggtgctggcgctctacgcagagcggaaccgctcggtcggctatctttccttcctgttgattcagtttgtatatttcagcctgaataaatgggaaatgatgacgaacgggaccggctgggtctgcactctgtcgatctccggatttttattccattttgcagtcctcgaccatgcagcggcgacccggtgccggaatatgtctgaccgggtgcttctggcaattctgccgatcctgctggtcgtgctggtggcaggaccgtacagcggcggctatgcggtgattctggtgctggcatacggcgcactgtggctggcggatcggcgcgggggtgctgaaacaagcagccgctcctggagccgaaagtgccggagaacctggtgcatcggggcattgacaacggttcttgcgatggtattatatctttggagcagttcacaggcagtttacgtacaccgtggagcagtgactgatgtttcaatcgctcaggaatttgtcgcccagccgctctttttcctgcggtttctgctgaaagcggtggcatcgtcggtgatcggcgtggcgcagattcaggagctggaggcaggaagcccctggtttgtccggctgcatctggtgtatctgctggggctggcagtgtttgtttcgtatctgctggcactgtatctgaatgtgcggtttcagctttataaaaagactatttttccgcttctgctggttctcagcggcggctgtaaccatctgctggtgctggcggcgcggtggattttcctgaaggacgagtacgggatgtcctcgcggtacgagatacagtatcagatgggaattgtaggaattctgcttacgtttgcactcgtctggagtatgtgccgggaaaaggcgcaggaaacagaggcagataaggcgaaaacacgcgcaccggagaaacgggcagtacgcacacctttaaaggtctgtatgctggcatttaccgtgttgacggtctttggaaatgcatggacaacccgggcagaaatccggacagcgccgtaccggaaagcatatttacaggtatcaagggagctgggactgaattaccggacggcgagcgatgaggatctggaaacctacctgcataacgacccggatgcagtgcgggatgcgatgagaattttggaagaaaaccatttgaacatatttcgataaaaacgatggacggaaggagaagtgcaatgaaagttgtaatattagcgggtggattcggcacacgaatcagcgaggaaagccatttaaaaccaaagccaatgatcgagatcggagaacagccgattctctggcatatcatgaagcactattcccagtatggattcaatgattttgtgatctgtctgggctacaaacagtatgtagtaaaagagtattttgccgattatttcctgcatacgtcggatgtgaccttcgatctggcgaagaacgagatgcaggtgcataacaactattccgagccgtggcgcgtgacgctggtcgataccggactgcacacgatgacgggcggtcgtatcaaacgtatccgcgattacattggggatgagacgttcatgctgacctacggcgacggcgtttccaacgtggatctggacgcgctggtggcattccacaagcagcacggcaagatcgcgaccctgaccggagtcaacatcggacagcgtttcggtgtcatggatgttgacagcgacggacacatccgcgagttccgtgagaagaacgatgatgacggcaagatcgtcaacggcggcttcatggtactcgaaccgggcgtctttgactatatcgaggacgatgataccgtctttgagaaagcgccgttggagcagcttgccaaggacggacagctgatggtataccgccacgacggtttctggaaatgtatggatacccagcgtgacaagatgcagctggaacagatgtggcaggaaggcaatgcgccctggaagctgtggaaataatatgttactgtacacgcatacgtgcccagtaacggaatttgccgtggcttcgcatttaaatacggcaaattcctgctgccaccacgttttcttacggcactttcggttccaaaagtgcctacccgtgaacagtaacaataatatactgtaagggaaaattcaaggaatatacacaaatcctgtaagaaagtatgatataatgagcgcagaagaaaagaatgcggctgcgaagcagacatattcttttcttgcgccattaacgaacgaacagccatgcgaagcagggcggtagagcgcgatagcgcgggttcgtgagtggacgggtgagaaatataataagagcactcagcaaagataatggagtgatgaaatcacgaaattaattaaaaagaggaaaaccatggaacttcttgatttttataaaggaaaacgggtccttgtgaccggtgacacaggctttaagggaagctggctgatccgcattctccatctggcgggggcggaggtgaccggctatgcgctgaaagcgccgaccgagccgtcgatgtttgagatcctgcatctgggggagacgattcaccatgtggatggggatgtgcgcgattttgcccatttaaaacaggtgtttgatgagacgaagccagagattgtactccacttggcagcgcagccgatcgtgcgcgagtcgtaccgggatccggtcggcacgtatgcggcgaatgtcatgggtacggttcatgtgctggaatgcgccagacagtgtgaatccgtccgctctctcgtcaatgtgacgacggacaaggtttatgaaaataaggaatgggagtacggttatcgcgaaaatgacccgctggacggctatgatccgtattccaatagcaaatcctgttcggagctggtgacacacagctataagcagtcgttcttcacggacggtcgctgcgccgtctcaacctgccgtgctggcaatgtgatcggcggcggtgattttgcggcggaccggatcgtgccggactgcgtgcgcgcagcggaaaagaaagagccaatcatcgtgcggaatccgcattcgacgcgcccgttccagcatgtgttagagccgctgtttttgtatctgacggtggcaaaggcgcagtgggaaaatgcggagctggcgggctgctacaacgtcggaccggatgactgtgactgcgtcaatacaggacgtctggcggatctgttctgtgaaacatggggcggcgggatgcattggatcaaccgctatgacggaggtccgcatgaggcgaattttctgaaactggattgttccaaagtgaaaaaggtatttggctggaagccgcacttccatgtagaagaggcgatggctgcgacggtggaatggtcgaagaagtggcttgccggagcggatatgcgcgaggtgacggatgagcagatccgggcgtatgcggctcggtttgaagaaaaacagatagatgcaggcggctgcacgaaaggtgtgtctggcagcaggcagagctgatacagctgcggcagagaacggtagcaaaagcaggaggagaaacatgtcagaagaaaaagtaaccctgtcggacggaaaagaggctgcgcgtcagcagattctcgatctggtggcagagtattgtgataaatatcataatcagaaaaaagaatttactgagggacagcggattccgtatgcgtcccgcgtttacgataaccatgagatggtcaatctggtagacagtgcgctggagttctggctgacctccggacgttacaccgatcagtttgaggcggggcttgcgaactacctgggcgtcaaatactgttcccttgtaaactccggttcctctgcgaacctgatcgcatttatggcgctgacttccccattgctgggagagcgccgggtgtgccgcggcgatgagattatcacggttgcggcaggtttcccgacgacggtaaccccggcgatccagtatggcgcagttccggtatttgtggatgtgacgattccacaatacaacatcgacgccgataagctggaggcggcgctttcagagaagacgaaagcggttatgatcgcccacacactggggaatccgtttgatttacagaaggtaaaagaattctgtgaccgccataacctgtggctggtggaggacaactgtgatgccctcggaagccgctatgagctgaacggcgagtggcattttaccggtacgatcggagatatcggaacgtccagcttttatccgccacaccacatgacgatgggcgagggcggcgccgtgtacacggacaatccgcttttaaacaaggttatccgttccttccgcgactggggacgcgactgcgtctgcccgtccggctgcgataacctctgcggtcaccgatttgaccgccagtatggtgagctgccgcttggctacgaccataaatatgtatactcccattttggatataatttaaaggcgaccgacctgcaggcgtcgatcggctgcgcgcagcttgaaaagtttccatccttcgtggagcgcagaaaacacaatttcgcccgtctgaaagcgggacttgccggaaccgaggacgcatatatcctgccggttgcctgtgagcattccgatccgagctggtttggtttccttctgacctgccaagagggcgtggatcggaacaaggtagtcaaatatgtcgaggaaaagggcgtgcagacgcgtatgctctttgccggaaacctgatcaagcatccgtgctttgatgagatgcggaaagaaaactgtggctaccgcgtagccggaactctggaaaataccgaccgtatcatgcgcgataccttctgggtcggcgtttatccgggcatgacagatgaaatgattgattatatggcaaagacacttcgtgaggcatgccgtcagtagggacggggaccgcggcaattcacaggcggggagatactctgcctgtaagaaaatgcctgtgaaaatgagcagctgtgacagagaatgagcagttgcaggagaaaatgaggggacaaccatcatgaatgaggaaaaatcagagagccgcagggcggtcaaactgccgccgtatccggggcttgagaaggttcaccgggcgaatctgcgccttttgaaggagatagaccggatctgccggaaatacaagatttcctatatgctggattccgggacacttttgggcgcagtgcgtcatgagggatttatcccgtgggatgatgatgtcgatctggcatttacacgtgccaattatgagatgtttttgaaggtagcgccgcgggagctgccggagggaatgtccttgctgcgcccggaggagatccggggtggcaaggtgttttatgattttacaacgcgcgtcatctatgacaacagccgcgtccatgaggacaatgagcagatgcagttttatgagggaaaattaaaccatctctgggtggatctgttcgtccttgaccgcctgccggatagtaaggtgggcgcgtggagcgcaaaatttcttcagaaggtcatttatggaatggcgatcgcacaccgtgatcagattgatttcagcaaatacagcctgatggataagctgcgggttggtgtgctggcaggtgtgggacaccttgtcccgatgccggttttatttaagctgcagagacttgcagcggcgaaggatcacaaaaagaagacgaaacactggtattacagcaattaccagccggattatctctatgtaacgctggagggcgcatggtgcgagcacgcggtggatctgccgtttgaggacacaaagctgatggtgccggtgggctatgagcatgtgctggagtggatttacggcgactatatgacgctgccgccggtggaaaaacgggttccggcacattcttcgatagcgatcgaaattttggatgacccggatgcttaattgaaagatgaaatatgagtaagaaagataagaaaaaacggacagacagcatggaagacaagaagaaaaatgaaaccagacagtcaaccatgcagaacaggatggaaaatatgaacggacagaaaccaaagacgatctcgatcgtgatttctgtttacaacgaggaaaaggcgctgcatgagttctatcgggaggcaactccggtttttgagacgctgccatggaattacgaactgatttttgtcaacgacggaagtgcggacgcctcggggcagattctggcagaactggcagcagcggatccgcgggtacgtgtgatcaacttttcccgtaactttggccatgaggcggcgatgcttgcggggctggaccacagcagcggggagggcatcgtgtgtatggatgccgatctgcagcatccgccggaatgtgtggcgcagataatcgaaaaattcgaagagggctatgaggttatcaacatggttcggacgaaaaataaatcggctggattcatcaaaaacctgacgtcttctgctttttataaatttttgaacaagatttcagatgtgaagctggaaaataacgcatccgatttctttgcgctgactgccaatgcggcgcaggtgttaaagaccaattaccgggaaaaagtgcgtttcctgcgcggctatgtgcagaatatcggatttaaccggacgaccatcgagtatgaggcgagagccagggtggcgggcgagagcaagtacagcatccggaaattatttaaattttcgatcaatacgattctctgcttttcggatctgccgctaaagctcggcatttactcgggaattatcgtgggctttctggggctgctcgtgatgctggaaacgatttatgagtgggcggtcaaaggaacgcccaatggttacgcgacgatcgtagtgcttttatgctttatgttcgcgatgctgtttgtgattgtgggaattatcggggagtatatcgcgatcctgtttacagaattgaaggatcgtccaatttatatcgttcatgatacaaaaggatttccggaaaaggaaagctgacaggaaggaatcgtatgaagagattaagacgtttactgataagtttgatgattacggcactgatggctgccggaatgccgatgacggcatttgcaaagccggactggccctcggatacggggatcgagtcggaggcaggcattgtcatggatgcggactccggggcggttttatttgggcagaacatccatgtgcagaaagcgccggcaagtatcacgaaaatattgacggcgctcgtagtcattgagaacagcagtctggatgatacgatcacattttcccacgatgccgtttacaacgtggaagatggcagcggaaacaagaacgccatcgaggagggcgacacgctttcggtgcgcgattgtctctacctgctactgatgcgttcttccaaccaggcggcgaatgcgttggcggagcatgtgggcggaagccgcgacggttttgtgaagatgatgaacgagaagacggcggagcttggctgtgagaacagccattttgcgaatccgtccggtctgaatgacgacacacagctcacttcggtgtatgatatggcgctgatcgcatcggcggcgtataaaaatgacacgcttttaacgatcagtaaggataagagctaccgattaccggcgacgaagaacaatccggacggtgtgaccatccagccggagcacaagcttcttatcacgactgacacagagagtccgaactattatccatatgcggtggccggaaagaccggttacacatccgttgcggggcagacgcttgttacctatgcgatcaaggatgacagacgccagattgcggtcacgatgaagagtacgcaggcgacccattatcaggatacgattgcattgctggatttcggctttctacggtttgaaaatgtaaatatttcggaaaatgagacggcatacacaagcggcgatcagccggtgcagatcggagacaatagctatcagccgtccgatttatcgatggatacgtcggcagtcatcacgatcccgaaggatgcttcgtttgcggatgcggagaagacggtggtaacggatctgccggaggatgcaccgctgggcgcggtggcactgctttcttacaaatacaacgaccgcaagatcggacaggtgtatctgatcagcgcatcggcggcagaagcggcagcaaacggggagacggctccggatgacggaaatacggcatcggatccggcagcatccaatacaggcgcgtccggaaaaccgaagcaggcgaaatcttcgttccacctgaccctgccgaaacttccgaaagtatcggtgagaacggtgctgattgtggtcgtcagtgtgcttctggcagcggcgtgtgcggcgcttgtatggttgttctaccagcgtcatcaggaagaaaagagacgccaggaggaccggagaaaacggagaagacagcgtctgcaggagatcggctgttcgcgggaagagtttgaaaaactgcttgaaaagcggatgggcgcgtcctacagggcgcctggcacagcggaggcagatgagagcacagagcaggcggagtctgacatggatgtgcgatctggttcaggacaggttccggcggcagatgcagccgcgtcccggctggcagagagtggaaaagtaagaactggttccacggaaaagaagccgctgaaagaaaaacctgcacagaaagaggcagaggatgccaaaacacagcagggtgtgcaggaggatgacacagagcttacggttgaggatttggattgacaacctggatgcgctaaatggcggtaaaatggtccagatggattgtttacgggaaattttggaaagtatgaagattttttgaatttttctaaaatgactacaaaaacaaaaggcgatattatataatagccatgcggttcgggctggttccggctgtgaatgagtgaatgaagggatagaagaacacgatgaaaaaacttctgataatgatggttgcgtgtatggcgctgctcagcggatgcacggagagtacgattgtaaaaccgacttctgagacggtagtcggagatccgaattttgagacccaggaaaatgttgagatcgactggacacaggtcagcacggacgcggaagacatgttcaaggatacaagtacctacgagtacggccgcgatttccatttctatatggagccgaacaagaaacagatcatgctgatctgggtagtggcagatgatctgccggatgatcagataggaacctatgcggaagatttaatcaagggattcaacgacattgtccacacccaggacttctcaattgagctgtccgataaagattcctacggcggactgtggaaacagtatgcactgtcctacagcatcgttccggagagcgaccaggataacgaggacgcatggtttatcagcggttcctatgaggctggcgcggatttcaaacttccggataccaaagagctgatttccaaggtgaaagagaaggaagcagcaggcgagtacgatacgactgaggcggaggaagagacagagaacgcagaataagaggttgtctgcacagacacgggatattttctgtgtataataagagaaaagtgatcacaaaagctgtcatatgagaaacagatgagtgtttctcatatgacagcttttatttaccaggaaccgaagtacgtgtttttaatcaaccggtagtccgctgtgataagactcattccccagttccgtcagaagcggcgataaatcctgtttatctaacggcacgttatctgtgacggcgctgtttaaaagcgcatagacacggctgcatttgtccaatgtttcatggaagagatcaacaaacgaggcggttgagacgcgggtcggatcccacgggttgccccatgcttcgtggtttaggttacagctgctccggtagtcggttacggagtccgttaccattttcgcggaagcaactgggtggttgacgaagatggattcgacctgtgcaatgccgaattttttcttgccgttcttgtccgagagtgtccggcagccgaagcgcagcgcccagatggagcggtgcaccatcgccggagtaacctggaagttgttgcggtaggtgatcggataataggtttcgttgatgcaggaagccaggaaatgggaaataaactggatttcctgtccatttagacagatcgtggcggtctggttaaattcagacggcttcttttttttatatttccagagcaggatcgcgtcgagctcattttccagatgtgcgtgcatcccgtgatgcatggaggtcggggcatccaccggatagccgatgcgcccgtacacgtaaggatgacagatcgaatcggcaatgtaatggtttataaatccggccagataggagatggcttcctcctgctgctggcgcgagcggatggttccaatacggcgcagacagcactcaaaaaaggcgtttaccttgtgttcgtgcatataggaaccgacgttgcggtaatcgcgatggcgcaggatcgggatattatagaaaaacatatccggtccctgcagaccgagctggtagagccagcggtatttggcgatcgtgtgttttaagggtgtgaacggcatatcgttgtatgctttcatgccgaatatatagtgcgtggtaaaacctggcatattgttttcatcctttccagaaggacagagatttggaaatttgtccgcctgtccgatatgcttattgtagcactgccggtctggtttgtcatggggtttgcggatgtttacagaaagtgtaagaaaaggtggatggaaagagagttctcgtaaggcaatatcacggcttggagaataaaatatcatagtaaatcataagattggtttgatagagtgaaaatagatatagaaaggtgctcggatggaagcgctcagaatcgtacagaaaatggtgtggggaccgtggcttctgggactgtttctggcggttggagtcctctgcatggtgcgtctgcggggatttccgatccgtcatatcagagtctggtggggagagacggttgggagcggcgggaaaggacagcttttgacgacctgcaccgcgctggcggcgacggtcggaacgggaaatatcacgggcgtggcagccgcgttggcgatcggtggtccgggtgctgtgttctggatgtgggcggcggcatttctggggatggcgctggcatatacggaggtttatctgggaattttgtatgggggcggaccttatgcctatctggaaaatggggttggaagctgtttcgctggaaaatgctatgccctgttttgcgtgctggcgtcgcttggtatgggatgtatggtacaggcgggggcgctggcggatagtctgcgctatgcagcgtccctgccgccgcttggaaccggtatcatactggcagttttgactgccgtggtgctctttggcggggcaaaacgcatcggatggacggcttcggtgctggtaccggtatcggcggggctgtatctgctggcaggtggaatcgccgtgttcagcttttatgatcagataccggaagtattggggaacattgtgggcggggcatttggactggcagataatgcaggacagacggctggaagcagtattttgaatttttcaggaatttcgggcgggatgaccgggtacggaatggcagcggcgatccggagcggggtatcgcgcggtgtgttttccaatgaggcgggcctggggagtctggcggtgctacatgggatgagtgagggaaaggggaggctaagacagaggcaggaagcgcagaaacagggaatgtgggcgattttcgaggtgtttttcgatacaatcatagggtgcagtctgaccgcttttttactgctctgtgtatttccacacaatctgaccgagaagatcgattccctgggcggcagcggcgcggtggcggcggctctggcagcccgttttggaaatgcaggcggcatagtgacggcggcgtgtatggtgctgtttgcctttgccacgatccttgcctggttttacatcggcgatcaggcacttggatggctgatgcggggtgtcccacagaagcgtgccgacaaaatatgtattttgtatcacggaggttatcttgcctcagtctttctcggctgcgtcaaccggatggaagccgtctgggcggtatctgatattttcaatgggctgatggcggtgccaaatcttgcagcgctggtgctgcttggcaggaaggtacgaagaccggaacggtgagagagttgagaaattcagatacaacaaaagacctctccagcagtgagaggtcttttggtattgaaaaagggaggagagctgatataaactcagctcggtattatgaaaaaaatttgtaagcattgcttgttgctatggttatagtatagggaaaaatcgtgaagaaaccatgttaattgtgtaaaaggttttttaatgaagtgtgaacgaaatatgaacgcggaacatggattccatgattactgttcccatccaaacagcatcatttccatcatcccaacgagaacagaacgcacccttttccgcctttcaaaagcagaggggacaggacataagccctgtccctctctgctttttttctctctttcttttcaaacag

SEQ ID NO: 11063 - DNA, 335 bp, Unknown
  gut microbiota DNA sequence
gcagatggcactatcctgggacgtaaatttataaatttctccagtgataaagaccatttgtatcatgtgcttggcagaatccgccgttttcagagggaacattcctccagacaggtccaaagccgatgggattatgcaaaaaggctgaatatggagctgtcccgcaaaatagctgcggagatcacgaaatatgccgcagagtatcaggcaggtgtaattgtgtttgagtatctggaaatgcagggaaaaatatccggaaaaaagaaacaaaagcttcatttatggagaaagcgggatattcagaaactgtgtgaacatcaggcacatcggaacgg

SEQ ID NO: 11064 - DNA, 1167 bp, Unknown
  gut microbiota DNA sequence
caccggggtagttatgtttctgttctcccagataacattgccggagatggtttcatcgtctgctgcagctgccatcaggggcgttgcctgctctgttcccttgcaggcagagagatccgcatcttccgcagagcagaccggacagtcgggattgaccgccccctgctcacagcgggtttcgcagatacactccgccggagcattcccggacacgccgggaacaagcccgttgtcctgagaattgcacagttcacaggtatacccgcagggcgtcccctctgtggccgggatgtagccgcagctatcgtcatgctcgccgcgttcatgaggacagcttaatttttttgtgatacagccgctttcctcactgcattcatgggtacactcggtcggctggacctcctctgcttcagatgaggtcgccgtattttctgatacgctgccttccaaaacagggtaacagctttcgtcatgtttatggatacacttctccacaagggtgtagcaatcctcagtatgttcatgttcacaggctgccccttcggttccttccgtatatccgcagtcctctgtatgttccgggtgatgcttgcacaaccccgtatggacggcggatacacccgcttccaccgcagatgccggaactcccggcatcgtaaaaatcattgccgccgccagtaaaaatgcggccggccgtttccatttccatatcatttattcatcctcctcacgcggttcgttccttctcgttgttttctgaagcagctgggataccgcctcccgcagctgatattctgtcacaggctttaccaaaaaggtgtccgcctgcatcctgcggctttggggttcaaattctgcctgatcgctgatccaaaggagcgggacatccctgctgtaccctcgtatgctcatgcagaaattcattcccctggctccgtcctccatgaccaccacagcatcataaggcccatcccgctgcatggcatagacgcagaatacgccattgtcaaagcggtctactttgccaagcttcatcagtaacgccgtttctttctccttctgactataactgcacagcgcaattcgcattttcgcacctccattttgtgatgggttttatcgcctcatatagctcctgatcggagcagtctgccgaaaggaacgcag

SEQ ID NO: 11065 - DNA, 834 bp, Unknown
  gut microbiota DNA sequence
gatattttcttcctagaataaaactccttccatttccggaatcataacaggtcatcagattatgaattccaagatccattgataaataatggccattcagggaaagcggttctggttctttgacctcatagataacgataaggtcacattttccatcttccggtggatagatccgcagctgctttatgtgatccatgttcctgaaaatcttattttcaagatatagaaatttttcatgaatcccgtaagtttcttccatgtagcttttcagatcctttgacagagacagccgtaattggccggaacccttctcatgccgaattcccatctgcatgtaagtgatcggtatattgtcctgtttaaattgcggaggatttggcgctttgatcccgccggtctttttaagagcataaaatgatttccaggctttatccagctgcttgcaggtctcctgcgctgtctgggacggaagctgtctataccacagatctcctttatgcgctttcttctgataataccagtcaggatacttctccatccccaattctttatatcgacggcgttcatagttgcagacattccagagcttggaagcagcgtaacacatatgccctatcatattagaatattccggccggatattaaccgatgttctgtgcgacaacagcattccccttcccccttcaaacagccacgcatatgaatatttacaattcacattgaattaatacgactcgctctgatgttcaatataacgacgaatattttcctcagatacggatccgatcgtttccacataataggaatggttccacagttctcccttccacaact

SEQ ID NO: 11066 - DNA, 157 bp, Unknown
  gut microbiota DNA sequence
aatattagaatattccagccggatattaaccgatgttctgtgcgacaacagcattctcctccccccttcagacagccatgtatatgaatatttacaattcacattgaattaatacgacttgctctgatgttcaatataacggcgaatattttcctca

SEQ ID NO: 11067 - DNA, 50366 bp, Unknown
  gut microbiota DNA sequence
ggtttcttatttccggaaaacgttcgaataatttcctgcctgtgatccccttcagatacttgataatggctgttattgacagctttggtggagctgatacaaaacagtgaacatgatcaccttcaccacattcaaataaatgaacggtaaaacctttatcgtcagctatctgctgcacgagttcctgtaggtatttctcaacttctggggttaatatcttccgtctgtatttcaccgaccaaaccatatggtagttaatattacacacacaagtcctataatatataagattttctttcatacatatagtatatcatattgaagtgtaatacgcaattattattcgaacatattttcgtttttattgtatgccggttacggcattaccatcaaaggatgagaattattatactatttgcattgtgcagatatgcacactcctgcgctttcatctcggtaattaaattgccgaggattcccgcttattgtcctaaaaatttaattgactggctgatttcagaataaacttgaaaaagaatgtgcctttttgtgtaatagagaattccaaggaatttcctattacacaaaaatagcggcggcctgcactcatcatgcaggaccgccgctgaaattgattctataaagttactttctcataatgatctcatcacgtcccggaccattggataccatggttaccggtacgccaagctctgcctcgatcgtctcgatgtagttgcggcactctgccgggagatcttcgtatttcttgattccgcggatatcacatttccagcccggaagtgtcttcagaaccggttttgctttctccagcttgtaggttaccgggaagtctttgacaacttcgccgtcgatctcgtagccaacgcagatcgggatctcgtccagatatcccagaacatccagaacggtcagagccacttcggttgcaccctgaatacggcagccgtaacggcttgctactgcgtcgaaccagcccacacgtctcggacgtccggtggttgcgccgaactcgcccttatcaccaccgcggcgacgaagttcgtctgcctcatcaccaaagatctcgctgacaaatgcgcctgcgccgactgcactggagtatgcctttacaacggttgtgatctctttgatctcatacggcggaatgcctgcgccgatagcgccgtaagctgccagagtcgaagaagaagtaaccatcgggtaaataccgtgatccgggtctttcagggaacctaactgaccctcaagaaggatgtttttgccctctttgatcgcgtcatgcagatatgcagatacatcgcatacatacggttctaccatcttcttgtattccatcagctctgccagaacctcatccgggttcagcagcggtttgtggtacagatgctctaacaggacattctttgtctcgcagacacgctgtactttatctttcagagctgcctcgtcctcgaacagttcgctgacctggaaaccgatcttcgcgtatttgtcagagtagaacggcgcgataccggacttggtagaaccgaaggacttgccgcccagacgctcttcctcatacgtatcaaacagaacatggtacggcatcaggatctgtgcgcgatccgataccagaatatgtggcatcggaacaccctgagataccaggctttccagctcttttaccagaaacgggatgtttaatgccacaccattgccgatgatgctggttgtgtgtccgtaaaatacaccggacggcagaaggtgaagtgcgaaacggccataattattgataatcgtatgacctgcgttgcttcctccctgaaaacggataatgatgtcggattccttagcaagcatatcggtaatcttacccttgccttcgtctccccagttagctcctactattgctcgtaccatgaattttcctccctcagaagaatataaatacttttcggcatgatcgaaaaacgatcatgccctcttactgtataatcatacacaacttttctatataagtaaaatcaatattatttataagctacataattaacacttatactattgatgctcacacatatgccaggcaatgtgatttgaaaaaccgctactttgcagctcctatttttctcatgtggttaccttcgccagctgcttaaaaagcttcgcagccgccggggacatccaggctttctcagctgccaccagacaaaactcacgggatggcatctcttcgtcaaattccaacgcaaaaacatccccatttccaagagcctccgatgcaaaatccgacatcagacagccgattcccagattccgcttaacaaactggacaatcatctcactggtggccagttcaaactccggctccagccgaaccccgcgctttgccagaaactcatccataaagcggcgcgtactggtattgcgctccaggaagatgcaggggcagttcaacagctctttatatgaaagttttctgccctttaactgggctgcgtatttgggtccggctataaacacattgcggatctcctgaaccggaagactctttaccgcctgcttggtttcaaaaggtgtgctgacaataccgaaatcaatgtgtccctgatagagtgcttcaagggtctcgggcgtcgggccgtttgaaaccgtcaccttgatattcggatactgctcatgaaattgttccagatatggaagcagataaaactgaagtgtcatatcgctcgcgccaatgcggatctcgcccgtttccaggtccttcatgcgccgcagcatcgtctccccgtcctgtatcgcatcaattccccgtctgacatacgacagaagcaattctccctcgctcgtcagcttcacgccgcgcgatgtccgcaaaaaaaggcggcagccaagcgcggtctccagttgtcggaccgcctggctgaccgccggctgggaaatgcagagtgcctctgcggccgccgtgatgccgccgcattcgcacacgctgcaaaatacccggtaatactccagattcacacttccatgtaaatcctgtttagacattaatctctgctttcacgcccagatcttctttatttgcatccagaatcggctggattacctccgccaagaactcatctacctgctcttttgcacgaccggtgtagcgctccggtttcatcgctgctttcaggtcatctaaggacagattgaacgccggatccgctgcaatcagctcgagaaggttgttatccagacctttctctttcacattctttccagcttccatcgacagagtacggatcttctcatgcagttcctgacggtcaccgcctgcctttactgcatccatcatgatattctcggttgccatgaacggaagctctgccatcatgtgtttctcgataaccttcggatatacaaccagaccgtcaacgacattcaggtacagatccagaataccatcaattgcaaggaagccttccggaacactcagacgcttgttcgcagaatcatccaatgtacgctcaaaccactgggtagatgcaaccagcatcgggttcatcacgtctgccatcacgtagttagccagggaagccatacgctcgcttctcataggatttctcttatatgccatagcggaggaaccgatctgattcttctcgaaaggctcttctacttctttcagatgctgaagaagacggatatcgttggagaatttatgggcactctgtgcaataccggcaagaacatttaatacacgtgtatcctgcttacgagaataggtctgtccggataccggatagcagccatcaaaacccatcttctccgcgatcatctgatctaccttgcggcactttgcatgatccccatcaaagagctccaggaagcttgcctgtgtaccggttgttcccttggagccaaggagacgtaaggatccaagcacataatccagatcatccagatcctgcttgagctccatcatccacagagttgcacgcttgccgacggtggtcggctgtgccggctggaaatgggtaaatgccagggtcggctgtgctttatatttatcagcaaatttagccagctcatccagaacactgatcagtttcttacgtaccagcttcagggcttctgtcataatgatgatatcggtgttgtctcctacgtagcaggaagttgcacccagatggatgattccttttgctgtcgggcactgtacgccgtacgcatacacatgagacataacatcgtggcgcaccagtttctcacgctctttagcaacatcaaaattgatttcatccttatgtgctttcaattcatcgatctgctcctgcgtaatcggaaggccaagctccttctccgtctctgccagcgcaatccaaagtcttctccaggtgcggaacttcttgtccggagagaaaatatactgcatctccttgcttgcatagcgctcggaaagagggcttacatatctgtcgtacatggctaatttacctcgctttcttttttcagggtatggaaaatagtctctttcgcagccatttgaaggcgtcaccgacacattttctcaatatcctacctgcaaattataatacaggcacttttcaaaatcaatcacttttcgctgttccggctgcagctctttcgttcttggttactgttcacgcatacattcccaataacggaatttgccacagtaaccgttcctgctcttccattcatcattcatgcccggccaaacgtttttcctgccgcaaacagtcactctccttctgattccacccgttcgtgcacgatttccagctctccggtcttcagatgcagacggattttcgtggaagttcccgttttttctgtcgctccgtatgtttccccggcattttcccgttcaactgttctcttctcctgccagtctgcaggcgcttcctccgccccattctctgctctttccccctccggcagttcatactcgatcacatccatctctcggatcgaccagatccgttcccgcatcttccatatactcgccaggtacatggatacagccagtgcaagtccatacagaaaatacctctgcctccgcttcctccgccagcggacgcgtttcagatagcggcgaatcttccgtttttgatatttaaacagctttctgctttgcggcattgatttttgtgcatttctatgtttctctgacatctgcattcctcccgcaggtgcctctccatttttactataacaaatagaaaaaaatctgtaaagatgatgcggctcacaggcagggcttttccgaactgaaagttgtggttttcaggcagtttattttttctcatgatacgctttttctgtattcacactccagatatgctccttatccgtacttcccgccagaaggagatccactgcacaaaatgctgtcatcatcgaataatccatgttattgtagcgatgctgtccattccgtccgatacagaacagattttcgattttattcaaccatgcagtcaattcacccatctggtcataggtgccaaaataagctgggtatgctttctttactttctcgatatgaaaatcaagaatttccagaaaaccaaatctataatttatcacataagccgtcaaaagcacccccagaaagccagcgctgatcgcccagtctctctttttttctttcatgacaacacccaaccctccagccattccagccactgctcggcaaattcctgttttaccggatatccagacagcaccggatagaaaagaaggaacgcgccgatcactgctgcaagatacagcaacgctgctttcctggttcgtttcggatctctttcccagaaaaaatgcagacaatttcccagcattaaaatctgtatcatactgcacgcaaaatactgatagataaacacggttctgtggataaataaccacggaaacagcatagaagcataggaaatgcacagatatcccgctattttatcctgtcgaatctgccacaggtatatagtataaaatagcgccggaattgccgaccaccagattaccgggtttccaaaagttgaaaccacactgattttaccagacttaagcgacgtgtatgcatccagaagcggtcgtttaatccaggcccactcataccattcagaggcatatggatgttcaaacaccgttttctcatggtaatgaagcataagctgctgattttcccacatagtctggaaaacatttccatttcccataccatttccataagaaagataggatgcaacgtaaatcactgccggaatcaaaatgtatgcagcgatacagatgacagacagccccgccaggtaacttatcgccgcctgtccagacattccctttctggtccgtgccgcagctgtcccatattcctggaacaaaaatgtaaaaaagaggactgcaatccccgcgcaggcatatacccctgtccacttcgatgccatcgccgctccagctgccatgccatttaaaatcatcagacacaccgttttccagctgcatcccattttcaggtcatccagcaccagatacatcagataaaaggtaagcaggataaaaaatcccactatcacatcaatggttccgattcttgacaatgtaaagtgcatgaaatcaaagactatcaacagtgctgcaaatgaggcaatccatgtactccggctgattttccgcataaacgcatagctgaccggcaccatcaggatgccaaacagagcgcatacacaccgccatccaaacggcgtcattccaaatacgcggattcccagactcatccaccattttccaagcggtgggtgcgttgtctcataaattgtacgcccttctactatctcatttgccgttctggcatggtaaacctcatcaaacatactttggtattcataggttgtatccgccggaaacaattcctgctcatcaaatgcctctggataatcctctgcattggatggaaggatcggatttccatccggatccagaagaacgatttccagaacctctgcactctcatccatcgacacgatccctagttcgtaagtgcggtaatgaatttccactggattccagcagtatacagataacaattctgtctcttccccgatggcatcccagccatctccctcggcattcggaaccgagcatacaaaatgtctcttctcctttccacccagataaacctgtgcttctgagatagtcacacttccatcaaaccgaagcaccatctcatttccgtggctatcatttttttcaaattcatacgcagtctgcggcgccttcatgtttccaagattcacaaatgccatcacagcaaagagaactgtcaatcctgctgccatacaccagtcacggccggaccagggcgcgccagtcttttccgactctgtgttcttttcacaggattttattcccaagctcttcccggcatctattttttcactccccgtcattcgttttgatacgcagcgtgccgcttttgcttcatccagctcgactttcgattcaggaatttgacatttttcatgtattattccaacataagaagcgattccatatacacaggttcccacacccagtaccgcaaaaaacatcagcatcagcggataaaattcatctcccggactgcactgtccgaagcgctctccggtgatatcccgcgcccagagtatgccagttcccgcaaccgtgagaagaattccaatttttttgaatctttctattccaaggcgcgctctgaagcgctctatccacgaactgcccatgaaaagaatcaataccgccagccagataaaaagcatccgctttttgccctgtgaaagaacagataataccgggatcggattccagatataaagatacaggcattcccacgctgattcccggcttccgtttttcccggacaaaatatataaaagtccggctgtcaccagatccattgccatgacttccaggaagccatgaacctcctgattagaaatggcaaagaatacaaagcgcgtaatcagatacccggccgctgctttccagcaaagctttcccgccatcccccgctttttcttttcctcatacagccagatgacagtcaggcacgccgtaatggcgatacagtaagctgatttcattctggcacctcctttaacgacttttttaagtgctccatttcggtggcactcccctcagacacgccgtttctttctcatcgctataatttatatactcccgggatcctccctgcacatacgcaggaaagagctcgggagtatatgaatctgtttccatcatcctatatgcaggagagcaaaaacaaggttaaaatatagattattgtaactgtgaaggtactgaacagttacagatcattaatgtttgtaatcgccccaaatctgaacctggccgattattttcacttcgtactcttagtctcagattgatcattatcctgttgtgtacggcgccggtggtgcctgcgacccacccgttggctccggtgctggctccgacccacccgttggctccggtgttggctccgacccacccgttagctccggtgttggctccggctgggtcggtttcacgctcggcgtcgggttttcggtcggttctttcgtcgccggtgcatcactcggtaccacactcggcgtttcacttccaccgccgcctccagaatgtctgcgttctttggatgttctggaattcagcttcggtgtatcggcattggtcgtctctaagatggtcatcgttccgtcttctgccacttttacctcaaagcttctcgccggtctcggcttgcggccgccgaacgatgtgccatcgttttcaaacgtataaggaattccgttgatactgacaacgcccgttgccatctctccactgtccggtgtgccaaaataataggtttttccattgatccatacgacaccgctgaccatttctcccgacgccgtacagaaatactgtttgtccccgtcttttacccagccgatctgcggtgctccctgttcattcaggtaataccattttccatcgatctgctgccagcctgtctgcacctgtccgtttaggatgtaagctcttgcacttcctgtacctatccattcggcaaaagccggtccggcatacaggcccatgatcaaaacggcactgagtgcgcaggcacccaccttcatccatttgcgttttctcatcctcatacctcctcgtatttttattaatcgaaaagctatctttcatgtgttttttatttttaattctggagtttttcttctttttcacgatttcaagcttttcttgttgtattcatcttatcatttgttttatttttctacaattcacactgcacaagatgtcatttttttacacaagatgtaaaaaaatgatactctaaccttgacaaattgattttcagaagctttcatccacaaacacaagggcagaaaaaattccagaaatgaaaaccccggctgtgagtggataaacttactcacagccggggtttcattttcacatctgtataaaatctcttagccgatcacatccgccatatcataccgtccttccggctttcctgccaggaatttggctgcctgtaccgcaccctttgcgaaaatcgccttggaataagctgtatgattaaaggtaatcacctcatcctgaccagcgaaaatgacatcgtgttcgcctacgattgtgccgccgcggatcgcctgaataccaatctccttcgcatcacgtttctcacgtgtagcggaacgatcgtatttgtaatggtatgtattgcccatcgcctcgttgatcgaatctgccagcgcaatcgccgtaccgctcggagcatccaccttctgattgtggtgtttctccagaatctcaatatcaaatccagccggagccagaatctgcgctgcttctttcagaagctttaagagcatattgataccaagagacatatttgcagagcgaagaacagctgtcttctctgccgtctcttctacctttgccagctgtacctcggaaagtcctgtcgtacacagaacaaccggcattttcttctctgcacaccagtcgagaagttcatcgacagctgctgcattggaaaaatcaatcacaacatccgcttctaccttacattcgttcagagacgcaaaaaccggataatcatttttctgctcggttctcatatcaatacccgcaacgatagagatctcctcgtccttcgctgcgattccggaaataacctgtcccatggcgccattgcagccatgcataattgctcgtaccatctgttaaaacctcatttccctatctcatcctaattttaacggttcttatcactctttcaggctgattccgtaatttaccagttctcttctcagacgatcgcggtttgccggttccatatccactaacggtttacggaacggacccacttcctcgcccatcatgttcatcgcttccttaaccggaatcgggtttacctcgcagaacagcgcctcaatcagtggaattgcatctatctgcatctgtcttgccttcgctacatcgccagccttgaatgccgcgcacatatcatgtacctgacgcggtgccacgttggataatacggagataacgccctttgcgcccagtgccatcatcggaaccgtctggtcgtcgttgccggagtaaatatctactgttccgcctgacaggcttgcaatctgtgcgatcgcggagaaattgccgcttgcttctttgacaccgacgatgttctcatattccttgcacagtgccacgatcgtctccggggtgatattgacgccggtacggctcggtacattgtacagaaggatcggaagatcaactgcctttgcgacctctgagaaatgaacctttaaacccttctgggttgatttattgtaatacggggatacgagcagaagtccgtctgcgcctgcctttttcgcttcggtagacagatataccgctgtctctgtgcagttggaaccggttcctgctacaaccgggattctcttatttacgacctggcatacgaaacggatcacctcgatgtgctcctcatggcttaatgtagccgcctcgccggtcgtaccgcaggcgataatacagtctgtgccgccagcgatctgttcttctacgatctgctccagtttctcataatttacgcttccatcctcatgaaatggcgttaccagcgctacgcctgctccttcaaaaatagacattttgtttcctccttattcttttgcacgatggctgagtttctattccagagtccgtttctgtccccgcttcaaacgaatgtttgcagcctgtcggtcctgagcgtacaaaaagctggcacgacggccagctctatgaattcaaatccaaactcccagtagctccccatctgtcgatgacagttacagaattcttcatcctgcacccaggaactgcagatacaggcgccgcagcccttcggcgtatcatcctttcagctgtcttctcctgcacctgccgcatccgaccgcttactgataatcaacgcaacctctacttgttttttctatcttagcattactttgaatacttgtcaaccgttcatgcacgcatgatcgtttgacggcttcaggcattccaggcgcgtcacctcgtctgcatgctccttggccccagccggacatacttttccggtcagaatcagatcgacattctcctcgcgcgctgccagcagtgtttccagagcatcgtctccgaccagtttctgatctaacaccccaagaaattcatccagaatcagcatatcgcattcgccgatacagagtactttttttgcaaaattatacccattctggatattgcagagctcttcctttttgccttcttcagagagattttcataatactcattctgtttttcaaatcggaatactttaaatgccggctccagctgttttaacccatctgctgtctcatggctcagcactccctttaagaattgtatcataattaccttccggccgtgcatggctgcactgacaccacgtcccagtgccatcgctgtttttcccatcccggtgccgaagatgatatgaactttcccctttttcatttccctctcctctttctgtgcctcccgctgcgctggcgcacagactgtctttcctgatgtctttttacacacagacctgtgtgttttatttctatccatccaataatcgttttacgaattctgtaagctgccttattctagcatattttatctgttttggcaagctatggcaaaaccagccatttatcatgccctatagattgcataaccggcttcaaactttgctgtaacatcctaaacctatcctattcttccacgcactccagcttgctgaccgacacctcgtatgccacacgtttctcgcactctgtctcgctcagcttcttcgtatattcacggctctgcacgcgcccccacacgcacacgtggcttcccacgccaaatccggacgcatagcgggcatttctgccccacgcaatacacggtatgtaatcggattttccatacggacggttgaccgccagcagcatatcggcaatctcgcgtcccagcggtgttttccggtagatcggctccttgcagatatagccttccagaaaaatctggttggttttggtgtaatccgtaaattcttccaggaaatgaatctcacggacaaacacagacagcaccagacggtttttcgcgccctcatgacggttgtaggaacggaactggccgatcgcctccatcgtcattccgcggtagtctttcgatacatccagaagccgttctgaaatcatgagtggaatcacgtccacctgatcgctcagacggctgactgccaggtctgcgatataaaatccttccccgaatacttcgtggctgaatgtaaattccgatacgacctcaccaatcacgctaaccttgttgttttcaatcattttttccgacatagtatctctctcctcttcttttttgcagtttttcacggcaggttcttggagtcctgcttcttactgtatatatgtatgaggggaatgaccgttttagaagaagaagtgagggggaaatttcgacagggtgggggacatgaatcgacagagggaatgggatcggcagagggacggaaacggcggggcgcgtcgtttcctggatatctctcgcttgaatatacgaaaaggagcagctggcttgcgcggctgctcccactttacgattatttagctatttttacggctgatcatcgctctctttctcagagtcggatcaagaatctttttacggattcgtaagctggtcggggtgatctcgagaagttcatcggtatcgatgtagtcgaggcactgctccaggctcatgattttcggcggaacaaggcggagggcttcatcggcgctggaagaacgggtgtttgtcagctttttggttttgcagacgtttaactcgatgtcttccggttttgcgctctgtccgacaatcatgccggagtaaactttaacgcccggtccgatgaacagggttccgcgctcctgggcattgaacagaccgtaggtgatggactcgcctgcctcaaatgcaatcagggatccctgtttgcggtaacttaattcgcccttgaacggtgcatagccgtcaaagctggtgtttaagataccatttccctttgtatcggtcatgaactcgccgcggtagccgatgagacctctggacggaatcgagaactccagtcttgtgtatccgccgccgatcgggctcatgccctgcagctcgcctttacggctggtcagcttctggataacagcaccggtaaagtcatccggcacatcaacgtaagcgatctccatcggctctaatttgcggtttctctcgtcatatttgtagagtacctccgccttgctgactgcgaactcaaagccctcgcggcgcatattctcaatcaggacggacagatgcagctcgccacggccggacaccttgaagcagtcagcggagtctgtctcctctacacgcaggctgacgtcggtattcagctcacgcatcaggcgctcgcggatatggcgggaagtgatgaatttaccttcctgacctgccagcgggctgtcgtttaccatgaaatccatggaaatggtcggctcagaaatcttctggaacggaattgcctccggtttctccggtgaacacagggtatcaccgatgtggatatctgcgataccggaaatcgctacgatcgaaccgatctttgcttcctgtacttctactttattcagaccctcaaactcatagagcttaccgatcttaactttgcggaacttgtccggctcatgatggttgacgatgacgcagtcctgatttactttcaggtaaccgttgtcgatcttaccaacgccgatacgtcctacatactcgttgtaatcaatcgtactgatcagaacctgtgtctctgcatccgggtctccctccggtgccgggatgtaatccagaatggtctggaacagcggctgcatatccacattcggatcgtccaggttcttctttgcatatccagaacgtgcagatgcatacaagaacggacagtcaagctgctcgtcggatgcatccagatccatcagaagttcgaggacctcgtccacaacctcctccggacgtgcttccggacggtcaatcttattgatacatacgataaccggcagatccagttccagtgctttacgcagaacgaatttggtctgcggcatcgcgccctcgtatgcgtctaccagaaggataacgccgtttaccatcttaagaacacgctctacctcgccgccgaagtccgcatgtcctggtgtatcgataatgttgatcttggtgccgttgtaattaacagccgtattcttggacagaatcgtgatacctctctcacgctcaatatcgttagagtccatgacacgatcgactacttcctgattggcacggaatacaccgctctggcgaagcagctggtctaccagcgtcgttttaccgtggtcaacgtgagcgataattgcaacgtttctgacatcttcccgtttcattttcatatctgcttactctcttttcttatgatgattcattacatgtactaattaataattattttctgtcacagacaagcatcctgccgtttcgtctttggcaaaggatccgcccacaaaataatacagcttgttattttagcatttttttatccattattcaatctttttttacaataaaatgatttttccgtcatccatgccaaaataaacttcatccagtttttcgatccggcatcttccatttgtgccctctatgagcttcttctccgctgctcccgcctggtcaaacggcaccaggatcgtcagatccacgccctcgccgtactcgctgtccagaatcggcagctctgcttctgccaaaatgtactgcacctttccaagcccgctgtagtctgtcccgaccttccatttgcgagccaggcatttttccagaaccacacagtttttaagaccttcctggaccgcgccgccgtatgcccgcaccagtccgccggttcctaaaagtgtcccgccaaagtaccgggtcacaaccgcacagacgttgtgaagctcgcgtcccaacagcacatccagcatcgggcgtcccgccgtctgcgccggttcgccgtcgtcgctgcagcgcgccacctcgttattttctccgattgtaaatgccgaacaatgatgtctcgcatcccaatatttcttcttgacttccgcaataaatgccgtcgcctcttcttccgattccaccgggcggatctccgcgataaagcgggacttcttctccacaatctcgccctctccgccctgatagacgattttatagcgctctttcatgattattcctccatcgtaactgttcagtaaatgcgcagacctgctgaacagttaccctccatctatacactacgcatccttaaaacggacgttttttcacttctttaactgcttgtaaacctcagttactgttcacgcatacgtgctcactaacaaaccttatcttttatgataccgtaaaaaaaacttcatgacaatagtatttatttatcctatgaattttgatataattggaaatactgtatttattaatagaatgaaccactacgaacccaaaggaggttctcatgaattacggtgtaaaagcaaccaagaaacggatccgggcagccaattcccggaagaagaaatacgccaaccggctgtttctgaccttcttcaagactgcctttgttcttgttctgtttctctgcgtgacgggtgccagcacctttatcggcatgtttaaaggcattctggacagttcgccagacttcaacccggacagcttcaccccaagcggatatttttctactatatataatagcgccggggaagtgaccgacacgctggtcggttccaactcgaaccgaattgaagcatcctacgaggattttcctcaggatctaattgacgcgttcgtctccattgaggactcgcgtttctggcagcacagcggtatcgatctgcgctccatttcacgcgccgtggtcggtgtcctgacaaataattataaaggcggcgccagcaccctgacccagcagctcatcaaaaataccgtcttcaacggcggtatggagaccagcaaaggttccaaaatcgaacgaaaaatccaggaacaatatctggcgctgcagctgacaaaaaacgtcgatcggaaggtcattttaacgaactatttaaatacgatcaacctcggcagcaatacgctgggcgtcaaagcagcggcgctgcgctattttaataagaacgtctccgatctgactctttctgagtgcgcggtcatcgccggtatcacacagaatccgtcaaagctgaatccgatcagcggcgcggaggcaaatgccgcccggcgcaaggtcattttgcaggcaatgtatgagcagggctatatcacaaaagaagaacaggaggaagcactggcggacgacgtctacgcccgtatccagaatgtcgacacggcgctcaaggaaaatgagacaccgtactcctattacacggacgagctgatcagccaggtcaccgaagcgctcaaagagcagctcggctatactgacacgcaggcgtccaatcttctgttcagcggcggactgcagatttacaccccgcaggatccgcagattcaggcgatcgtcgatgaggaagtcaacaatcctgccaactacgacgcggctcgctattcggttgaataccgcctttccctgacccatccagacggggaaacgcagcattattcacaggaaactctgaaaacatggctccagcaggtcaagggacaaagcggttttgacgggctgtttaattccgaggaagaggcgcagacggcgatcgatgagtaccgcaccgccctcacgcaggacggaagcaccgttctcggtgaatcagttaccatgattttagagccgcagacctcgttcgtcctgatcgaacagtccaccggctatgtcaaggcaatcaacggcggacgcggacagaagacggcaaaccgcaccttaaaccgtgcgaccgactccctgcggcagccaggatcgaccttcaaggtcatttcctcctttgccccggcattggatgcctgcggcgcgaccctatcaaccgtttactatgacggaccatactcttccggtgaaaaagagttccgaaactggtggggcagcgattacaagggctatcacacgatccgcgacggcattacctattccatgaacatcgtcgccctgcgctgcatggcggacacggtaacgccgcagctcggtgtcgaatatgccgaacggctgggaatcacttccctcgtaagccaggatcagactctctcgacagcactcggcggtctgacaaagggcgtcagcaacctggaactgacaaatgcatttgcggcgatcgccaacggcggcacctacacgaagcctgtcttctttactaagatcctggatcgcaacggaaagatactgatcgacaatgaaccggagacgcggcaggcgctcaaagactctaccgcctatcttttaaccagcgcgatgcaggatgttatgcagagcaatacaatgtatacgcgttccggttccggggttaaatcgaccggtacgacagcggcgattcccaatatgagctgcgccggaaagagcggtacgaccaccagcaacgtcgacgtctggtttgtaggctttacgccgtactacactgccggtatctggggcgggtgcgacaataaccagccattaaaaggcggcaccgtttcaaacggcggtaccagttaccacaagcgcatctggcgaaatatcatgacacgtgtccatgagagcttaagcgaccccggatttacggttccggacagcattgaaactgctgacgtatgccgcaaatccggcaagcttccggtttccggcgtctgcagcagtgacccgcgcggaacggccgtctacactgaatatttcgcgaagggcacggttccggccgagacctgcgatcaccacacccgcgtgacgatctgctccgcctccggcggcatctcgactgccttctgcccgacgaaccagcagatttccaagacagttatggtcgttccggaagacggcggagaaacggacgattcccgcttctccatgccgggcgagtgcaagattcacaatggttcgtccacgatcatccatccttctgagagcgccgatttctcagctccgggctacagccccgattcagataatctatcggctccgatccactctgtggttccacgcccgatgacgggaagtggacggaatggaaataatattccgattgtcccagcgaatccggagcattaacagcaaaataatatatctgcaaaaagctgctgtaaaaagtgacattcatatgcctcttttacagcagctttttatttcctcaacttgattttcttttgctttgctttcttttacttttccttttttcgtcttctctctaatccttcatcttgggtttgcaaatcagcgacgacagatagccgaagatcaacgccccggaaatccccgccgcacccgccgtgaatccgccggtgaacagccccagaaccccatccttatctattccatcccgcacacccttccagagcgtattcccaaaccccagcagcggcactgttgccccggaacccgcccatttggcatacggttcgtacaatccgatcgcaccgagaatcgagccacataccaccaaaagtaccatgatccgccccggcatgagtttcgttttatccatcagaatctgcacggcggcacagaggagtccgccggtcacaaatgctttgatatagtccatttttttgctccctctctaaagtttcttgcaaatacctatcattcaccgaacgattcttttccctcaagcaccactccatgggcaatccccggcacattctgcccctcattaaagctgatctgggacagcagcgccccggtcggcacaaacaggacgcgtttccactcacccacctgtattttcggaagaatatagccgcacagcaccgccgccgagcaaccacagccgctcccgcccgaatgggtatcctgcgtcttcgggtcaaacatttcgatcccgcagtccatatggatgctggaaatatcctgtcctgcctcgcgcataaaatcaagcaggatttccttccccaccattcccagatcgccagtgatgatccgatcatagtcagatggtttccggttaaaatcacggaaattctgcaagattgtgtctaccgccgccaccgccattgccgcccccatgttcatggaatcgcgcatctgcatatcgacgatctttccgggggtggcagctgagatacaaggttgaaatttgggatgcaatttttcctgtccagcatttttcagtgattctgacgcattttctttcgctctgcgcccatctttcccttcatttttctcatttccctcgatcatcacacacccgcacccggtcaccgtccaggttgtggactgcggtctctgattcccatacgccagcggaaaccggaactgccgttctgccgaggcaaaatggctcgacgccagcgccagaacccggtccgcatagccagcccctgctgccatcgcccccagaatcatcgcctcccccatcgtcgagcaggcaccgtaaagcccgaaaaacgggatatcaaacgactccacaccaaacgaggtcgccacaatctgtcccaacaggtctcccgcaaacaggcaattcacatccgccgcctgtctgcccgccttatccaggcatttctgcaccgtctggcgctgcaattcactctccgcctcctcccacgactttttcccaaacgtcggatccggctccacccggtcaaaaaaacttgccagcggtccttcgccttccgtctgccccacgatcgatgccgccgatgtgatgatgggcggatgctcaaactggatgcttgatttacctgcctgcataaaattcctcctgaaatacaaaaagtgtcattaaaaatataatgttcaaactttcgctacaacctcagtatttacacaaacatacatttttatgtttcaagaaatctgcattcctcgcaggcttcatccacccgttttcgccatattattaatactgcaccgccgccagtttctctctcagctcctgcgggttctgggacgcatcgactgccgtctgcggtgtaatcacaccctcttttgccatacgaatcagaaaattatccatcgtaatagagccctcttttgcactagaaagcagatagctctgcatctgcggtgtttttccatcgcggatcagattccggatcgccggcgtgagcatcataagctcacaagctgccgccctgccctggccgcccgccctcggcaccagctgctgtgacagcaccgcccgcagcgtcatcgagagctgcatccggatctgcggctgtttatcctctggaaaaacacccacaatccggtcaatgctgtcgattgccgaattggtatgaatggtggaaaaaacaagatgtcccgtctccgccgccatcagcgccgtctcgatcgtcgccggatcacgcatttctccaatcagaatgacatccgggtcctcacggagcgccgcataaagccccttatcatagctctctacgtccacgcccacctcgcgctggttgatgatcgcctgcgccggttcatagacatactcgatcgggtcttccagcgtaatcatatggagcggacgattctggttgatctcatttaaaattgccgccagcgtcgttgacttgccgcttcccgtctcgccggttaccagaataatgcctttattccagcttgaaaactgattcactgcttccggaagccccagctccgacaggttcggaatcgtactgcccagaagacggatcgccgcagagagcgcgccctgctgccggaacagattcacacggagacgccgtcccgcaaacgaagcactaaaatccagctgtccgatcgcctcgatctgatctgccgcattgcctgccagctggcgtccatattcctcacaatcctcacgcgtcagcccgccatccgtcagcgtctcgattctgccgtcaattctgcattttggcggcagccctgcaatcagatgcacatccgatgcccttttttcagctgccagcgcgattaattcctcgattccatacataccatctgtctcctcttctctttctgcaccatttacagcgccagcagcgtccggatcacctcgtccaccgtcgaaacaccctcttctaccagcttctgcgcgtgttccagcatcggaacatactggctcgctcttctggctgcctctaagaaacgtgtccggtcagctccttccagaatgcaccggcgcagctcctcctgaatcagcattacctcaaacacaccgattctgccccggtatcccgaatggaagcactgatcgcatccggctccctgccagtataattttccagggttctccgggattcctgccatctcaagcgcttttttcggcggctgaatctgggttttgcagttcggacagattttcctcagcagccgctgggaaataacgcctcgcagtcccgccgcaatcaggtatggcgccacgcccatatctcgcagacggtcaatcgccgagatcgcatcttccgtatgaatcgtggtgataacgagatgtcccgtcattgccgcacgcatcgcgatctctgccgtctcaccgtcacggatctcgccgacgcagatgatatccggatcctgacgcagaactgagcgcagacccgatgcaaaagtcagccccactttttcattgatctgcacctgtgtcgcgcctttgatatggtattccaccggatcctccaatgtaatcaggttggtccgatccgaaagaagttcgcggatcagcgtatacatcgtcgaagatttacctgaaccagtcggtcctacaatcatgataactccggaagtaagccctaaaagtgtatcaatctttgcatcctccactgccggaataccgataccgcggcggttcaacgtctcctcatttcgtttcagaatacggataaccactttttctccatacagggtcggaagggtggatatacgcatatcaatatcttttcctcttaaatgcatcaccgcacgaccatcctgcggaattcttttttcgacgatatcgagctgggacatgattttaagcctcgaaatgaccgaatccttgagttccgacgggatcgtcatgatccgatgaagctgcccgtcgatacgcatcctgacgaccatctcctcctccgtcggctcaaaatggatatccgaagcattttccgaaatggcacgctcaataatcgaattgaccaggcggatcatcggtgtcacattttcctgtctttctctttccgccatctgcccctgcccctgacgcacctcttgtgccgctgccgtctctgcctgcatctgcgccatcgcttctgccgctccctcgttgccatacaaaatattgatcgcacgcttcactgccggttcagaggcgatcatcggcacaattctctttttggaagtatgctgtgcttcctcaatcgccatgaagttcagcggatccgccattgccagataaagctggtctttggaaatacgcaccggtacgatcgtcattttctttgccaggtttttcggcacaaaacgcgacagttccgggctgatatcgacccgcgtcaaatcaatatagtcaatgcccagctgcatgcgaagcgcatcgatcagctgaccttccgtgatataatgatgcttgaccagcgttgttcccagacgttctttctccttcgcctgatagtcaagcgcctctttaagctgcccttctgtgattagtcccagctccaaaagcatgtctcccaatcgctttgtacgcattctctctacctccctataaatatggatctagttattcagccattttactgcggaaatcccggatccggtcaaagcagtctcgatccatctcgatcgccgtctgatttccagtcgtcacaatccacgcttcttccagaagccgccggatgatccgcgccgcctctttctgatcctctgcggtcgtctcacggatctcctctgtccaacgacggatctgtacaatatccaggccattgtacgcatactgcatcgctgccatccgccgtcccaggcatccgcacggcgccgtcgcattgccgtaactgcttaaaatatagccattccgatctgcctccgaaagctgcagtttttccaatacacccgctgccgcccggatcgcctcgatcgtctcactgaccttcggatcccggtatgtactcgccacgatccggtccatcgtcggcgtaaatgcaaacgacgcgctgtatgcgccgccttgaaaacggagctgcggcacaaaataccggtcatccagcgcatttacatacggaagaatccgcccggaaaatccatctacagcgctcagctctgccgaaaagacggtatactggctggagctctccacaattaccgcctccctgcgcgccggaaccgggaaagtatacccagcattttcccctctgttttccgttttattctcatggtctggcatctgttctccccgcagatttcccagaatccgccctgcacagttccgcatccattccagattttccctcggtgcaacatgaaggatcgtcaccgctgttccatgcaggatgcggtcgcgcacctcctccatcttctctgccagctggaagatcgctgcatcctcctgttccagtcgcccgcgcagttttttcaaaaactcataaaacgcctgtccgccgacatattcctgataccgcgtattgatgctatagccagatgccgccagacgcaccgccagcgaatacgcatcactgcgcgactcatcacaggacggaatcgtctcatccagtgcctgaagaaccgcattcttatctctccagagtggatgtgataagagttccaacaggacatacaggctctcttcataatcctccgccatcccataccagctgaccgccagcgtcggatggctgtttcgtcccgcccgaacctccggatgtccctcattcatggaaaaatcatgcagatagcgctcaatctgattttccttttccattctgccataccgggcattttcaagctctgaaacaaacattgtatataaaggaatgtaaaaacggtcctcttccggcacgccgctcaaatccaggtataaacggttatagctgatcgcttccagatccgacggcgattcatagaccgaaatcccatttatctcatatatctgatattccggcgtctcttccggcggcggaagctcatcgacccggatcataaaatccgcattcgaacactccgacgcattccacgcatcaaaatccagggtcttcgcaatcagcgcatccagctctgcctcgctcatctccgccttcatctgcgccagatacgcgtcgcgctcctgctccatcgcctctgccatccccggcgtcggaatcgtcgtgacaagaacccgccgcttcgccgcgccaagctctgccgcaaaccggcgaatctccgcctgtgccgtccctgcatccagagaatcataggctgccgcctcatccgcatacacatccgcatcgcccgtcaatgcccatttcaggctgacttccggcacgatcgaatccgcaaatacatccgtatcttcgcctgccgtataatcatgtatcgcccgcgccttgagcgccgtctccaccactgacgggtcgatcccgcgctcctgcatctcgcataatgtctcatccgacacctgccggaaccgttctgcatccttcggactgctgtctgtcatttcgaaaacaaaaaatggcttttctgcctccatcatcaccgatgcactcgcatcacaatggatgcccgccgtccgcagcttttccctgaaaaccgatccatccacattcatcattcccgcaatgatgctgtactggatcagcttttcccatgaaatgccgctcagatccatcgcatacgataccaccgccgcattctccgatgcgtctccccggtaagcaggactgggaacggttgcctgacggaagaatgattctcccccattttccaaaccatctggctcggggctgtaaaacgcactcatccctatattctgcatttcctgtttttcctgtcgcccgctgcctgactggaaactccatccgtcttcttttccatagcttttctttgcatcacacagatactctttatccaggaatgccagaaaccgtttccagtccagatccccatacaacaaaatcagagcattatcgaaccgataaaatcgatcatacatctccatcgtatgttcatacgtcagatccttataaaaacggtgcgcctgtccattcgcatttgccgccgtctcccccggatacagcgcccgcaaaacattccgcagtgcctcattatctgtatcattcagcatgccgaaatcctcgctgtacaccgttcctgccagcgtaatcgggctttcgcggtcgcgcagctcatagcggaccgcttcacggtcaaaaaagcggcgttcccgccggattcccggcgctttcatgcagcttaaatacacatctgccatcttaagcagctgttcctcgctctggctgcacaccggatatgccgtaaatggtatataggtaaatgcatttacaaatgtgtggtatgtcttgctgcaaagatcaaaaaaaatatccttactcggatatttatcagaggaagcaagtaccgaatgctcaaacacatgattcgtgtccgtctcatccagatgcggtgtccgataggaaatcgagaatccccggtttgtatctttatttctgatataaaacagggacgccccgcttttctcatgttcaaaatacagtgtctgcgctcccagcgcctgcagttttcccacctgtttcaatgtaaaacctgctgtctgaaatcccggctgcagtctcccatctgccgccctccactgctttgtatctgccattcttttatcatgcctcctgccatcattcgtctgctgtcttttctctatatctattatacaaaagcacgtcctatatttccatagaaaaaagcacatccggttcactctgtgttccggatgtgcttctctgattcataaatctattatttattctttccgcagcacttcttgtatttcttaccgcttccgcatggacacggatcattcggataaatcttatgtgtattgcggactgtgccagatgccttctgctcgcggtacagctctgttcttctctcctcagtcaggattgcatcccactgcggaagctcatacagccaggtagcctttgcctctaccatgttgtaatataacttctccgggtcgatctcaatcttaaccttggtatcctcatccatggtctcgatcgggttctcatagccctttaagctctcattgattccatccaggaaaccggtcatgatcataacttcggtatcatacttctcagccagttccttaacggtaccttctacaacctcagtcgggtttgcaagaatctgctcgtaaatgcctttctcaatcgtaaaatatccagaccagagttcctctttctttttatcatccagcccgtcaccatatgccagattgcgccaattttctaacagtgtcatcggtaattccttccttttttcgttctttcattactataataacatagtatatttaagtatataacaagttggggggatttgcaaggaggaaaactggcatctgcctattttatcgcataagcaaacgtatcactcattccgtatcgccgccaacggactcagcttcatcgcgcgcattgccgggaagaatccggctgccatgccgatgatgatggcaaatcctaccgatggaactgccagccagatcgggatcacggacagttttccatccattccatataaaaaagtcgctgccagaaactggttaatcagcacggaaaccataaaactcagcgtcagtccgatgagtcctcccatgaaaccgataaaacctgcctcaatcagaaacatatttcggatggttgcaagggaacatcccagcactttcagcacgccaatctctttcgtccgctcatagatggacatcatcatcgtgttggcgatgccaatcgcagcaaccaggagggagacggcgccgatgccgccgagggctgcctgaatcatattagactgctgcttggactgttccagccactccatctggctgtttgcctcgtagcccatgttgctgatggctttctgaacctctattacatgatccatatcgtccacattgaccgtcgcttcctcatatacaaaataattgtacggttttccttttttattggtcggctgtcccggaatcggctttttcttaaatatctgtttcagctgtgtcttgagcttattcagatccacgtagacgccgtagctgtaatcactccagtcttccggtccacccgctaccattccagccgttttcatcatatatttctttggcgccgctactttctggctgccatcctcgccgccggaatttcccttggactgatagtacgcatccgtgtcaaagatcgtaaacatcggtttgttgataaaatcgatgtccggcatctccccggtgtcccagtaaccttttcctgtcttggcattgctaaaattctgtgcgaccatatttccgactaccatctccatgtccttcgtttcagttgtcggcaggcttccttctcccagcttgatattcttcatcgctcccaaggggatcccgtgcagctgcacatttccctcgtaggcaccctgacgcataatcacattcaggttcagatccggataagcacttgtcacatgcggaatcttttcaaatgtcttcatcgtctcatccgtcatgaagctgtcttccggatttttcttgtcactggaatttccattgttataattatacacctgaatcgcggtcaggcttccataggaagaatactgtttgatggtaaattccttcagtcctattccgatggaaaccatgactacgatcgatgccgtaccaatcacgactcccagaaccgtcagaaaggtacggagctttctgcgaaacaggttgttgacactcatcgtcagcagatcactgaatctcattttcaccgatcctttctattttttctttcttttcagatgatcgttttgttctttttcaacgtcctttgtttcgtcttccgatacatctgctgtcgtcatttccggctcgcccagctcattgtccagttcctcttctaattcgtcttcaagcgccttttctcctgctattttcttctttttcctcttccagacaactacaccgacacctgcgcccaccagcgcagcgatcacaagcatcggagcgatccgcccagcgccgcccgcttgcgccgcatcggcatctgcatccatgccgttgtccattctatccatgccgtccatcccgtcatcggaaaacgcctcactcacgttcagaagcatttctttttcagtctctgaaacgactccattttcatcctcataggaaatgataatcttcacttttccatcatcggttgtcggcgcaatcgcggtcagcatcgtatcgacattgccggtttcgcccggcttgatatttcccacataagcgtcagctggttggatagaatctgcctcaaaacgcgccataacattgtaaagaattacttttccggtgttgttgatgccaaacatgacattcgtctcagaaccaacctcaaccgcatccggcatcacatcgatcgtactggtgttcagacgcggctcctgcttgaccggaagtgcaatcttgacctcttccttggcatttttaaattccgggctgtcgtactgctcctgaatcgtcatgcggtatgatttttgctccgccgtcggcgccgccttgaacaccatcgagagatccgccgtcgcccccggcgccatgttattgacaactacggaggtggaaccgctctcggatgtaaagatcggcgtattttcaacttcttccgaagtaaatgtaaacataatattggaagctgccacatccgaagacgcattcttcatccgcacacgcagttcaaacggctgtccggcatagatctctgccgggatcgtctcgaagctgtccacgatgatacgcgccttggttcgatcctgctcgcccgcatccgccgacagctcatcgccatcttttcccttgacgcgcacgtaaaacaccttgtccaccggctccgaaaattctccgccctcttcttcgcggtatgtaaccagatagtgaatcgggaaaaagcccgattttacgtcctcacgcaccatcatgctgtacggaaccgtcaccatctgccctgattccatatcccccattttacggttatagttgccctcattgatatcaaacgggaatttcgtaatatctgcgtcaagctgcatatccacgcggacatcgtaaacctttttaagtcccgtattggtcaggttcacgccaaaatccatgacctgattgtaccccgcatacggcgtctgctggttatccccgatggaaaaatcgtagtccagcttcgtgttgtcgtcttcctcggtggaggaaccatcgtaggcggatacccagatgttgatgccgacttttaggctgtcatcaatatagaaaaacgcctgataatatcctgctgccaaatcccggcgcagtttatacgtcaatgttacacttttagacgaacctggctttacatcaattcttttttctttaaacgtatttgaatcagcttcaaatggaaaatgttttccagaccatgaaatattggaatccgaatcactgtcatcatcatcgtcatcatcatatgtataaaattgatcgtattgatccgcattggctaaacgaattgttcttaaataattatctcctttgctgccattattatgaaccgtcatcttaatcgaaattttatttccggcctttccgtgcggcactttactgacggtaattaaatcatcgttatattttgtcatatccagcatttccgcctgcgccgtccggcttcctcccaccgccagcaccacaaaaagcagcaaaaacaccgcccatctcttccactttctcatacctctcatttttcatacctccatatcctctcacattaaatgctgcttttatcaatttctcattctatcgtcggcattcctgtgttttagccttctaaattccagacacagccaacactctatttttatctgtctatttcatatctgctccgtctttcgctctcttaaatttcctctattttcccatcttccttacccatttgccgattctcctctatcttcacaatcttaccatcgataatatggaagatccggtccgcatacgccgccagatggttatcatgcgtgaccataaccagcgtctggttctgttcccggacgatccgctgcatcagtttcagcacatccatcgtcgtgtgcgaatccagatttccagtcggctcgtctgcaaaaatgatctctggatgtaccaccagcgcccgtgcaatgccgacacgctgctgctgcccgccggacatctggttcggcatatgatcgccgactttttccagtccgaccattttcagatatttttccgccatctcccggcgcctgccgcgcggcacaccgcggaaagacagcggaagcgctacattttcaaccgcattcatcgtaccgagcaggttatatgactggaagataaatccgacccgctcccggcggaatgccaccagctggttctcgtttaatttttctatgtgctgtccggctatgacaatctcgcccttcgtcggcttctccagccccgccagcatattcaataaggtagatttacccgaaccggaggtacctacaatcgcacaaaattcgccacggtacatcgtaaaatcaacgccgttcagcgcgtataccttcgtctcgccgacgcggtagactttatatagattttttacctgtatgacaggttcccgtttccggaattcattcttccccggcactttccgctcttccatcagccttctccattttctaacttatttcctgctcctgaatattccatcgaaatccattcctgacagcctggatttatacaagtttcaaccattgcaattccagttcttctttctacattataccggatttgtttcaattctcctaccttatttttcttaatgttccttacgcttttcttaccagatttttcaccctgtctgaccgttccttacgctaatccattttgccctggaaagtcatttttatttcctatttcatcgcaggtaatcttccagccgtcatcacattgtccatattttctatcccccctattcatattttttatatcacagatcattaaaagctatagcaatccatctggaaatgttttataatagttgggaaaaatatgctaatacgaatagagaaggagaatcaaatgagacatttgctgaatccactggatttttccgttgaggagatcgaccagcttctggatctcgcttccgatatcgaagccaatccagccaaatatgcacacgtctgcgacggaaagaaaatcgcgactctgttttatgagccaagcacccgtacacgcttaagttttgaagctgctatgctgaacttagggggacgggttcttggctttgcttctgccgattcaagctctgcttccaagggcgagagtgtggcagataccatccgcgttatctcctgcttcgcagatatctgcgcgatgcgccacccgaaggaaggtgcgccgatggttgcttccctgcactcttccatcccggttatcaatgccggcgacggcggtcaccagcatccgacgcagaccttgaccgatctgatgacgatccgttctttaaaaggacgcctgaacaatttaacagtcggtctgtgcggcgatttgaaattcggacgcacggttcactccttaatcaatgcgctgtcccgctacacaggcatccgtttcgtcctcatttccccgccggaactgcgcgtcccggattatatcattgaggatacactgaatgcaaagggaatcgagtacaaagaggttgaaaacctggacgaggcaatgccggagcttgatattctttacatgacacgtgtccagagagagcgtttcttcaacgaggaagactacatccgtatgaaggactgctacattcttgacaaaaagaagatggagcttgcccgtgacgatatgttcgttcttcatccgcttccgcgtgtcaacgagatttccgtcgaagtggataatgacccgcgtgctgcttacttcaaacaggttcagtacggcgtttacgtccgtatggctctgatcatgactttactggaggtggaaaaaccatgttaaatatcagcggattaaaagaaggtttcgttctggaccacatccaggcaggacgcagtatggatatttactttaaactgggactggacaagctggactgccaggttgccatcatcaaaaatgcgcgcagcagcaagatgggacgcaaggacatcatcaagatcgacggcagccttgatctggtaaatgttgatgtgctcggctacatcgatcaccgtatcacgatcaacatcatcaaggatggaaaaatcgtagagaaaaaaaatgtcaagatgccgaaaaaaatcacgaatgtcatccactgcaagaacccgcgctgcattacctccatcgagcaggagcttccgcatatcttctatctcgcggatgaggaaaaagaggtataccgctgccagtactgcgatgagaagtattcgttgtagattcttctgaatatatcaaataaatattaaaaagccatgaaagacttttctgtagatttacagatcgtaagctatttcatggctttttattattttccagattatacattccaaatcaggcatatttatttttcagagtaactgttcagtaccttcacagtcacgcgcaaaaatccattaaaaattgcctacggcaatgggattttggcctgctggcccatgttttcgtacggtcagcgcagtaaatgcgcagacctactgaacagttacttttcagatttctataccccaaaatgttttcttcccactcttaattccagaactctgtcttaccttccagcccgatactctcagccttgaagcacggattcttgccttctcttttctgcaccaggtaatcatccagacatttgagcgctgtatttcccagaatcacgataaccggcaggttgatgatcgccatgatacccatgaggacatccgcgagatcccataccagaccgaactggagctgtgcgccgatgaagacaactaccaccgcaaacaggcggaacacgttcatttctttgtttttcagtgtacgacctgcgatgtagttgagacatccctcacagtagaacaggttgccaagcagtgtcgtaaatgcaaacaaaagaagtgcaaatgtaatgaaatacggtccgatcacgccaaataccgttcccaaagattcctgtacaaacggagcgcctttcagctcttccgacggaacgatgccggtgcagagacacatcatcgcagttgccgtacagataaggatcgtatcgatgaaaacagaaagcatctgtaccagtccctgcttaaccggatggctgacatcggctgctgccgccgcgttcggtgcagaaccgacacccgcctcgttggaatacagacctctcttaattccctgcatcatggcagaacctgcaaatccgccgaagatcgccttgaaatcaaaggcattggagaagatattgacaaatacctccgggagtcttccgatgtttaagatcatgaccgcaatcgccatcaggatgtagaaaacgcccataaacggaaccagcacgccggtaatgcggacaatctgttttccgccgcctatgatacagatgccgaccagaatcgccagaatggcgccgccgatcatcggaaccaggctcctgtctcccatcataaactgatggtaaaaaccgtaattcgacatactgtcaatcaggttaaaggacgccagcatattaaaaccgccagcataagtagcaatcagggcaatcgcgaagacaacgcccagcgcacggctcttcagcgccgcctcgatataataagacggacctccgtagcttccgccggatgcgtcgcgcttcttataaatctgtgccagcgtgctctcaacaaaagccgatgcgccgcccacaatcgcgatcagccacatccagaacaccgcgccgtaaccgccgatcgcgatcgcattggctacacctacgatattgcctgtgccgacgcggctcgccgtcgataccatcagcgcctgaaatgcggatacggagttgctgtctgtcttttctccgactacccggattgattccggaagcagacggagctgtacgaaacggcttcggagtgtgaaatacagtccgaccgccagcagcatgataatcaacagatagctgtacataacattgctgatcataccaacgagtgatgcaaatccttctaacataaaatttcccccttttcttttgtatgcaatatagaaaaaaagagccgctgccaaataaagatgctcttttgtctctgcattcggcaacaaccctcttaaatgatttgagcaaaacggtaagccgggttatgtcgttgaatggtcatctatctagtcctgctgtcgccagcaggctcaagcgacctacccgagagcagacgggccgccttgcgctctctgttcggtcttgcttcggatggggtttacatgtgccccggctgttaccagccgggcggtagtctcttacactgcccttccacccttacccggtaaaccgggcggtacatttctgttgcactgtccttggagtcgcctccaccagacgttatctggcatcctgccctgtgaagcccggactttcctcacctgcagcctttcggttctgcagccgcgaccatctgtcttactcaaaacattctaactctaccatattttcaggcatttgtccagtcaatcatactttaaaacagctcccgccgataaattcacgcacgatcgaattgtgcggcacctgttcactgctgacacccagaaaataatcaagaaatttgagcagccgcttcgcctcactgtactccgccgaatcacgcggaacactatataggatcggctccgcatactgtttgagcaccgaaaactcatataaaaatgccgaattgaacatcgcatccgcctgttcctgatatgggaaaatgttccgttcctcgccccggcggacggaatcccacatccggatcgtgtcctgtgccgacgcgccgcgcgttctcgcatcgcggaccatccgccggatcagacgtccgtccgtcgtcggaacgcggttgtgatcgtcgatatttaactgggtcagcgcactgatataaatcttaaatttcttatcacgcggcagtgaatatgacaaatcatcattcaaacagtgaattccctcgatgaccagaatatcctccgccccaagctgcagaaaatcgcccttatattcgcgctcgcccttgacaaagttgtaaaccggcagctccacgcgttttcccgccagaagtgcttccatatcttcattaaactgtttcacatcgatgcagtttaacgcctcataatcgtaatttccattctcatcccgcggactgtccacacggttgacaaaatagttgtccaccgcgatcggatgcggtttcaatcccagcgcaccgagctgaatcgacagacggtgcgaaaaagttgtttttcccgaagaggacggtcccgcaatcataaccagcttgcgtccgctctcatgaatctgctccgcgatatctccgatcttcttttcctgcagcgcctcctgcatcaggatcaggtcattcatgcgcccctgggcgatcgtatcgttgagtgttcccacgtcaaatacaccgagcttgtgaccaagcttttctgcctcctgctggacatcaaacaattttttctgcggatggaacggctgaatcgccttcggctgcttcttgttcggcagacgcaggataaatccttcctcgtacatctgtaaatcaaaatatttgagataccgggtgctcatgaccatatatccgtagaaatagtcgtcataatcgccgagtcggtaaacattgacccgcgacgcccgccggtaattgaacaaacgcgccttgtcatacatgccctgctcctggaaatgatccatcgcctcatccgtattttcactgcgctttaagagcggaatatccagctttaccaggcgctccatctcctcctttgcctgatttaaaagcttctggctgagtgtcacctcgccttccacttcgacatacaggccattttccacagaaaagcagaccgtcagattctttagatgatcttttcccaccacatcctgaaaggctttcatcatcagaaagacggcacttctctgatatgccagatagccagccgtatctgccgctgtgataaattccatctggcagtccttctgcagggttttatgcagctcccgcagccgtccatttaccgagaccagaagaatatcattctcgtaattcttctgatattcctccgcaatctccgcataggcggttccctgcggatatgtttttatctcactcccaatccgtacctccggcatagaatcccctcctctttcatttttctcagacaatctgaatcggaaaggccggcttctccctcacaacctttacctcatttcccagcttttctgtcaggtatttctccataaattctgtaaaaatatgctcgattccataatgtccggcgtcgatgaccgccatgccctgtgcaaccgcgtcgattccttcatggtggctgatatctcctgtgatataaacctgcgccccggctgccagcgcctctcccatcgtgcttccgcctgctcccgggcagaccgccgctttctgaatcactgcctcaccgtccagcttaccgaacaccgccgcatacggcagaccaaatgcctccttgacccgctcggcagctgcccgcagcgtcatcggctgttcgaatcgtccagtgcatccgattccaaaggaagtgccgtctccggtctctcccattttctctaaaacttcacaatccgtcagccccagcttctttgccgccagatctgccatacagcccggcgccgcgtcaaaattggtgtgcatcgcatagtaggaaatatcatcctgaatcatccgcaggactcttctgccgatgaaattctgatcagacacctgcttgattcctttaaaaataagcggatggtgcgtcaaaatcatatccgcccccgcctgctctgcctgctcaatcacagaatcggtggcgtccaccgccagaaagatcgtcttcacttccttcccgctgcgccctgctaaaagccccggattgtcccaatcacatgccatgctgcgcggcgaaagtgtttctaatactttaataatatcactgcatttcatgttttgtctcctctatcagtgccagatatgcggtcaactcgtcgatccgtgcggcgcggcggttcacggccgccacacgttcttctgctccctcttccggtatttctccccggttcaaatcacaattctctgtttctcgtttgtccgcaatatgtggcttttttttcacctgcccggtctcttctttttctctcagccctgccaacacctgttttgtcatcttctcttctttttccagatacgcaagcagcaccggatcctttttgcgaatcaaatctgcaccgaaacggtagtcctgctctcttcccggctgcatcgtcccgcgggccgcttccagcactatgtaatattttccttcgtccagcagcatcgcttcccgaagaattaaaaatccttgtttttccagaaaatgacgcacttcatcctgctctgactgcggtgacagaatcagtcgctctttcccttcgctccaattctcccacacatggcgtccctgttccagaatccggcaggtcagttttccgcccattccggcgatcacaactgtgtctgcctcgcctgccttcaattttgccagtccgtctgacaggcgcagttcaattttcccggaaagccccacctcttccacgtgttcttccgcccgctccagcgggcctttccgcacatccatcgccaatgccgacgggcacacgcccttctgcaccagccagatcggcacataaccgtgatcggtgccgatatctgccacccggctgcccggctgtacaaaagaagcgatccgttccagacgcttcgagagttttacttctgtccgcatgatttattctcctgtgttctactttttatttcttctttccagatcattcatccagataatccttcaattttttgctccggctcggatggcgcagcttccgcagcgctttcgcctcgatctggcggatccgctcgcgggtgacattgaactgccgtcctacctcttcgagcgtgcgcggtctgccgtcgtccaggccaaagcgcagacgcagcaccttctgctcccgctcggtcagcgtatcgagcacttccatgagctgttcatgcagcaatgtataggttgccgcatcgaccggaacctgcacatgatcgtcctgaatgaaatcgcccagatgactgtcttcctcctcgccgatcggtgtctccaaggaaaccggatcctgtgaaatcttcatgatctcccgcacacgctcaaccggcatctccatcttttccgcgatctcctccggagtaggttcccgtccaagttcttgtaaaagctgtctggaagtccggatcagacgattgatcgtctccaccatgtgaaccggaatccggatcgtccgcgcctgatccgcgatcgcgcgcgtgatcgcctgacggatccaccaggttgcataggtgctgaacttaaatccttttgaataatcatatttttcaaccgccttgataagacccagatttccttcctgaatcaggtcaaggaactgcatacctctgccgacatagcgcttcgcaatgctgacaaccaagcgcagattcgcctccgccagacgttttctggcattttcatctcccagctccatccgcttcgccagttcaatttcctcttccggggaaagcagcggcacttttccgatctctttcagatacatccggactggatcatcgaggctgacgccatccgggatgctgagatccaggttgtccacgtcgatcggctcctcctcctcgccgtcttcaaaaagttctggctccatgtcctcatcgtcatccatccggagaacgtctacatgatgattttccagaaaatcatagatctgatcgagctgttccgggctcagtatctcaccatggaaataattcaatatttctttattatccagtacatttttctttgtttttgccaattccagaagctgtgtgagtttttcttcaaatgtaacttttttctcttccatagttcgtccttccttccatcctcagaacctgcccgaccatttccaattttgttactgaacacgcatacgtgtccagtaacggaatttgccgtggcttcgcatttcaatacggcaaattcctgctgccaccacgttttcttacggcactttcggttccaaaagtgcctacccgtgtacagtaacccaatttttcccaatccgcaatcactccaacgtaattacgagcgaaggcaatcccgcctgttcccgtatgagccgctgcaactcattcaaatccgacgcccgccggatctgatcgtcgaggctgttcttcttgatccggcgcaccgtctccgcaaatgcctttttctgctcctcattgtttaaggattcttccagacttgcattgaaaagcgccgcgacttctttataattgccctcgtcgtcgataaagcggttcaaaatcgccgccggattgacatttccagcttccagaccctcaaatacagcttttgctgcttctttataaagtggttttacaaaatcctccggtccgatgatgtccttgatccgggcatacagcgatggttcttcaatcagccatgtaagaagcaggcgttctgaacggcggatgccctcgtccttttccttcttcctgcccaccggtctcaccgccggtcccgcatttcccgaaaactctgcatttccagcaccgcggttttccgccactgccccggcactgccgacgcttccgcctacctccctgttttgtaccgcaccagtcgtatttccggttctatatgaatcaccatagcgacccgcatatccgcctgctgccgtctccccgacgccataccggcttccgagctggttgaccagccgccgcagatcttcataattgataaagtattcccgcgaaaccgcctgtatataattatcccgctccagcgcctcgccaaattcaagcagcttgcgcgccgtctgattgtaaaatgccgtcttctgctccggatcttccatatcaaagccggctttcagcacatcgatctcatagagaaagctgtttctagccgtctcgatccgcttttcaaactcctctgctcccaggtttttcataaattcatctggatccttatacggacgcatattcaataccttggttgaaattcctgcccgcttgaggatcggaatcgcccgcagcgccgctttgacgcccgcgccatcgctgtcgtaggtcagaatgacctgatccgtataccgcttcagaagcgccgcatgctgctcggtcagcgccgttcccagcgatgcgaccgcgttcgtataacctgcctggtgcatggaaatcacatccatgtagccctcgcagagcatcatatatttctttctcgaagtacgcgcgtaattaagtccgtatagattccggcttttgtcaaacagcatcgtctccggtgagtttaagtatttcggttccccgtccccgaggacacgtccgccaaacccgatcacccggctgttgacatccatgatcggaaacatgacacggttccagaacttgtccctggcgccgcgctcctcgatcgtcaccagccccgtatcctttaaaagctcgtcctcatagcccttgcttttcagataccgatacagatcgtcgctgattttattggaaaatcccagtccgaaccgccggatcgtctcatccgtcagcttccgctttaccagataatcatatcctatctttccctgcggctgcttgagctggtaataaaaataattggctgccagcttattgatctccagaagcgccgccttgcggtccgccttcgcctttgcctctttagaatattccatcttcggcagtttcacgcccgaacggtccgccagcatctcaaccgcctcgcggaatgaataattttcatattccatcacaaacgtaatcacattgccgctgacaccgcagccaaagcagtggtacatctgcttggacggcgacaccgaaaaggatggcgatttctcatgatgaaacgggcagagtccaaacaggttgcttcccttcttctgcagcttcacgtatccggaaatcacatccacaatgtcgctacgcattctgacttcctcgattacctcttccggataatacatttcttcctccttatacgctccaggctttcggaataaacaattccttaaaccggtcaatcgcgtaaatatctgtcatacccgcgatataatcgcataccgcgcgctctttcgtctcatttcttatctccataatccggtgggattcttccggaagttcctccggatgcgccatataatatccatacagcatctcgatcatctgctgtgcgcgcccttcctccgctttcgcaatcccgtcatggtagacatggtcaaacatccagcggcgcagcccgtgcatcgcctcctcgcgttccggtgacatcgccacctccggcttgtcctggctgtgctcgatgatgtcgtggatcatgatattcagccgctcatgcacactgtttcccagaatgtccgtgtactcccgcggcaaatcctcttccttcatgatctttccccggatcgcatcatctatatcatggtttatgtaggcaattttatctgaaagccgcacaacattcccttccagcgtcgccggatgaccgctcgtccggtggttcaggatcccgttgcgaacctcccaggtcaggttcagcccctgccccttctgctccagcacctccacaatgcggacactctgctgataatgcgcgaacccctcgctgcagagccggttgagcaccgcctcccccgaatgaccaaacggcgtatgtcccagatcgtgccccagcgcgatcgcctccgccagagactcattcagccgcagcgctttcgcgatcgtgcgcgctatctgcgatacttccagcgtgtgcgtcaggcgcgtccggtaatggtcgccctccggcgccagaaaaacctgcgttttctgtttcagacgccggaacgatttgctgtgcagaatacggtcgcgatcgcgctgatactctggccggatgtcgcagagcggttctttccgctcccgtccccgtgtattcgcactcagcgacgcatacggactcagggtttcctgttcccatttttcgatcgtttctctgatattcatccagatcccacctttattcagaataatttacggaataaattcgaaagttcgcccattatcttataataatatcatatttttgtaatttgggacagaggttttccatggatttttgatctttttctattttctttttttattttatgtggaaagaaggggaattatgactacttatttccatctattgaacaaaggggcttagaatgaaaaagagaaaacatctgttcttttgaatacagacatcctctctttactatcatacatacaaaacgtaacggctgtccctgatggacctcatctacattttattttcacttattatttttacttatccgctttttcaagcagtttcttgataccctgaattgctactaatacacccaggattaacagcagcactgcaaatacaagctgcagtgtatttcccagatccagaccggtcgtcataaatgcgtttgtgagctttatgatggtcatgctcagtgcagtaaaggtaactgccatcatgaacagcatcggcacccagagcatccagccctgacgcttggttttctttaagaatactgcacaagctacaagagcaagtaccgataacagctggtttgcagaaccgaataacggccagatctctgcatagccgaccttggtaagcaggtatgcgagtaccagtgtgatgatggttgcaaaatatttattggttactacctttacaaacgggctcatattttcctcgtctgcgtccgaatccatgaaaaattcctggaacgacagacgccctacccgggcaaccgaatccagggaagtcagtgcaaatgcagataccgccaagttgattaatgtaaatacaagcgaatgcggcagaccaactacggaaagaaaatttgcgatcgcgcctgcaaaaatctgcggctgggtggtaagtccctgtgctgctgcctcgccatctgcaaaggaagcaactgcaatcagtgcgataatagcaagcatactctccatcagcattgcgccaaacgaaactggaagcatgttcttttcatttttgatctgtttagatgcagtaccggaagataccagagaatggaaaccggaaactgcgccacaggcaatcgttacaaataaaatcgggaacatatactgtccatttacattaaaacttgtaaacggtttcaaattacatgccggattggccacaaatacaccgataactgcaccgacgatcataaagatcagcagatagctgttcagataatcacgcggctgaagcagcgcccataccggagcgacactggcaatcagaatgtacacaaagataataatatgccaggttccaagatcgacatagaccgggaaattcagtcccagagcgatcgctgccaccagtaataagatagcgacggctgtgttgatccatttgttgaatttggtatatttgaggaaatatccaagtgcaactgcctcgatgataaataacatagaagtagttgcaacggctccatttgccgctatctttgtgacagcacctgcctcatcgaccgtaaatcccttaaatgttcccgctacaacgtctgcaaacgctgcaacaaccagaatacagaacagccagcagaataaaaggaataatttctttcctaattttccaatgtactcttcgatgatgtatccgattgttcgtcccttatttttgacagacgcatacatggatgcaaaatcctgaacggcgccgaaaaatacgccgccgattaaaatccaaagcaggaccggaagccagccaaaaattgccgcctggatcggaccattgatcggacccgcaccggcgatcgacgcgaactgatgaccaaacacaacgtttgtatcagccggtacataatcgacaccgtcctccatctcatatgccggagttttggcattcggatcgatgccccacttattctggagataacgcccgtacaggaggtatgctcctcccagaacaacgatggcgattatcatcatcattactccactcatagttaaacctctttcctttgtttatttataaaaaagcgcctctgctatccagtcggataacaaaggcgaattttctatcccaacagctttcccgatccatccagtgactctctgtatttccgttcttttatgtctttccatgctcattgcattttatatcatgtaaattatactcttttgagtggaaaattcaattaacactttaaatataatttacaatttcatttattgttttttgtgcaccttgcacttcctattgtttttacaacgggaaacttcgctccagacacaatgccccataccctacccgctcattcggatataccgtctcccccggcagactccgcgccccgcggatgagatatgctttcagcttctccccatacaggtagggatcgttcccatttacaatcccccattgcatcatcagcgccgccgatccggtcacaaatggagcggcaaaggaagttcctgtcaccgtctcatatccgccgcctgcgcgggcggtgatgatatttacaccaggtgccgccagctctggtttgatcggatgccccaatcttgcaaatccacgaccggaaaaatctgcatacgcctgcgtggcgtcatcgtacgcccccaccgagatcgcccggctggcggtcgatgggattgtcagcgtcgtgtccggcgatgccgtcaaaaaacgtgtttccctgttcagtgccatgcccgctggcagccacagatcatactgaccatcccgtatttcttctggaatcagacggattttccagagcccgtcctgaatgtagcttccttttggaatcaaatccagataaatctcctgcgcctgactgtatggactcggcatcccataatatagaagaatctcttccgtctcataggaaagccgctgtgctcccaacgattcccggatcagcccggtgctgctgccgcccgggctgaaaatttctaccgaaaaccggtcctgatacaatttccatagctgcacaccgaagcccgtctgatattcccccactgcaagctctatctccaccggacgtcccatctgcagaaatcccgcccggtgtcccatgctgtatccttcatttccggttcccacgatgatggaagtccgcccccgctctgccatcgaatttagatacgtctccagtaggctggttccgtcatgagaaccgtaggtatttccaaagctcagattcaccgccaccggcatccgccattcctgtgcgattcccaccacatagtccaacgcccgcatcagctctgttgtcctgggaaatgaatccgcaagcggcgttccaagcttcacgaccagaagttcactctcccaggctactccccggtagtgtccgccgccctcccagccatttccggctgcaatcgccgcaactgccgtcccgtgcccactcacatcccgcgactggacgatctcgtaagcgcgttcccggctgcccgcctccaatgcccggttgagctcctcccgcgtataaatccggttctgctcctgatcccaaagtgcggcgatgcgcgtcgttccatctgcgtttcgaaagtccggatggaaataatcgattccggagtcgatgatggcagtcaatgtgcctcgaccacttaaatcagcatctctgccatacacgttttgagagacttgatttccgctctgcaccggcgcaatacaggtatcccgaatcgcccggttcacctcaaaataaagacgcttcggcttttctatatactcaacctgtgataatcctgccagatcatccacctgcgattcagggagccgcacaatcgcgtagccgccggaaagtggataaatttccgcctgcggcagctgttcctgcaacttttccacagttccattatattgaatgattaattcccagcgtttcgtattctggtcgtatcccatctgaagtgccggggacttttcccgttccgcttctgtcgcatccaaagataagtttaaaaggttttcttttttctggctcttgccattcactaattcactcattttacagtttatgcttatatggcaaatcccagcatcatattctatctatttttttaacaaaacaaaacccggtacatctctgtaccgggctatcgatcatgcagaagaagggacttgaaccctcatgatgttgccatcacacggacctgaaccgtgcgcgtctgccaattccgccacttctgctcactgcgggagatgggacttgaacccacacgagcatacacccacaagatccttagtcttgcctgtctgccaattccagcactcccgcttactgtttttcaattttctctgtccgatgattttctcaccgacaaagagtagtatagcacaatttcatttgaattgcaagcctgttttccgcaaatttatatctgaatttattgaatcagagtatagcaaaaacccggcacatctctgtaccgggctatcagtcatgcagaagaagggacttgaaccctcatgatgttgccatcacacggacctgaaccgtgcgcgtctgccaattccgccacttctgctcactgcgggagatgggacttgaacccacacgagcatacacccacaagatccttagtcttgcctgtctgccaattccagcactcccgcttactgctttttatttttgcctgtcgagtgagtcactcactgacgaattttagtatagcacaggcgctccgcgaatgcaagcatttttttgttttttttatttttttttatttgttctaattattcctatatttttatagtttctttctactgcaaaatcatgtatttcagccctatcctaccactccgcagctcccttaaaaaatcctttcttacttcttaaacaggaaaatagacggccattacacatttctggttactgttcacgcatacgtgcccagtaaccatttctgcattcctatagccacaaaatgtctcctttgagattgaaaaagcgctgtctttctgctataatacatagttgcattgatttctttcattaaaattaagaaacattacaaaaaaggcgtaaaaaggcgcaataagaaaccgaaagaaaggcggaaatcctgataagcaaagggttttcggataggtaaatcataaaatgaaattaggaatcgtaggtctgccaaacgtaggcaaaagtacactgtttaattctctgaccaaggctggcgctgagtctgccaattacccgttctgtaccatcgatccgaacgtcggtgtcgtaccggttccggatccgcgtctgggtcagttagcagctctttataattctgccaaaatcactccggctgtaatcgagttcgttgatatcgctggtctggtaaagggcgcttccaagggcgaaggtcttggaaaccagttccttgccaatatccgtgaggtagacgcgatcgtacacgttgtccgttgctttgaggatccaaatgttatccatgtagacggcagcgtcaatccgctccgcgatatcgaaaccatcaacctggagctcatcttctccgatatggaagttctggaacgccgtattgccaagaccaccaagagcgccatgggaaataaatcccttgcaaaagagctggaaactctgaaaaaactgtatgcgcaccttgaaaacggcaatctggctaagagctttgagccggaggacgaggatgaactcacgttcatcaatacgctggatctcttaacctggaaaccggttatcttcgctgccaacgtatctgaggatgatctggcagatgacggtgcttccaatgaatatgtaaaacaggttcgcgaatttgcagctgaaaacgacagcgaggtatttgttatctgtgcccagattgagcaggagatcgctgagttagatgaagatgagaagaaaatgttcctcgaagatctcggtctgactgaatccggtcttgaaaaactgattgcagccagctaccgcattcttggccttatcagctacctgactgccggtgaaactgagacccgtgcatggaccatcaaagtcggcaccaaagcaccgcaagcagctggaaaaatccactccgattttgagcgtggcttcatcaaagctgaggtagtcaactatcaggatctcttagactgcggttcctataatgcagccagagaaaaagggttggtacgcatggagggcaaggactacgtggtaaaggacggcgatgtcgtactcttccgcttcaatgtttaatatcgtgtcataaaatctcagaagctgccatccgttgatcagattcccttttcgtagatttggggtaactgtttgggtctgcgcatttactgcgctgaccgtacgaaaacatgggggatcctatcaaagcatatcaacggatggcagctctttttatttctccctttttacaaaagtgtgtctgatgcatactaactcataattatacgaaacaccactcttttattcattttctattcatttctggctaatgggtattcatttttactctaagttgtcgtgcaatttattagatttgaatttttgaaagagccagcaccttgaatgggctgactctttcaatgtcacctgtaattgacaaactggaatttggctatttcgttgcaacaatacttatccaatgattttttgcatttgaatacgttttgatctctgtaaaacccgcttctttcaaagcggcaacaagttgtttagatgtgtaaatcttcataccattgatcatctttgtccatttttcatctgcggcactcgttccgtcactctcgttacaaatcaggaatatgccttcgctttttagcacacggttgatctcggaaaagcattttactaatcctggccaaaagtaaactgtttcgaaggcagaaacataatcaaaagtcgcgtcagaaaagggtatagcagatacatctccttgaactacattacatttcccttgtttaatggcgagggcgttcaatttttgagattctgccacactaacctcagaataatccattcctgtcacgtggccatttccacatctatcaagccagaccgcaatatttgctccgccgccacagccgacgtccagaacttcagcatcagacttcgcggagatatttgagaatccccattgcgataatttggcgtgaccgctgttcatcatcttcgtcatcaa

SEQ ID NO: 11068 - DNA, 5218 bp, Unknown
  gut microbiota DNA sequence
cccaggcgatggcagcagccgctttaaactgcggcgctgagtacggcgtatacatgatgccgattcgtggaaaagataaagcaaccattttcccgaaatctctggaacttggcatggatgcctgcgatgtatttgtcggcatgacaactgcatccggtgcagctatatacaataaccatctgaaagagctcatcaaccagaagaaactccgtgaggtttccatctgcttaagaagtatcgataacttcacacgaggcggcgctctggcagactacgaagcagtttacgcagatggcgagaagctgcaggctatctggagaggtcataagatggctcacatcaccacaccggctggtaccgacctgtacatggaaatgaatcagatggagccgatcatcgaatgtggtatcgcgagaaatccgggcgatgcaatggcttggtctgacggcgaggtttccttaggaccggtgatcgacacaacccatggcaaactggtaattgatggacctatctgctactatggatgcccgaccacaccggttgagttaagaatcgaacaagggcgtatcgtagaggtagttggcggcgatccgaagatttgtaaagaaatccgccgtcagatcgcagaagttaaagattccgacaacatcgcagagatcggacttggacttaatccggcttgtatgtttaacggagacttcgaggaagagaagaaggcaagaggaacctgccacatcgcaatgggcaacggattctactatggacagcctgcacgttcgaccgtacatatcgacatggtacagtacaatccgaccgttatcttcgacgagggaacaccagaagaagttctgatcgtaaaagacggcaaggttgtttgtttgggcgacaaataatatggctatatattaagaagtatcaagaacgaattgtcaatgaaagactgcatgaattgtggctgtgatttccccttgagcagtcgcaatataaaacatcaggaatttgtaaaagcttaggaattgaataaacctccatattaaaaatggaagctgtggacgcaggttagctgccttagatgtgtagagcgcaggtgttcgcagcttcttttgagtgctgattcacgcacctggaagttttgtaaaataagttggattctgcctgaaaacggacggaaaatacagtttatttgtttacagatatagaaatcttatgataaaataataacaataaaaaataactgttagatatggcggttatattcgtttatagcagattttagcatagagatatgggaaagtggatcagccatatttaagtgcagaactatggcaaaattcgttacgggtcatgtgtgcaagaatcgtaacatcatttaagcaaagcaggatggaaaatggacagggggaattgacaaatgctgaatgaaatgaagtacgtgtatgaggtttacaaagaaaagagtttttccaaagcggcgaagaagctttttatcagccagccagcactcagcaacatggtgcggaaggcagagaaagagatgggagcgccgatttttgatcgcagtacgattccgctgacggtgacgaaggagggcgcgtattacatccgtaccgttgaaaagattctttttctggaacggaatctggaacggtattttcaagatattgcggggcttcagggcggcacgctggcgctcggcggtgcatcttatttctgctcgtttgtgtatccggatctgattgcccgttttcagacaaaatatccgcaggttacgattgacctaacagaaggaaatacgcgggagctgaaagcggggttggaaaatgagtcgctggatctggtgttggagacggcgatggagaaggacgatacttcgatcaaacggtatttattccggaaggaaaatctgattctggcagttccggaaagttttccggttaaccggaagctgcagccataccgactgtccaggcaggagattctgtccaagtcctttttaaaaccggaggtggaggcggttccgttaaaggactttaaggatgtgccgtttatcacgatgaaaccgggcaatgatatgtataaacgaggcgcgaaaatgtgccgcaacggcggttttacgatgaaaactgtgatgatggtggatcaggtgctgacttctttaaatatcgtctccaacggggttggagcgatgtttgtgcgttctgatattgtacagtggcgtccggaggacccgaggctggtctattataagctggacgacccgctgtctgagcgggagatcacattttcggtcaagagggggcgttatgtgacggcggcgatgcgtgagtttatgcgtctggcaggcatccggtcggatgatccggacgccgatccggctgccgggaggcaaaaggagtaacggcaatttccgaagacagggactgaatgcggcgtaaattccgaaatgcggttgcaaaatcagttaatcgtgtaaattttatataattttacgtcgatttagactttaccagcagtctaaagtatgataaactataagaatgagggtaaatgagttgccgattaaaggcggaagaatttctattctggagaattcgcgggatgctatgagagacaggagcaaaggtggattttatgaaggagacagaggggatttatttatccaagacgatgaggaataggaggaatggcgggcaggaacatggaaattacagttgcgaagacggctggcttctgctttggcgtgaagcgggcagtcgagaaggtatatgatcagatagcgacggggaagaagccgatctatacctacggtcccatcatccacaatgaagaggtggtgcgggatctggaagagaagggcgtacaggtcatccattcgaaggaggaactggaagccctgaaagaaggcgtggtcgtcatccgttcccacggcgtaggcagggagatctatgaactcctggaacgccagggactggagcttgtggacgcgacctgtccatttgtcaaaaagatccacaagattgtccgggaacagtgcgaagccggacgccgcgtgattatcgtgggaaatgagcaccacccggaggtcgagggtatcaaaggctggggaaatgagtatactctggcagtcgagtcactggaggaatttgaaaatctggcactcagaccggatgaaaagctctgtatcgtggcgcagacgacatttaactacaataaatttcaagatttagttgaaaaaatttcaaaaacgtattatgatatacttgttttaaatacgatttgcaatgcaacacaggagagacaggttgaggcgaggcagatagcttcacaggttgatgttatgattgtgattggaggcaagaacagttctaacacacaaaagttgtatgagatttgccgcagggaatgtaaacacacttactacattcagacactggaagatttcaagcctgagataacaggtactgtgcgcagcgtaggtattacagccggggcatcgaccccaaatcaaattatcgaggaggttcatactaatgtcagaattaagttttgaacaaatgtttgaagaatcatcattcaagagattacgtacaggagaggctgttaccggtcaggttatcggtgtcaaggaagacgaaatcattctcagcatcgctggaagcaaatccgaaggcatcatcacaagaagcgaattcaccaatgagccgggcgtagatcttagaaccaaagttcaggtcggcgacgaactggaagcaaaagttctgaaagtaaacgacggagagggcatggctgctttatcttacaagagactggctgctgataagggtctgaaacgtctgaaagaagctttcgagaacaaggaagttctgaaagagaaagttacacaggttatggagaaaggcctcgtagtagaggttgagggaacccgtgtattcattccggcaagcatggtttctgatacttatgataaagacttatccaagtacgcaggtcaggagattgagttcgtagttaccgagttcaatccgagcggaagaagaagccgtatcatcggcgaccgcaagcagatcctgcttgagaagaaagctgctatgcagaaagaattattcgagaagatcgctgttggtcagaccgtagaaggtgttgttaagaatgtaactgatttcggtgcatttatcgaccttggcggcgctgacggtctgcttcacatctctgagatgtcctggggcagagttgagaacccgaagaaggttttcaaagtaggcgataaagtaaaagctctgatcaaagatatcaacggcgagaagatcgctctgagcttaaagttcccggagagcaatccgtgggcaaacgcagctgagaaatatgctgtaggcaacgtagtagaaggcaaggtagcacgtatgactgatttcggcgcattcgttgagctggagccaggtgtagatgcacttcttcacgtatcccagatttccagagagcatgttgacaaaccatccgatgtactgagcgtaggacaggttatcactgctaaggtagttgatttcaacgaggcagaccgcaagatcagcctgagcatgaaagctcttgagaatcaggaagcagaagaaaactaatcaaacggttgacgccagtttcccatcggacagatagtgcgtcagacggaggatgaaagaatcatcaggctgtcgcttccacaggaagaatgtggaggtggcagccgtttttgtgatggcgtggggcatggtattcttgatcggaatgcagttgggtatttctgggattggaagaaagagctggctgtttctggtgttgtagaaagctatttggtgattttatctcagttgagaagactcccgcctcttcaggtagtgagtaatagcaaatttgtctcagtgggagttgggtctccaactgagataaacgctccgcgaggatgcgcagtgattctgataggaatatgtcagctttgctgaccagaatcacgcgccaagtctcacggatgttcgacttgaataagataaaaatgaaaacaggcagtatggcgtatgtgatggaacataggttgtacggtctgttttttgcgtgatgaggagcgggatacggcgtggtgaagggttgtgggagcagaaagatggattggagtgagtcataaggatatttggaaaaatattgacaaagaaggtacactgatatataatttagatacaatattatataa

SEQ ID NO: 11069 - DNA, 503 bp, Unknown
  gut microbiota DNA sequence
gaacaaaatggcagatatgtcagattttatgcgtaccgattgtcctttgcattgcagaactttgtaatatgccacgtgcaatgtgggctggtattgcggccatgtccgcgattttgccgtttatggaagatatgcactacagagtccgtaaaaggattgtcggaaatattgcaggtgtaatatgttttacagtattatattttctgcttccttcgtcaatctatgcatatataggaattcttggtggaattggtgtaggactttctgcaaaatatggctggcaggcagtatttaacacatttggtgctttggctattgctacagagcgttatggactaaaaggagcagttggtcttagagtgattcagaatgtttttggcgttgtgtttgctttagcattttgtgttatattttattggtttatgtctaaaaaaaaggaaagtgaggtgaccgtacatgcagagtgaagtgaatcaggaagaaaatttgaatagaattattac

SEQ ID NO: 11070 - DNA, 507 bp, Unknown
  gut microbiota DNA sequence
accgagagaacacttaaacgcagatattgagcaccgaaatttcttaacgggcaccaatgcaataattcaatcctggtaccgaatggagataactacagcgtaggataaggattggggtgtcaatgaatgtaaatatggttttcttgcctgaacaaaacaggcctgacggatctatccgcccagattagattaagaatctattctgggcggattttttcgttacagatattttagaggaggatagcttatggataaaaaaacggatgtaagagatccggatgaaaaagttgttgagattgaaatggaacggttaagagcatttccaaatcatccatttaaagtgatcggagacagtcagatgattgagctgcaggacagcataaaaaagtatggtgtactgaatccattgattgttcgtccaaagattgaaggctactacgaaattatttctggccacagaagaaaatatgcggctgagaagctgggatataagaaaattccggtaat

SEQ ID NO: 11071 - DNA, 11301 bp, Unknown
  gut microbiota DNA sequence
atggggtattagctcagtcggtagagcacttgacttttaatcaagttgtccggggttcgaatccccgatgcctcatgaagatgagaagccgtcacactggagacagtgtggcggtttttttgtaataggaaattccttggaattccctattacaaaaaaaggcactaacgtgccaatgatgcgcactcgcgcgaagaagaaataggaaacttcgtttaacattcatgttaagtaaaaaagccattcagacaggagtctttcttgaatatataatttcttgttttcggatatggcaactgttataattgattgaaaacagaagcaaatagaaaaccaaaatggaagtaggaatagaactaggcaaatgcagaaattttaaaatggagaagaaaaatggagccaaacaagatgaaacagaaacgccggaaatatttatatgcagcggcgcttggcatgacgttccttttgaacttgagcggatgcagccgccggttcacgaactatccggagacagccggaacggtagcaatcgtggacagtacagagcgggagactgtccgagatgaaaatggagaaaatccagatcagccgattgatttagataacctgggggaacagcagtcggcggcagaaatggaagcattagctgcggcggaggcggcggagccgggcgtggaggagccgtatctggacgggggagagcttcggcttttagcgtgtgcggatatctggcagaacctctcctgcgttatgaagacgaaggaaggcgcggtgatcgtggtagacggcggtcgtgatgtcgatgcaccgcatttgattgaggttattcaggagttgggcggtcatgtggatgcatggcttttaacccatccgcacagcgatcatgtgggggcgatcacggagattttaaacatggatccgatgccgatctcgatcggtaaggtgtactattcatttctgaataaagaatttttaggtcaggagcaggtttcaagacgggattcagatttggagtgttatgatcggatcacggaagcgattgcgaaactgccggaagcagaaaaatgcgggacgcttacgaaagggcagaagatttcattggcgggcgcggagatcacagtgatgaacgagccatttgcctgcacggaaaatagttttaataacagctcggtcgcgtaccgcgtggagatgggcggaaaacggatcctgtttttgggtgatatgggctggcaggcaggggaagattttcttgccaatcatacgcaggaggaactgaaatcggatgtgctacagatggcgcaccatgggcagagaggcgtagaagaggagctctatcaggagatttcaccggaggtctgcttatggccgacgccggactggctctgggataatgtgcaggatggcgtcgcgggcgctggttcgtataagacgccgattgtccgtggatggatggtaacattaggtgtgaagaaaaatctttgtgtcaaggatggcgatcagatactgcggtagttttttataaaagattaaaataaaattttaaaaagttgttttcagggaaatgaaatgcttttgggatgcggtgcagcggatagaaataagacatgaacgaaaaaagagagaaacagaaggaagaagaaaaagtgaataaagacaggaaaatgtggtcggaaacaatcatcctacgtccggaagtgccgcttttagaacgtttatccacctatgcggcgtcggatgcctacccgttccacatgccgggtcacaaacgccaggtgaaaatggggataacttccgtcccgaatccattttcggtggatatcacggagattgatggatttgacaacctgcatcatgcggaagatattttgaaagagtcgatgaattcggcggctgcggtgtacggagcagaccggagctggtatctggtgaatggcagtacgtgcgggattctggcggcgatcgcggcggcggtgaagccgggggaaaaaatcctcatggctcgaaattcccacaaatcggcgtatcacgcggtggttttaaaccagctggaaccggtatatttatatccggaggaggtgccggagtttcagattccgggagggatcgagccagagcaggtggaacgagcacttttggagcatccggagatccgggcggtgtttgtgacttccccgacctatgaggggatcgtgtcggatattcaggggattgcagcgacggcgcaccggcatggagcggcgctgattgtggatgaggcgcacggcgcgcatctgccgtttggggatgggaactatttcccggatggggcgttacaggaggaggcggacctggtgatccagagtcttcacaagacgcttccatccctgacacagacggcgattctgcatctgaaaagccagattctggatgcgaagaaggtggaacagtatttatcggtttaccagagttccagcccgtcgtatattctgattgcgtcgatggagaactgcgtccggtatatggcagaaaaaggagccggggagatggcgcggtatggtgcccgattgcgggaactccgggaaaaattggcgaagctaaaacatttccggcttctgaaagaggaaatctgtggtgcggcaggtgtatatggatatgatccgtcaaaactggtgctatttccagattttatgacgggaaccagactggcagaggttttgcggacagagtaccatctggaggcggagatgtcgagcgggcggtatgtgcttctgatgacttcgtttatggatacggaggaaggattttcgcgtctggagcgggcacttttggagctggatgcgcgggtggaaaagctggaggcggaaagtgttggcctgaaagatgcaaaacaaggcaggcaggaaccgttttcgggagcacaattgaatcagaaaccgaaccaagaaaatgattcagaaaactatccgcagcagatgtgtctcccctggcaggcatggcatggggatagcatgctggtgccgcttgaggaggcggaaggaagggcggcgcgggcctgcgttaccatttatccgccgggggtgccgatgctgatgccgggagagcggattggaacaagggagatcgcgcggatccgtgaggattggaagctgggacttacggtggaaggaatttgtgaaaaatcagacaaattgaatttgtggatagaggttgttatttagcaggttcgcacatttgccataagaaacagagaaaaatcggatttatatatacgatggaatgcgtgtgaaaatactggctggaaaggcataataggaagatgggacatatattttacgtgatgggaaagagcgcgtccgggaaggacacgatctataagatattgagagagcggctgccgcagatccggacggtggtgccgtatacgaccagaccgatccgggcaggcgagcgggacggtgtggagtattattttgtgaccggaaaaaggcttgcggatttggagaaacagggaaagatcattgaaaagagaacctaccagactatttatggaccgtggagttatgcaacggtggacgatgggcagatcgatctgggatcgcatgattatttcatgatcgggacgctggaatcgtatgaggggacgcggaattatttcggcgcggatgtgctggtgccgctttacattgaggtggaggacggtgaacgccttcagcgtgcgcttgaccgggaacggcagcagacagagccaaagtatgcggagctgtgccgccgtttcctggcggatgaggcagatttcagtgccgaaaatatggaaaaatgtgggatccgggcggaaaaccggtttgaaaaccgcgagctggaagcgtgtgtggatacgttggtaagggaaattcgggctcacggattggcacttttggaaccgaaagtgccgtaagaaaacgtggtggcagcaggaatttgccgtattaaaatgcgaagccacggcaaattccgttactgggcacgtatgcgtgaacagtaacaaattcggaatttcatcgcactaggcagagggtaaatcttgtgttatactaagatgatagagatttacaaataataaaagaagggcatgatagaagggatcccaaccgatccatacgattgaaacgattttagaattaaaatccaaagtccagccctgaaaggagcatcaagatggcaggttttcacgatattattggacatgagaagataaaagagcaccttcagaaggcgatcgggtatcagagagtttcacatgcctacatattgtcgggcgaggaaggaatgggacgcaagacgatcgcgaaggcatttgccatgacgcttttgtgcgagaaacatgggacggagccgtgcatggaatgccattcctgtaagcagtttttgtcgggcaatcatccggatgtgatctgggtgacacatgagaaacctgcgagcattggtgtcgatgatgtccggattcagatcaatgatacggtttcgatccgcccgtacagcagtccatataagatatatctggtcgatgaggcggagaaaatgacggtgcaggcgcagaacgctcttttaaagacgattgaggagccgccggcctatgcggtgctggtgcttatcacgacgaacccggaggtatttctgccaacgatcctgtcccgctgtatccagttgaaacttcgtccgctcaaggattcggtggtaagcgattacctgacggagaaaatgggcgtttcggatggtcaggcggatatttatgcggcgtttgcgagaggaaatttaggaaaagcgattcatctcgcctcttcggaggagtttgcacttttgtaccgagaggtgctgacgctgcttaaaaatatcaaggacatggatattccgatgcttctggattatatccgcaagctgcaggaggataatctggatctgtatgagtgcctggatttcatgcagctctggtacagggatattctgatgtttaaggtcacaaaggacatgaattcgctgatctttaaggatgagtattcggcggtcagcagttgctgccagaagagttcctatgaggggctggaagagatattgagtgcgattgaaaaggcaaaagtccggctgaatgctaacgtcaacaccgatttggcgctggagctgatgcttttgacgatgaaggagaattaaatttatgataaaggtaatcggagtccggttccgcaaggccggaaaggtatattacttcgatccggcgcagatggaaatcaagatgggcgatcatgtgatcgtggagaccgcccgcggaatcgagttcggagaggtagttcttggcgtccgcgaggtggatgagaagaaggtaatccagccgctgaaatcggtcattcgtatggcgacgaagaatgacgaggagctggaacggaagaataaagaaaaagagcatgaggcattccagatctgtcaggaaaagatccgcaagcatgaattgcagatgaagctgatcgatgcagaatacacctttgataacaataaactgctgttttattttacggcggatggaagaatcgatttccgtgagcttgtcaaggatctggcggcggtctttaagacgcggatcgagctgcgccagattggcgtccgggatgagacgaagattttgggtggcgtcggtatctgtggtcgtccgctctgttgtcattcatatttatcggagtttattccggtttcaattaagatggcaaaagagcagaacctgtccttaaatccgacgaagatttcgggtgtgtgcggtcgtctgatgtgctgcctgaaatacgaggaagagacgtatgaggatctgaacagccatctgccgagtgtcggcgattacgtcacaacggatgacgggctgaaaggcgaggttcacagcgtcagcgtcctgcgccagcaggtaaaggtggttgtgacggtaggacgggatgagaaggagatccgtgattaccgtgtggatcagctcaagtttaagccgaagcgccgccgtgacaggggaaatgtcaacgatgcggagctgaaagcgctggaggcactggagaaaaaggaaggaaagtcgaagctggatgataattaaagagggcgagcggatcgatgaactgcagcggaacggataccggatcatccagaagacgaacgggttctgttttggcatggacgcggtgcttttgtccgggtttgcatcggtgaagccgggcgagaaagcgcttgatctgggaacgggaaccggtattatcccgattcttctggaggcaaagacggaaggaagccattttacaggtctggagatccaggcggagatggcggagatggcatcccggagtgtggcgctcaacaggctggaagagaaggtttcgatcgtgcagggcgatatcaaggaggttccgacgctgtttgagaaggcatcctttgatgtggtaacgacgaacccgccgtacatgaacgacagccacgggctgaaaaatcccgatcttcccaaggcgattgcccgccatgaggttctctgcaatctggaggatgtcgtgcgcgcggcggcttcggcacttcgtcccggcggacgactctatatggtgcaccgtccgagacggctcattgagattctgatggcgatgaaaagtcagaaattggagccgaagcggatgaaatttgtccatccgtttgcagataaagaggcaaatatggttctcatcgaggcggtgcgcggcggcggcgcgctgatgacagtggaaaagccgatcattgtgtacaaagagccaggcgtgtatacggatgagatttatgatatttacgggtattaatggaataggagaacgatggaaggaacattatatttgtgtgccacgccgatcggcaacctggatgacattacattccgggtgctggagacgttaaagcaggtggatctgattgcggcggaggacacgcggcacagtattaagcttctgaatcattttgatattcatacaccgatgacgagctaccatgagtacaataaggtcgagaaggcgcgtgtgctggtggagaagctgaaatcgggcatgaatattgcctgcatcacggacgccgggacgccgggtatttcggatccgggcgaggagctggtgcgccagtgctgcgaggcgggaattaaagtaaccgcgcttccgggagcggtggcgtgtgttacggcgctgattatttcgggacttccgacgagacggttctgttttgaggcatttcttccgacggacaagaaggagcaccagcgggtgcttgcagagcttcagaatgagacgcgcacgattgtgctttacgaggcgccgcaccaccttctgcggacgctcacggagctttacgaggcgctgggggatagaaaggcgtccatctgccgggagctgacgaagaaatacgagacggcgttccgaacgacgctttcgcaggcggtggcgtattatacggaaaatgagccgaagggcgagtgcgtgatcgtcatcgagggcaaatccgtccaggagatcgaggcggaggatcaggcgcgctggcagcagatgtccctggaagagcatatggaacattatgaatcacagggaaacagccgcaaggaagcgatgaagctggtggcgaaggaccgcggggtttcgaagcgggatgtgtaccaggcgctgctggaggcggaagaggcgtagacacaaacggaaagctgaaaaatgggtaagtggagtggcgttggtggaatgccggggcgctccggtttgtgcagataaaagaaaaatagaataagatttgagaaaagaacaaactgtactgattaaaatatttaaaagtgtatattttaatcagtacagtttttgctataattcctactaagttgatgcggaaatgaatgtaaaaatacagaatgtcagtgaattgtttttcgcaaggcagaatagaaaggcagaagaggcgcttgcctgtgaatgattcagtggattcgggtattgattgcaaggatcgtaaggacgcttggcttacaaagaaaaatcatattcaaccacgggaggaataaaaatggcagagaatcgttatgaactgaataaacagctggcacagatgttaaagggcggcgttatcatggatgtcacaaccccggagcaggcgaagatcgcggaggcggcaggcgcgtgtgcggttatggcgctggagcggattccggcggatatccgggcagcgggcggtgtgtcccgtatgagtgacccgaagatgattcgcggcattcaggaggcagtttcgattccggttatggcgaagtgccggatcggtcattttgtggaggcgcagattctggaagcgatcgagattgattatatcgatgagagcgaggtattatctccggcggatgatgtgtaccatattgacaagacacagttcaaggttccgtttgtctgcggtgcgagagacctgggagaggcgctgcgccggatcgaggaaggtgcttcgatgatccgtaccaagggcgagccgggaacgggcgatgtcgtacaggcagtccgccatatgcgtgcgatgaattcggagatccgccgggttcagaatctgcgtgaggatgagctttacgaggcagcaaaacagttaaaagttccggttcatctgctccgctatgtacatgacaatggacgtctcccggttgtcaatttcgcggcaggcggcgtggctaccccggcggatgcggctctgatgatgcagctgggcgcagagggagtctttgttggatctggtatcttcaagtcaggcaatccggagaaacgtgcgtcggcgatcgtgcaggcagtaacgaattacaaggatgcaaaattacttgctgcgatttctgaggatctgggcgaggcgatggttggtatcaatgagaatgagattgcgattttgatggcagagcggggacagtaagatggagaaaaaacagataggcgtgctggcggtgcagggcgcgtttgccgaacacattgccatggtacggagactgggcgcagaggcgtttgagatccggcagcttccggatctggagcggccgatggacggactgattctgccgggcggcgagagtaccgcgatgcgtaagctcctggatgagctggggctttatgagccgcttcgggcaaagattgcggcagggcttccggtgtatggaacgtgcgcggggcttttgcttctggccaaggagatcgagggcggaacgccgtgctttgcgacgatggatgtgtcggcggtgcggaatgcctacgggcgtcagctcggaagtttttacacggaggctgaatttgccggtctggggacgattccgatgacttttatccgcgcgccgtacatcgcttcggttcagaaaaatgttaaggtgctggcgacagtggacgaaaagatagtcgcagccagacagggaaaccagtttgcgacggcatttcatccggaattgaatgaggatgtgacggtgcaccggtattttctagaagaagtctgcaaaggaaattaagagtgtaatttggtagaaattagcgtgtggttgatgaaaagtgaaacctattggtaaggggagcgagaactgcagccatttaaagcggtcagaatgtatgatatatttctgaaatgtgggaagatgtcattgattctgaccgtttttttatctcagtcgagaagactcccacctcttcaggtggtgagtaatagcaaatttgtctcagtgggagtccattctccgactgagataaacgctccgcgaggatgcgcagtgattctgtaaagaatatgtcagcttcgctgaccagaatcacgcgccaagtctcacggacgttcgacttgaattgtttggaaggtgcgttttgtgaaaaaacaaaaaatgtaccttgataggcttttgcgctgaggaaggaaaacgcccgggaaaatggcggactgcatggaattcctattgacaaagtaggaatttcgcattacaatcactgataaaccaattaaaacaatatgaaataagaaaattatataaaaaacgaatttgctgatatagcaaatagacacaggaggatgacatcgtggcttatcagatagagacaacttgtatttgcggagatccggaaacttctaaaaaccattcttttggcgctgtttcagtgccgatttaccagacggcgacttttgcccacccgggtattggggaatcaaccggtcataattatacgcgtgagagcaacccgaccagagacgagctggaaaagactgtttcggcgctggaaggagcggttgataccgttgcctgcacatccggtatggcggcgatctcgctgatgatggagctgtttgacagtggcagccattttgtatgtaccgaggatctgtatggcggttccgtccgtatttttgaggcactggaaaagaagcgcggtttttcattttcctatataaatacagccgatgtggaggcggttgagaaggcgatcacggatcagacgaaggcactctacatcgagacaccgagcaacccgacgatgcaggtgaccgatctggcggaaatgagccgtctggcgacgaagcacggactgcttctgatcgtggacaataccttcctgtccccgtatctgcagaatccgatcgcgcagggcgcggatctggttgtccacagcggcacgaagtttttaggtggtcacaatgatacgctggctggatttttatgtacgccgatcaaggcgctggcagagcagatccggtatctgttcaagacgatcggaagcggactttctccgtttgattctttcttagtcctgcgcggcatcaagactctgtcagtgcgtgtggaacggcagcaggagaatgcgatgaagatcgcgagctggctgaaagagcagaaaaaagtaacggatgtctactatgtaggacttccggagcatccgggttatgagatcaaccaaaaacagagccgcggcgcgggcagcatgatttcgttccgcactgatacggaggagacggcgagaaaggtgctggagcgcgtgaagcttatttcctatgcggagagtctgggcggcgtggagtccctgattacctatccgatgctgcagacacatggcgatgtgccggttgagatccgggaacgtcttggaattacagagacatttttacgtctgtctgtcggtattgaaaatgtggatgatctgattgcggatctggagcaggcgttagcgtaaaaagagggtaactgttcagtaggtctgcgcatttattgcgctgaccgtacgaaaacatgggccagcaggcaaaaatcccattgccgtaggcaatttttaatggatttttgcg

SEQ ID NO: 11072 - DNA, 28537 bp, Unknown
  gut microbiota DNA sequence
agaggatagatatttggtatcggttttgcatgggcagtgggatatgggcatggatgacaggatgccagagtgaaaaccgttcattgacaggaacgatggattgggaggaaaatgcatgaaatacgattttgacaaagtggtggaccggcatggtaccaactgtttaaaatatgattttgccatcgagcgaggaaaaccagcggatattttaccgctttgggtggctgatatggattttcagacggctccggcgattttagagcggctggaagagacagtaaaacatggtattttcggctacagtgatggaaaagagggctattttgcggcagtccagaactggtaccgggagcgctttggctgggagacgaaaccggagtggctggtgaagacaccgggcgttgtattcgcgctggcggcggctgtccgggcgtatacaaaggaaggtgacggcgtactgcttcagcagccggtgtactatccgttttcggaagtaattacggacaatgggcgtaaggttgtcaacagcccgctgaaaatcacggatggctattacacgatggattttgacgacctggaaacgaagatcgtcgaaaataaggtaaaattgttcctgctttgcagtccgcacaacccggtcggacgtgtctggagcgaggaagaactgcgccgggttggcgagatttgcctgcgtcacggtgtgctcgtggtcagcgatgagatccacagtgattttacccgagagggacatccgcacacagtatttgcgaagctgggtgcagagtttgagcagaactgcctgatctgcacggcaccatccaagacgttcaatctggcgggactgcagatttccaatatctttgtgccgaacccagagcttcggaagaaactcttaaaggagatcgcggcggcaggctacagccaggtcggtctgatgggactggtagcatgccaggcggcgtatgaagagggagcggagtggcttgcacagctaaaagcgtatctggaggagaaccggaagtttgtgaaggcgtatctggaagagcatctgccggaaatccgtctgatcgagccggagggaacctaccttctgtggctggattttaaggcgcttcatttgaatgaaaaagagctggaacatctgatcgtggacaaggcacatctgtggctggacagcggcgcgatgttcggaccggacggcgagggcttcgagcggatcaatatcgcatgcccgcgggcgacggtggagaaagcgctgaagcagctggaagcggcgatccgcggataaaattgattggggcacgaatcagaacccgtataaataaaacctgccgcaggcagactgtatcccccatataaacagtctgtctgcggcaggttttttgacttcataggaacattattttatgagaaccggaacaccgcagttccatacgccggaagcgggtacgcgaaggagtatggctgtccgtcacattcgctcttgatggagcggtaatggctgatcttatcgccgcgcttgtagtagccgtgttcctggtcaagcagcagcgtgtaggtgccgcgtttcggaacaccgacgcggtaatcgtcgcggtctaccggggtgaagttgcagatgaagagaagattctttttctgtgtttcatcgcggcggataaagctgaaaatactgcggtctccgtcgttggcgttgatccactggaagccgtcatactcctcgtccaggcggtagagcgccggatatttgtggtagagcgtcaaaagccctttcacataattctggaggtcggcatggaacggctctttcgtaaggtaccagtcgagggagactttttcatcccattcatggaactgaccgaaatcctgtcccatgaagagaagtttcttgcccggatgtccgagcatgaaagtgtagccgactttcaggttggcaaatttatcctcgtattcgcccggcattttgttgatcatcgagcatttgaggtggacgacctcgtcgtgcgagagcaccagaatgaagttttcgctggtgcagtaggtgatgccgaaggtcattttgttgtggttaaatttacggaaatacgggtcgagcttcatgtattcgaggaagtcatgcatccagcccatattccatttgaaggtaaatccaagaccgtcctcctccgggctcttagtaacgttcggccaggcggtggattcctcggcaatgatgatggcgccgtccttccggccacggatcacgctgtttaaatgtttgaaaaactcgatggcttcgaggtttttgttgtcgccatatttatttggtacccactgtccgtcctggcgtccatagtctaagtaaagcatggaagagacggcgtccacgcgcagaccgtcgatgtggtattcatcgagccagtagagcgcgttggcgatcagaaaattggatacctcgtttttggcataatcaaagaccttggtaccccagtccgggtgctcgcctttgcgcgggtcggcatactcatagagcgcctgtccgtcgaaatcggcaagtccatgtgcatccttcggaaaatgcgccggaacccagtctaggatgacaccgatgccttttttatgtaagtaattgacgaaatacataaattccgccggggttccgtagcgggaggtcggggcaaaatagccggttacctgatagccccaggagccgtcatacggatgttcggcgattcccatgagctctacgtgggtgtagcccatttccagaacatagtcagccagctcatgcgcggcttccatgtaagtgtagtaaccgtccttttccgggcggtttttctttttccaggatcctaagtgaacctcgtagatagagattggcgccttgaccggatcggtgcccgcgcgcgattccatccatttggaatcgttccatttgaagccgcggatatcggcggtcacggaagcggttcccggacggtattctgccgaaaatgcatatggatctgccttaaataaaatcgttcccgtgtgcgtggtgatggcgaatttgtagagctgtcccacgccaagtcccggtacgaagagctcgtaaatgccgctgtctgcgaccggcttcatcggggttgcatccggattccaggcgttgaagtcgccgaccaggctgacggcggctgcgtgcggcgcccagaccgcgaaatagtagccgtcctgtccgcgatatgtataagggtgtgcgcccagcttgtggtagagctggtagtggcggccttctccgaagagataccggtcaagctcgccgatcacgccgagtccctctgtctttggttttttcgatgtggttcgtttagtagtggaagctgcttttttcataaggttacccctccgtgattccgagaataacagcgctgttaccctctaattctatctgaattttgtttgtattcttatcgatcaaaaacgattttccggtaatcagatccgtagcttgttccgctgtcgtgtggaatggaagcggaacttgtaaataagcggcgttgtcatcgttgttggcagcggtaaggatcgcctggtggtcaccgtgtctggcaaatgcgtactgccggtttgtcagcagaagttcctgataacgcccaccgtgaagcgccggttcggcggcgtggatggcggcgagtttctggatcagaagtgtaagcggtgtcacggtgcctgcgctggtatctgtgtttgagcctgtggtgcttgaagtggtctggcagcaggtgtttgcgcctgcgtgtatgtttgggcctgtggcgctcgaaaagctctggcagttgccatctgtgcggatgccggtgttttgtccgtcgctggtctgcatttcttctgcaagcggtctcggcggcaggattctcggacggagttccgtatcagagttgtgtccgcggcgtccctgaatgccccattcacttccataatagatggacggaatgcccggaagagtgaacagcagcgtgtaaagcggcgcaagatgtgccggatttaacagtttgcttgcgatccggtcttcgtcgtggttgtccacaaaggtgtagagatcccgccccactgcttcgaggcggcggacattgtgtgccagttcgaaataattgtggtcgttgtgcgcggaatagatacttttgtgcatctcgtagttggtgacggaatgaagcatctgcggattgacccagcgggcgtattcgccgtggatgacttcgcccatcagccagaattccggcttgatttcatttgccagccggcgcagttcctgcataaattcaaaggaaagatcgcccgcgcagtcgaggcggataccgtcgatgtcaaattcctgcacccagaaacggacagtgtcaagcagatagttccgcacttccgggtttttgtggtttaagcagggaagctcccagatgccgtgccaggattcgtagccgaaggaatcgccgagcgggctgccccagccgaaattgacgttcctgtaccatccggcgtaaggggactggtcacggtgcgcctgcaggtcgcggaaggcgaaaaattcgcgaccggtgtggttgaatacgccgtccacgacgacgcggatgccatgctcatggcagcagtccacgaaagatcggaacgagacgttggttcccagccgccggtcgatgagccggaaatcgcgggtatcatagccgtgcgtggatgattcaaacagcggtccaatatagattgcggaaatatgcagactctctaaatagggaatccacagcatcagttcgtccatgcgagaatcggcggaaacgtccctgtttgtgccatccgctgccccatcggggacgggatagggattggcaaacggcgatccggtcattcccagaggatacatatggtaaaaggtggctttgtcgtaccaggctgtcatgagaaagttcctccttgtggcggttaaatggtattttcctgttgttttatatgtcgtaaaaggaactgataccggagatgtgcggctttcagttcgtagatatagcagtcaatcagagtcggatcgacgacctcttcaaaatggttgaaaacggtgttgatcgtgctcatggtctgtcgcagttctgtcagcagctccgggtcagggtgggtggaaaaaatgtccgtgctggtgatcccggagcagtgggtgcggttgtgcttcatggtttgatgctctctttctgaatcctataaattggtacaacgatcagtatattcagaaaatggaaagatatgcatcctggttcaggcgtccatggaaagcacggattccagcagatgtccgagctgcatcagtttccgggtgctgtcttcgattgagagataatagtaattgcaggttccctcccggtggacatcgatcagcccggctgtctttaagatcttcaaatggtgggaaactgccgggcgcgacagactggtccgttcggtgatctcccggacgtttaagccatgcggacgggactgggcgggcaggctgattggacggtcattgttcttatcaggatgatttttgttcacatcgttgttttttgtgcgccccgtgagggcttcgtccgtcagcgcttcgatgatcgtcagccgtatttcatcgcccagcgcgataaaaagaggcatacaggtatgaaaatgctgtttgagttctattccttttttcatcgcggctcctccttctataatggtttaaaaatttaaactaatagtattttaccattttttgtttcgtcagtcaatggaaaggaaaatgctggaatgggtatttatagataaaaaataaagagatattttggcaattattttcaaataacgaaattgtctagctaaaacaatgggttcagatgcacaaagtttttgagatgtttttggcgcatatttcgggtgttttgggattgacttttgaacaaaaactgttcataatggaggaacattcatggatgggttcttccatctgtcacgggaatccggatttcccgttgatctattattaagattctaaaagttaagttcagagaaatgttcgatgatttttcagaagtggttcaagtgcatacaggaaaggaatggaaaatggtggcggtgaaaactggcgcaggactggcagctattgttttcggcaggtgttttgaaaacgggacatactgtacaggaactgtccgtttcatgtatgcgaaagagaaggaggggatggattgaccttactgctgctgttgtttaccggcggctgtgcgctttgggatttgaaaaaacgccgtatttccaatggtatgattctggctggcgggctgctgtttcttttaattcggtctggtctggggatgaaaataggatatacagccggatggagcaggtggctgccgggaactggggcggcgcttatgtcaggcatctgtgaaatgtgcggatacctggtccgtatcgggattttactatgtgtcctgtttccgctgtatctgtttcgcatgataggtgcgggagatatcaagatggcagcggttctgtttggtgctgcgggggtgcagcagggagggcggatccttttatgcgggctgatggcagctggggcatggtcagttgttttattggtttggcgtgggattgccaggcagcggcttacatatcttgtgttttatttgtaccggtctgcgcttgggggaagcgtcgagccgtactatctggaagcgcgggatggaaaagaggcatctttttgtctggcaccgtgcctgtttttgggagtgattggggcggagctgattcggtatctgtaaggaaaatggcttgtgattagggaggtggcggtgcgatgaagcatattctggctgtgtatgacgtggatccagtctatgcggcgcggtttgcagaggtagttaaccagaaggaaaaaataccgtttgaggtggtggcgttcagctcgatcgagcggctgcgggcatttgcggcggaacatccggtaaagcttctgttgttgggcgagcatgttccggcggaagaaaaggagtccatccgggcggaaaaggttattcttttatcggataatgggggaaaaccggtcagtccgtcagttccctgtgtctacaaataccagtccagcgatgcgattgtgcgcgaggtgatgacctggtatggggaaagcccgggggagctgccggaggtgtccgggcgggggctggcgaaggtcttgggagtgtattcgccggttggacggtgtttaaagacctcgtttgccctgacaatgggaaaacttttggcacaggaggagcgggtgctgtatctgaacctggaggaattttccggtctgtcggttttgatgaaagaagaatataagagtgatttgtcggatctgttgtatttttacaacggtggaagctataattcgcttcgtttgagcagcgttgtccacacgatgggggagctggactatattccgccggtgcgctatccggaggatctggatcaggcgggagaggaggcaatcgcggggcttatacgggcaattgccggggagagtgcgtatgatacgctggtagtggatataggaagcgggcgcaggacggcgctttcggtaatgaagttgtgccgggtaatttatatgccgatccgggaagatccggtgtctttggcaaagcttaaggagctggagcagtatttttcacagacaggaaatggcatgctaagggaacgtattaaacgcctgaagcttccgtatcacggcagctttggacggggcgattatattgaccagctcttatggggagaactgggtgattatgtacggcagctgctgcggggaagcagtgtgggcggataatgttcattgtgggttaaattagaaggggcaaagtcttttgacagggataaattgagcgggattttgccagtcattctaaagagtaaacggttgtgagagaaacaactggcagggggaagtatgcaggagcagaaaatggttttgaggcagcgtctgatggagcagatggagagccgtatgcaggtggaggatgaggagctgcgcgacctgatcgacatggcgattctggaagcggcagaaggggcgtatctgccgttaaaagagcggctttgtttgagaaaagagctgtttgattcattcagacggctggatattttgcaggagctggtcgatgatccgacgatcacggagatcatggtaaatggcacggagcacatttttgtcgagcggcaggggcgtgtggaagagttagaaaagcactttgattcggtagggcagctagaggatctgattcagcagattgtaagtcgtgtcaaccggacggtcaatctggcatccccgattgcggatgcgagactggaagatggttctcgtgtccacgtagtgctggcaccggtggcgttaaatgggccgattttaacgatccggaagttcccggaaccgatcacgatggaacgcctgattgagttaaaaagtatcagccgggaggcagcggcatttttgcagaaagcggtcgagcggggactcaatatttttatcagcggcggaaccggatcgggaaaaacgacgatcttaaacgccatgtccggctatattccccaggaggaacgcgtcattacgatcgaggattcggcagaacttcaaatccgccatgtaacgaatcttgtcagcctggaaacaagggtagaaaaccgggatggttcgcaggagatttccatgcgcgatctgatccgggcgagtctccgaatgcgtccggaccgcatcatcgttggggaggtccggggcggcgaggcgctggaaatgctgcaggcgatgaatacgggacacgatggctcgctctcaaccggacatgcaaacagcgccaaagatatgctctcaagactggaaacgatggttctgatggcagcagagctgccgcttgcggcggtccggagccagatcggttcagcactcgatctgatggtccatgtcgggcggatgcgggaccggagccggaaggtgctggagatcacggaggtgataggctatgaaaatggggaaatccgcctttctcccatctatcagtttcaggaaagcggggagactgcttccggacaggtggaaggagcacttgtccaggttggcagatttgaggggcggcgcagattcgcgggaggaagtgctttctgattaccgggtttactacctgacggggcaggagtggatacgttaccttctggagggaacagcggtgtgcgccgtgacggcgtatgtattctaccgttcatttctggcgttcgttctgatgcttccggcggggatgctgcggccgttttttaagaggcgggagctctgccgccggagaaaagaggaactgcggctccagtttaaggaagcgattcagattgtggcttcggcgctggctgcaggctattcggtggaaaatgcgtttatcgcgagcgtgcgcgatctggaagaacaatacggaaaagaggggatgattacccgtgagttttcatacctggcaagtcagcttaaaatgaaccggaccgtggaggtgctgctttcttcctttgcaaagaggagtggtctggatgaggtggaaaatttctctgttatttttactgtatccaaacggagccggggtgagctggcaagcgtggttcaccatgtcgttcacgtgatttcggatcgcatacaggtgcgggaggaaattctcacgatgacggcagaaaagcagtttgaacagagaattatgaacctgatgccgtacctgattgtgctctacgtggatttgtcatcgccggggtttttctcacagatgtatgagacagcggtggggcgggtggtgatgacagggtgtctggtggtctatctgctggcatggagggtatcggggaaaattcttcagattgaggtgtgaaacagcatgggaaaaatggggaaaaagcaggttttatgcattcttttggggataattctggcagttgcgggatatctggtggaaaaacgggatagggcgctggaagatgggaaccggctgaaccgctatgcatacggagaaggggaacggcagcaggaagtgtgggtgcgcggactgtgcgagaaggagattccggtggagatttcgctcggagagcgggaatatgcggaagaggatgcaaaaaaagcattgctggaggcgggaggtaaactggcggatttaattcggggaaacaatctgtccctgcaggaggtaagggaagatctacatctcgtcggctggctggaagaagagggcatccgggtccgttggacaccggaggatgcggaatggattcagacggatgggacagttttaaatgaagaatgcccggagaaggggattcagacagaactgaccgcatccctgcaggcggggggattcagccgggagtaccggtttccggtcacgctatatccgccgcttcggacgaagcagcaggaaaaagaggctggttttaagcggctgttaaagcagatggatgaggcgcagagaacggaagggcagctggttctgccaaagatgtatgaggggaagaatttatcttaccgggtgcgcggagacagggaatatctgctgtttccggtgctggggattgcggcggcaattctgcttcctctttatgaaaaacagaaggagagtgaggtaaaaaagaagaaaaagcgggaactgatggaagattatccggagattgtgtcaaagctgactgtattttccggggcggggcttccggtccgccgggcatgggagcggattgtgctggaatacgaggcggcatgccgggcgggaacacagacggagcgggcggcataccgggaaatggcagcggcatatcaccggatgcagcgcggtgtcccggaactacaggcatatgcggaatttggtgcgggctgccgcctgagaccgtaccggaagctttccgggcttttggagcagaatgtcagaaatggggcagaaggacttcgaaaggcgctggagacagagatggagtcggcgtttgaagaagagaaagcactggcaagacgccggggggaagaggcatccacaaagctgatgcttccattgtttttgatgttgatgattattatggtgatggtttcagtcccggcgtttctggcgtttgggatctgaaaaatggggagaaaggagaaaaagtatatggataaagcgtatctggtaagagaagtaaaatcgtttctgatggacgaggatggtgtgggggtcattgagttagtgctgattctggtggtgctgattggtctggtcattgtctttaaaaagcagattaatacgcttcttacaaatatctttaaacagatcaacagcaagtcgaaggaggtatattgatccgggcagaacggcacattgaaacagaaaaggaagtttgcggggagatcacagttttcctgagtttgattctgacctgtatttgtgcgctgatgggcgggctgtttgagtccgcccgggcagccggaagcggctggtatatgcagatggcgcttaattcctcactggattcgctgatgagctgttatcaccgggagatttgggataaataccggatttttgtgctggaatgtgcggataaagagcgcctggcggcggagatggagccgcagatggaaacatatctggcggcagcgcccttttatccggtcagcggcggcaaggtacagatcgaagcgatggatgcgatcactgggcataatggggatttctttgcgaaggaagttaccgattatatgaaagtgggtgtctggacgctggaaagtgagaagtctgaactgcctgagatggaaaaacggatgacggaagcaagggcggttcatgggattgcggaaggatatcaggaaaatggcagaaaagtgctgcgtctggaagagtcgatcgaggcgatcggagcctgtctgcaaaaacaggagaaacatctgaaggagatggaggcagcggtccgccaggcggatggaagctcgttctttcaatcggcggaaagcttagagaaagaattaaagcagattccggggctggttgcggcgtatgaaaaacaggcggaccggcttgcgaaagaactgcagggatcggagcagggggcgcaggaagcccagccggatctggaagaaggctcctggggcatggtacaggaggagatgcgggggtatcgttcgtatttggatgcggatggagcgcgccgccaggaggtaaaaaagacagaagagacggctcacggaaatgaagaggtggttgcagaagcagtccggaaagggaaggagatacaggattatatcgatgattgggagcctgacgatgaggacgatgagctggacgaggaagcgctgtgggcgccggttctgacgatcacagcgggttttcagaaggatggacgtttccgggttccggcagtccgagacaagaaaaaaatgaatgtgctggaagcagtcagccgcctgtcggggacggatctgctgagtctttgtgtgccggcgggaactgtgatttcagaaaaatggatttcgaccgcggcatttccgtcggcattgtatgcaggcggagagagcggaaagcgggggatagctggggatgtctggacggcggggcttgaacgggctcttttagatgcgtatgcggcgcatttttttacccggttcgggcaggaaaagacgggaagtgtccattatgagcaggaatatctcttacagggaaatgcgtcggagcgggaaaatttaaaacgcaccgtcaatgaacttctggctgtgcgcgaggcggtgaatctggcagctttatatgcggattctgaaaaacggtcggaggcggaagcattggcgctggcaatcacggggctggcgggaatcacaccgatcacggcggcggcatccttctttatcatgacagtctgggcgtttgcagagtcggtggcagatgtgaaggttctgctggcgggcggaaaaattccttttttcaaacagccgggggagtggcagatttcgctttctgctctgacggaaaagggcgcgtccatctttctggaaacggggacggatccttcattgaaaaacgggacagacgacagagggctggactaccaggactggctgaaactctttttcctgatacagggaaagagccgtttctgttaccggatgatggatatgattcagaaccgcatttcagaaaaagagccgggatttcggatggatcagtgccagtatggggtaagtgtgtcctatgcggcacagggaacgttgataccgcttcgtagaacgtcccagaaggaatattaaacacaattacaggggagtggaggacagtgtcctttttcaggagatgatgcaagtgaatgtgcctctccaagtacataaagaaagccagtaaaaaagatgatgacaactaacctaacaaaacgaataaatgaaagtatctgtgcggtcgggatacccgtccttcggcggcatagagcccaagtaacaaaacgaccctggaaaagggcattgtcctctgcttccctgtgtgcgagcctgacgattgaggcggcgcttagtctgacattgtttatgtttacggtgattctcctgtcagttccgatggaaatactggatactcagagaaaggtgcagacggtgctggaagtgacggggcgggaactgggatggcaggtgtatcggacatcccatacggtgcatccggcagaaatggaggcgggaaaagcggcagaggtaggagaaaagggaacggggggctggtcagaacttccgtccgggcttatcctgcagggatatttaaaggagaagattcagacagcgggcgggaacaaagtgtccaatatccagtgtggcgccagccgcgtatcggaagatggagaatggattgacctgcgcgcctcctatcaggtgcggctgccgttctcggtatttgcgcttgaccatgtgacgcttacttcccggagccgtaagcggggatggattggggcggaaagcgggtatttctcagagaaaaacgcttcagaaccggagggaaaatgggtctatgtggggcgggacagtacgcgctaccatctctcgccttcgtgccattatatatcgaatcagattaccgcggctgcgtatgcagatgtaatttcgggggtgcttagaaacaacgggggatgccgttataaggcttgcagatactgtggaaagacggtgtcggcgggaggtctggtgtatattcttccgtccggcgaggtttaccatggaaagcaggactgttcgtcattggcatattatgtgcagaaggtgcggcgatcagaggtggaatatatgggggtgtgttcatactgtggaagtggataggtgcggatggcggaaagaatcaaggaggggtgagagggcggagtgatggaaaacagtgcagagataagtttcatgggatttacgcggatggatttggaaagtgcagtatgtttcctctgtgcggttgttttttccctttttctgatggtcttttcctggcaggatcttcatagaaaacggatacgcgtaagctggctatatggatttggaacggcaggaatggcgcttacgatgatacggtgtgtgctgtcgattataaaagatggatgggattggaaaaaaagtgtgttgcagataacggtatggcttttgggaatgctgccggggattcttttgttctggatggagcggcagacgaaaggtgcggtcggactgggagatggctgcttttttctgatcactgggtgctatctggggggatggcggacgcttgaacttttgatgggagctgtatttgtgagcagtctggcaggaggtgtctggatgcttacggcactgcttggcggaaaggggaatggtctatgggagaaaatgcggaaaaagaagctgccatttctgccgtgtgtgcttccggtgtggatttggatgctgatagcatctcttggatgaagcgggaggtttctgccagttatacggtggaagcctcgtttgtgatggcggttgcattcttttttatcgcggcactgttaaatggggtgtttgaggtgcatggcaggattacggggcgttttgtcctgcaggaggcgatggaacggtgcctgtatcgggaggaaaaaacgttgcggggagatggaatgactgtgggggagataagcagcagagctggacagcgcctgcatggattcttccggtgcggagatgcagttttgacgatccgggaagatgggggagacttggacggaagggtaaagagcagtacagagacggagatatccctgcgcggacaggagccggagcgggcgatccgtttgctgacagtgttggaaaatgcagagtgatggaggatacgggatggagattcggtatagccgggaaatgaatcataattatatgataatcgaagcgccggaggaagaaacgggctatgcggtacagatgctgtcggcgaatgccatcgaagggcttttgaagttccgggtccgccagacggaggaggcgagagaatattattatgagataacgtcgagacagccgcttagacgggtgttggaaaaacggaccttgtcgggacaaaaactccggtcgattctgcttggtgtgctggcggttctgaagcgggtggaagagtacctgttaaaagaggaacagcttttgctggatccggaatatctgtatctggaacccgatcattttactgtggaattatgtctggttccggggcatcgggaagaggcgccgcaggcgctctcaaaattgctggggtatcttctggaacgtgcggatcatcaggatcgggaggctgttgtattagcttataatctgtaccagattagtctgcgggagaattacggaacggcagatctgctgcgccagctttcgggggaagatcggatcttttcggcagaaaaacgaaacgaggatgagggggatcctgagacggcgggagtgtgggcggatcggcaggagtggattgaagcggagcaaaatcggagggatacgttggaatctcgatctgggaaaatggcttttgacactcaaacgccagccaggaaggattggaaatataggcaggaagcgttgtatcaggagaaaacgatgaaaaagaacctggagtcggtagagaactcagatgaagtgggggaaaagtctgaaagggcaggtggaaaacaaaagggacaatggcagaaccggtggataaaggtacttggaagcgcggtggcagctggcattgtgtattggtacgtgacgggagaaatggatgtatggctgtatgcaatcagcggcggcatcgggggaatcgtgtttttgagggagacgttggcagcccgcagaaaatggcaggtatatggtggcaggaagaaaaatcgaggtcagggagaggatagagaggaaagcacggaagtggatctatcatatcaagactggcatcagacaacgcctgaaaaccgctggcaggtctatccggagagtgaagaagcttatcggcaggaacttcgaagagaagaagaagcacagatagagcgggcgagagaagcggggactacgcttctgtctgcctcaaagaatggggaaggaacggtgcgcttagagccggtggaagccggaggaacagtgattcagatttcctatattccatttacacttggaaaacatccggggctgtcggacgcatgtattgaccgtccgaccgtcagccgtcttcatgcgcggatcgatcagaaggagggcgtatacattctgacagatctcaattcaaccaatggaacatcggtcaatggctatccgcttcaggcaaatgaaacagtcagtttggggaatggggattccatttatttggcggatgtcggatataaattttgggaacaccgataaattgtctgaaaatatgaaataataaccaaaaacacgaaattgatgtgaattattttgcaagtacatcaatttcgcgtttctgcaaatttacatagaacaagccatggggatatgctataataaaggcacttgacatggaagtttcaagccaagtgacaaaagaaaataccgcttttccagggaatggagaagcatagagagaaggagagaccgacatgacagacaaagaatgtattttttgtaagatcgctggcggagagattccatcctcaacggtttatgaagatgacgattttcgtgtgattctggatttaggaccggcatcgaagggacatgcgctgattctgccgaagcagcatttcaaagatttatgtgagctggatccggcgattgcggccaaagctcttccattagctggaaagattggtgcggcgatgaagaaagcactgggctgcacgggtttcaatgtggttcagaacaatggcatatccgcaggacagactgtttttcatttccatgtacacattattccgagatatgaaaatggaccggatatggtgacatgggcgccaggaaaagcaacgccggaagagctggcagaaattagcagctccatccgcgaagaactgacgcgataggagtttggatatgcaccatgagaatgaaaaaatggcgctttttgaagcgctttacagagagtacctggtaccgctgaagaaatatgcgtatagaattggagtagggtacgatgacattgaggatatggtgcatgaagctttcattgaatattacaagcgctattcgttagatctggatcataaagtaaagttggttttactgatccgcattttacggagcaagtggatcgataaccggaggcagatgcggcgccgcgagatgctgcatctggaagatccggatgcggaagaagagattatgaaccttcttttggaaggggagataggaattcagcttctggatcaggaggttatcgatagggatatctattggaacgtatggaagattgtcaaatctatgaagaaggactggcgggatgttttgattctccgtgttctggagggcttgacggcggaagaagcctgtgcggttttgaaaatcaaatcaacggtatgctgtacacgtctttacagggcaaaagcagaattgcagaagcgcgtgttgagggcaaagctgtttgatatttaaaaatcacatcgaagcagagccgtttcgaatctgtccgatgtgatgataagcttacatattcagtgttttagtcttgtgctatacaaacgtagcaatgctactaactgcgtgtgcaatcatgaatcagccccatgatggttttgacagcattgtttaagtggctttcagacattttatcaatgaactgctggcgatttttataggtctcttcgattgcctggctgagagtatctgcggttaaaacttcttcttccagaacggtgctgaatccctgttttgcaaaggagttggcatttaagatctggtcgccgcggctggcagcagccgacagagggatcaaaatgttcggtttgcggagtgccagaatttcgcagatggaatttgcacccgcgcgggagatgatcagatctgccgctgcaaagagatggcggagtggtttatccacatactcatactgaacatatccttcggtgccgatgagagactcatcgagattgccttttccgcagatatgtattacctgataggttttcagaagctgcggaagaatgccgcggacagcctgattgaccgtgacggagccgagacttccgccgatgatcagaattactgggagatcggcagaaagatgggcgtactggagtcccgccagacgatccccgtgcagaagctcttcacggatcggggaaccggtcagaaccgccttatcttccggaagatatttaagtgtttccggaaagttgcagcataccttagaagcggctggaatacagattttatttgccagtcctggggtcatatcggattcatggatgatgacaggcactttataatgcttggcagccagaacgaccggaacagcgacaaaaccgcctttggaaaagacgatatccggtttgtattttttcataagcttgcgagcctcaaagtatcctttcagaacgcgaagcggatctgaaaaattcttaaggtcaaaataacggcgcagttttcccgatgagattccatcgtaagggatgctggctgcctcgatcaggcggcgctcaatgccgttataagaaccaatatagtgaatctcaaagtcttcctcgcgcagtgccggaagcagggcgagattcggtgtaacatgacctgcagtaccaccgccggtcagaatgatttttttcatagtagtttcctccacacatcagccgctggttacggtgtgaggggacaaccataacctgaaaacaactgtttttatgctttatcatacccgcaaagggttacatttagtatagtaaacggaaaaaaagaaaagtcaacctaaaagttaggacgaggacagagaggagggataaaaagtgagcagaagccggcgcggaaaaaaagctggagaagatgcagagcgcctgctgcaggaagcgtttggagtcagcgaagatcagctgttgaaggattttatccttgcacagacggaagtaaaagacagcgacatacctccagaaccagaagacggctttgagaggttgatggcaaagttagaagcggaggtgggaacaagcccggaaagtgaaaaagaatcatccagcgagaacattgtcaaactgcacgaagaagctcgcaaaccacgccggctgaaaacgattgtgaaagtctctgtagcagccgccgctatcgcagtgatggttgtggcgatggggatttcggctggggcgaagagggagtatcggtatgtggttagagaagaggggagtgtgcggagtgatattgtattgaataatgtggatatgattcaaacagaagatgcattagaaaaagcatacacagaaatagcgaaaaagaccaaaatccaagcgattagatttgcatatatacctgaaaaaatgcattatattaaaacagatatagcaagtacccgagttgtaatgtattttgaatatgataaatatagggtaaagataattcaacagtttcgggatggcagaaattcaaccaatattatttctgatcgaaaaaaagcaatgaaagtgcataatgaccttttgaatgaagatattaatattcaacaggctaaaatagatagtggagaaatggaatatagctccatagtgataaagggggctacatactatcaaatttcaggaattatgcctcaaaaagagtttaagaaaatagtagaaaatatgtatttagagaagtagtacggagggtttatgagaaaaaaattagtttcatttatttgtgtggcagttatgatggcagcaataccaatgcaggctaatgcagcggaattgacgaatgttaatggggtttcgatcgaaacagctgattatagtgattcatattttttggaagatggatccgcagaaggaattgcaaaaggtatagaacagagaggaagtatcattgatacagcaacggttcagataagtaatttgggaaagggagatattggaattattatcgaaacattagcgcatgtagagtgtgataaaatcaaaaatattgcaatactgcaaagacaagaggacggtaaatgggtggaggtttcaagatatatatatgatgccaaaaaagaagattttccaacagaagatttatcaggaatgacaaatgaatttactgtgaaaaatcaaaagacgggttattattatagagtggttggcgtccattacgttgaatcaaatggaaaagggcagtctttcatgaccaaaacagatggaatcaaaatcaccgaatacggcgactaattctaaacggggaccgtgttactaaatctatatttacaatactaaatagtatgaaaaaagcgatcacataaatacccccacctgcaaccatccaggaatttttggattcaaaattccagatgttttcaggtgggggttcttaaacggtttttcattatgccaacaggcgtgaaagaatctcctcaaagattcctatttcacgttcgccttatactccttcaacgcctgtgccagctgatccgggcaggaagttgggcggaagccgcactggatgccttcgatgcgggagattgcctcgtcaatatccatgccatcgatcaggcgggcaacgccctgtgtgttgccggagcagccgccgacgaactgcacattctttactttattatcttctacttcaaaattaatctcacgggaacagactccctttgtcttgtatgtcatggtaaaacctcctcaaaatggtatgtgttttaatctgctgtggcgggaatccaccgcagtaaaatgattatagtctgccagtaaaggtgttgtcaagataacaaaaatccagtatactcatgaaaagatacggtgttactgtttgtacaaggtatacatggtaacgatgcggctgcgctattataaagtaaatgaacgattttcaaatggaaaatgatggtgcaggcacacactgactgtagagccgagtcagccaatggatttgaggaaagagatgcaggggtataagcgcagaagatcaaatagtaagaatttctttttctataaatctataaaagaaaggcagaagaataaagaacagaaaaacaggagggcaaacagatgttaggaatcatcggagcgatggatgaagaggtggctcagatcaaggagaaaatgacggatgttaccgtgacaagtgtagccggtatggatttttatcagggcaaactgggcggaaaggacgcagttgtggttcgctctggtatcggcaaggtaaatgcaggtatgtgcagtcagattctggcggatcggttccatatcagtgcgattgtgaacacaggtatcgccggttccctgcgtgcagagatcaacattggcgatatcgttgtatcgacggatgcggtgcagcatgatatggatgcgagcggattcggataccggatcggacagattccgcgtgtagatacctttgcatttgaggcggatgagaagctgcgcgagctggcgattgagtgcaaccagaaggtaaatccggagattcaggcatttccgggacgcgtggtaagcggcgatcagtttatctcggataaggcaaaaaaggagtggttgatcgagcagtttagcgcaagctgtaccgagatggagggcgcagcgatcgcacaggcggcatatttaaacggaatcccgttcctgatcatccgtgccatttcggataaggcagatgacagtgcgggtatggactatgcggcatttgaagcgcaggcgatcaagcattcggtaaacctcttattagagatggcatctcgttatgaggcataattaaattcataagcacgaaaatttgaaaaacggcacaccgcattctcgttactttcgtgatgagttaggtgtgccaaattttttgcaaaatacagaacgtgtgtttgccatatgtggaaacatatggtataatttaatgatattgcatgcttaaacacccattaaaaatcgaattaaggcagaatttgacgaacgattttcccctttctcatcttcacaaagactctttcggcggatataataaagccacgatgcaggcgggatttgacaggcgcaaaaagcagaatgcaaaaagcagattgtaaaaagcaaattgcaagagataaactgcgaagcgcctaaacctgacctgtggcaagccacccggaagtgatccggaagtagagaaaggggagcttttttatgctggaatttttacaaactggaaaagcgctgtccgttcttgcggcaatcggaatgatcggatttgtcagcaagttgattacacggagcctctacaaaagattattaaaagaaactgacaacatggcgatgacccggaacaagaatcttcaaaatctgaagcagcggttggaaaatacctgccgcctgggacagaacatcgtgaacacgcaggcatatctggacaagcagattgacggattttcatttttacatatttcgctggatgcgtggaacggcgtgtcaatggaaatggtgcttttagggcttctgaccggagcagcggaggcatttctggcatactggtatgagctggatgcgagctatattgtgctgtatgcgtcggcagctgtcatgagcggtctgtttctggcatttatcgagagctgtttccagattgaccagaaacagcagcggctggaaacggcgcttttggagtatgtggataattcggtgtttcttcgggcggcacgtgagaaggagacacgcggacaggaaatgtccggagcttctggtgtatccggcggaattgctggcgtggactcgaatgtgcgggaaatgccgaaatggctgcagagtactctgcgggcagatcgcggcgtgagtggtcgggatggtgctgaaacggataaccgggatctgggagaaacggagtttgaaaaaggaaaatcgcggacagcgatgagagtgaatccgttccgtgagcgggatgcacgggcacagaatctgatgcgggcagttcgcactgcaccgcgcgaaccggaggaacgggacaagcatgagacagatgggcatcttacggatcgccggatggtatcaggaaatgaaacggaaaacaatacgggtcccaggcaggaagcgaaggagcgtcccggcgacaaggaaatggagtatttgaagcagagcctcgaccagattgcagcaagccgggatacgcggaaaacacgaaatggcgaggcaaatgcgggtgactggatgaaaggtttgagccgcgaggaggcgcaggttctgggggatattatgagggagtatttatcggggttgtaaatgatgattccaactgaaaactggttgcacacgggtgtccagattgctataataaagataagttaagtttttgacaaagtaatcacgccgcctgcggacggctgaaatgcaaaggagaggaaacatatgggaaaagatgtgatctttgattattcaaaagcagctgcatttattcatgaggaagagatcgccggtatcaaggcgggcgtgcaggcggcaagagagacgctggtagaaaagaccggcgcgggcaatgattttcttggatggatcgaccttccggtggactatgataaggaagagttcggacgcatcaaaaaagcggcggagaagattcagaaggattccgatgtcctgctggtaatcggtatcggcggttcgtatctgggcgcaagagcggcgatcgagttcctgtcccatagtttttacaataatcttccgaaagaaaaaagaaaaacaccggagatttacttcgttggcaacagcatcagcagcaaatacatccatgatctgatggatttggtcgatggaaaagatttctctatcaatattatttccaagtccggtacgacaacggagccggcgatcgcattccgtgtatttaaggagatgctgattgagaagtatggtaaagaagaggcaaacaagcgaatctacgcgacgacagaccgggcgcggggcgcactcaagaatctggcaaatgaagagggctacgagtccttcgtggttccggatgatgttggcggtcgtttctccgtcctgacggcagtcggtctgcttccgatcgcggtcagcggcgcggatatagatgcgttgatgcagggcgcggcagacgcgagaaagaatgcactggagactccgtttgagaagaattctgctctgttatatgcggcggtccgcaacattctgctccggaaaggcaaacaggtcgagattgtggcaaactatgagccgagcctgcactatgtatcggagtggtggaaacagctctacggcgagagcgagggcaaggatcagaaaggtattttcccggcagcggttgatttaacgaccgatcttcattcgatgggtcagttcatccaggacggcgcgagaatcatgtttgagacagttctggaagtggctgaatctccggcggagatcattttaaagaaagaagatgttgacacggacggtatgaactatctggctggcaagagcgtggatttcgtcaacaagagtgcgatgaacggcacgattctggcacataccgacggcagtgtgccgaacctgaaagtgacgatcccggcgatggatgcgtacagcttaggacagctcttctatttcttcgaatttgcctgcggcgtcagtggataccttctgggcgtcaatccgttcaaccagccgggcgtagagagctataagaaaaatatgtttgcattgcttggcaaaccgggctatgaggaagcgagagaggcgctgcttaagagactgtaaggggcaggtctgtaaaagaatatgcgttctgcggcgttcactctggcatgtttcatgaaggaaactgcagcccggatctaaaaatagaaaacggaacatagaataaaaaacgcttttatcagcaaaaactgatagaggcgttttttgtgtgtaataggaaatttcttggaattccccattacacaaaaaggcacattcttttatgccgcagaacctcgaaaaaacaattttcaaaaattatagataaattttatatctaattttcgattatccgcataaacactatactttcaagtattttgaagtatagaaaaccatttattttaccacgaatttaccacgattgaacgagccttgatatgacactaaaaataacatgggagatagtacaaaatatctgactatctcccgtctttcttaattttattgtaacacttaatgagtatcgtctttttctaactgttcttgcacaaatttaatactattctggataaattctttatctttttctgttgcaacttcttctaattgtttaaacaaagcaatgctttcatttcgtttacctaatacattaaatgcagttgcaatattaagataccatgtcatttcatctttcatatctttaggcttcatatccattgcaagaagtttttctaaaaagagttctccgtttttggtttcttgatattcttttacaatatcattgttcatttttctaaactgacgtcctctccgcattaaaacaaagaatacaataaagaaataaacaatagtaataacggcaataccgccaacgataatgcctaaaaaaccaattgttgattttacatagggaattactatgttcacataaataaatagtagtaccgcccaaaatagaaaggctaatcggataagccatttatctcttttttcatatattgctcttttattttttagattttcgggttcgtaaatcattttttcactcctttattactacatcactcagaatttgttgcattattttgttttttccattccttataatctttttttgtttcttgttgtcttttaacatcttccattttttccaaaatcacttctacctctggttgactgtgttgttcgggtaaagaatagaaaataaggttattatcgtttgtatatactgaaatattaaaaaccaaatcactttctacaatttcttgcatgatataggaaatttcttctgcatattctttatcagtttttccctcattaagatatatacttgtttctatttcatattccctttttttcagatattcttctacactttccttaccattccattctgttgtggttgtatgcccttgaacttcaatttgataacctcttataaaaggcttatcttgaaataaaggagttgcaagttcttttatttcatcagaatagtaataaacatggtaactatcctcgaaaagtccagtatttcgtgtatatacagtagcagtttgagaagaattttctttactggaaacatttgccctaatccagtttaatcctattttttcttctttgtacttcttcacttctgtaatgataaattcttcattgtatttgtcctttaatttggataagatatatttttgtgcttcttcactagagttaaaatcatgcgaataaccgctacaaccatttaatagtcctagacagagtacgcttgctataacgcctaataaaaattttttatatcgcataattgccacctcaatgtgattttataatttaatactgttctacaaactggaattttttgacactgttaataggcatgtgcttcaatatttttctaatttgattattttatacatctcccccatatattcccctattttgataatttagaattgtatgatacatttcttcatcatcatattcacatgctttagcttcatcagaagaaatctcgattctttttttctttatcatatgtgttccagcatcatattctaaataatatttacttttacacttaatcagtcttattccttcattctctttaactacttccatatttccctcattcaagtcaaagttactttagtttgcacattctttatttatgttcgattgaaatgcttattttacaatgtccgttttttctatcaaaccatttgtgatatttataaaatatcttttaccataaaaatctgttgctgtcagtattctattgttaagaaatatattttcaaatggtaaattacgtctgttaggctttcgattttctactttccatatgattttacaatctaaagaaattgcatatatattagatatttcatcaacaccaaatggtattgataataatataataacttgattatcaactaccttgatgtctcttatgtcgtaattaaacttaattgtatttttatcaatgcttaattcatttttgttgattttaataacggtattcattttctacctctaatcttaagttaacatagatttacaacttcaaactggaatttacatttataaatacttttcatagttactcaataattcaagataaaatggtcgcaagcaggtttggtcaacatcattttcaaattccaagacttgttccgagccaattctatcgcccttatggagataacctttaatagcaatgtgtcctctgttattacctacaaaggacatatacatatgttgtccataagattcctcaagtcttgcattgccttgcaaagtttcgtagatttgacataaatcttttccaagtttagccaagtcctttatatctatatccatagttgtactcgctgtaaagccattacttttaacatcaattttaagtattgtgtttgttgataaatttatatctgcttcaaagatttcaggctcaatacaaacaaaaaaattttctgtttcaataatatgtttcattatgtgtcacaccccaattccgatttgtcgctttcttcatgcccatattataacaattccatatatccaccacaataaaaatcaacataccctttaaatattttctgcattgaacatacacactttttctttcttcctcttgattacccaccacagaaaagaaaaagccctgtcaagagccttgccaccattggtggtgctttgcactctttactgggctttttgtttgctgtatcttccatgcaagaggaaattaaagacctctgttccatttcgcctttagataatcttcataatctccctcattaaagtctacttgtggagaagtattgggaatattttttctgttatctatatctgcaagttgacggaa

SEQ ID NO: 11073 - DNA, 182 bp, Unknown
  gut microbiota DNA sequence
cagtaagcgggagtgctggaattggcagacaggcaagactaaggatcttgtgggtgtatgctcgtgtgggttcaagtcccatctcccgcagtgagcagaagtggcggaattggcagacgcgcacggttcaggtccgtgtgatggcaacatcatgagggttcaagtcccttcttctgcatgat

SEQ ID NO: 11074 - DNA, 1682 bp, Unknown
  gut microbiota DNA sequence
tgcaaataaaagttttgaattagcttgactcagaaagaatacagagatattccttcactcgtccataataaattctgagaaatttattagcgcctgcagtcatgtaaacatagtacggtttaccctgggcacgttttctgtccatgaattgatatacaggatcatcttgcggcattgttttaataagaacatccattacttgaaaaagagtctttcttaaatttgaagacccacgtttggatgttggaacacttttttgtgcataggagccagactcgtttacgccaggatctaccccggcgaaagcagtaagggctcctttatgtgtaaatctggttatatcaccgatctcagccataagctgtggaccaagagatggaccaatccctttaaactgcataacaatcgggtactctggaagttttgaggcggtttcattcatgagaatgcgtattgtttcgacggtagcggaagtgctgttaagctgagcgatagcttgtctaatgatgcgtttggttatttcgtttttaggaaataccgggacaagttccgttgccttggtataaatttcttcggcttttgatttattgaagatatattttttttgcttgcaccagttttgatagtgtttaacaaaagaatttagagacattttacgaacgcaatctacatgccaatacgtatagacaaaatcaacccatttttgggagccatcactgcggggtggactattaaaataagtatttgcatttgggtatgtctggtcaatgagattaataagattatttttcatagccgttttttgtttcacatagaaatgaaactgacgattcatggcctttagttgtgtgcgcaattcatccacaatactatatggtttaagattttgccatttgtcaagagcatagcgggcgatcttgatggaatcagctttgtcagatttaactttgcgaagagagtcattattaaagtttttgactagcttaggattaacagcactgacaaacagaccagctgctgaaaattgctgagcaagtacttcgtaatagtgtccggtgtgctccattacaattcgtgattcaccttcgatagagtgaataagtttaattagtgaaaggatatcactggatgtgtgcttgatctcaaaaggagaggatacaatctcaccaaatggtcttagaattgtaaccatgcttttaccttttgaaacatcaatacctactgcgttcataaatttgtcactccttaaaaatattacaatggataaataccagatttactcattacctgctcaaactactgtgtgtgacacgaatgcacttaatgtgattcaacctgcataaaacgaacactgtgaatgaggagctggttatcagtctaaagtacggacgctaagtcctagtgatgaagtcgatataccattgcatcctacattctaacagtttaagtaatgagatggataaatccttactggatgtaaggggattacccataagtatattgtagtagtgatgagttaggtgcgccaaattttttatcaagatacagaactagcgtttgccaagtgtgggggcatatggtataatataaacatggaaaaagatatatttactattaagagaaatacactttcatatggtagaggatatgtgtattctttgcaatatcatcttgtctggtgc

SEQ ID NO: 11075 - DNA, 834 bp, Unknown
  gut microbiota DNA sequence
gatattttcttcctagaataaaactccttccatttccggaatcataacaggtcatcagattatgaattccaagatcaattgataaataatgaccattcagggaaagcggttctggctctttgatctcataaataacgataaggtcacattttccatcttccggtggatagatccgcagctgttttatgtgatccatgttcctgaaaatcttattttcaagatatagaaatttttcatgaatcccgtaagtttcttccatatagcttttcagatcctttgacagagacagccgtaattggtcggaacctttctcgtgccggattcccatctgcatgtaagtgattggtatattgtcctgtttaaatcgcggcggatttggatctttgatcccaccggtctttttaagggcataaaatgatttccaggctttatccagctgcttgcaggtctcctgcgctgtctgggatggaagctgtctataccacagctctcctttatgcgctttcttctgataataccagtcaggatacttctccagccccaattctttatatcgacgacgttcatagttgcagacattccagagcttggaagcagcgtaacacatatgccctataatattagaatattccggccggatattaaccgatgttctgtgagacaacagcattctcctccccccttcagacagccatgcatatgaatatttacaattcacattgaattaatacgacttgctctgatgttcaatataacggcgaatattttcctcagatacgtatccgatcgtttccacataataggaatggttccacagttctcccttccacaact

SEQ ID NO: 11076 - DNA, 14534 bp, Unknown
  gut microbiota DNA sequence
accgccctgcttcgcatggctgttcgttcgttaatggcgcaagaaaagaatatgtctgcttcgcagccgcattcttttcttctgcgctcattatatcattttcctcaaaatgcctcaatacgatattctttcgtgtatttacaaaatgctgtggttctggtaagctttcatttatatagtaaaacacaggagtccgtatgaagcaaaccactcaaacatacctatcattacccgaaacattccatcctgcatccaccgcctccggcaaacacccggattcctccatgccccgctgctactccgacggtcgtccctactattcgttaaacgcatggctgaaagaccaatttgggcagaaaatctacaagctggcgctcgacggcggcatgacctgtcccaaccgggacggtacgctgggaacgggcggctgcattttctgcagccacggcggttccggcgattttgcagagccggctcacacctccgtgaccgaacagatcgaagcggcaaaggcgcgtgtcgcaaataaaataaagggtggaaaatatgtcgcatatttccagtcctacacaaatacctatgcgcctgtctcctatctggagccgcttttttccgaagcaatcgcccacccggacgtggctgccctgtccatcggaacccgcccggactgcctgccgccggatgtcctggagcttctcgcccgcttaaaccgtcgaaaaccggtctgggtggaactgggacttcagaccatccatgaggaaagtgccacgcgcatccagcgcggttattccctcccggtctttgaaaatgccgtccgtgaactgaaagccgccggtctgaccgtcatcgtccatgtcattctggggctgcctgatgaaacaaaagcccagatgctcgataccgtccgctatctggccgatttccagcctgccatcgacggcatcaaacttcagcttctccacattttacgcggcacgaagctggcagagctctacgaacaggcaccttttccggtcttttcaatggacgaatacattgagctgctgatcgaatgtatccgcctgctgccgcccgatatggtcatccaccggatcagcggcgatggaccgaaaaaattgctggtcgcaccggaatggagtggaaataagcggacgtttttgaatgcgttttccaaggcactgcgggaaagcgggtgttttcaggggcaggatttcacgaattgattttactgcacctgcacctttccattctcatcaatctgcacgccgtccgaaatcccctgtatcttctggtaaaacgcctctttcttccccacgtccagctctctcgtatatccggcagatgaagttgcaggcacaattgaaagcgccgtctctccctgtgcatctaccgacgcctgcaccagcattgtctccggaatcgaacttccgaacacaaaatttcccagactgtacaaaatccattttccatgatacaactcaatcccctgcagcacatgtggatggctgccaaccaccagatcagcgcccgcgtcgatgtactgatgtcccatctcccgctggtacgcctctggctgcgtgttccgctcgataccccagtggacatagacaaccagataatcacactctttctttaccttctggatctcctgcacgaccgaagccgtgtcatacgccgaaaacatgcccggatgcgacgatcctgccgcccatccgcccgtcggaaagacgcgcgacgcgcccagaaaaccaatcttttttccatttttctcaatgatctgcggctgtttcgcctcttccagattttttcccgccccaacatgcaaaatcccggcactgtccagcgtatcgcacgtgtccagcagtgcgtccgtgccgtaatctagcgcatggttgttcgccaccgtcacgatgtctggtccgatctcctgtaaaatagacacgcgggacggcgatacccggaacgtaaactgtttatccgccgcctgtgttccccggtcgctaaacggaaattccaggtttgccataaaaatatcagactccgcgatcgtctcccgcaaactttctccgaggacgccaccgatacctcccacacggtcgtaggcatttaaaacatggttggaaaaatagatatctccggcaaacagaagcgaacactcatttgaatcattttctcccggttctgactcaagtttgccagattcgtcctgcccctgcatttccacccccagttccgcgccatctacctgttctgactccacctgcccgtctatatctgtttccggatcaagcgtttcttccgataccgttttgtcttttggctccaatgagattgtctctttccatatggaacctcccgcctggcatccgccaagcaaaagcgccattcctgccaaaattgtcaaatttccaattctagataaaagaaatgccgtccggtatctgaacggcattttcgtgcatttactaaaaaatgtatgcttcatttttcctcaatcaatcgcagctgtccggcgttttccacctttccagctgtcatcacccactctttctccctacagtgtcataacgattccgccgtcgcccgcatatacggttgcaacgccagccgtattcgtgatcactacctcacggaagtttgcccgtttacacatgatctccttcacgtgcttagcacgttccgggttattacagtgtgcgatcaccagacgtttgcttgcggtatcgccgccctctttgcacgcaatctccgccatccggtcgagcgcccgggtcatgccgcgcgcctgatcaagcttgatgatcgtaccgctgtccgcgcccataaccggcttgatattcagcgccgacgcgataaaagccgtcaaaccggtcagacggccatttttctttaagaaatcaagcgtctcaatgacgaaatacgtgttcatcgaatcccgatatgcctccgtctgcctgcagatctcctcaaacggaagacctttctcgcacagatcccggatgaacagcgcaatatttaactcgcccgccgacgccgacagggaatcaatgactgcaatcttcttcccgtccgttccgttctcttcctcataaaggcgttttgccaaagccgccgagttgtagcagccgctcagatggttcgaaagcgttaccacgaaaatatattctgcctcgccctcaaatgcttccttgaagctctccggcgatggacacgccgtcttcgggcactcgggacttgcctttacctttgccagaaactccttctggttaaatgtctcatcatccgttaccttgtaatcccctatctgcagggtcagcggaatcatctgaaaatgcggatccaatttcagttcctccgtcaaatccatgcagctgtcaccaataattttatataacataacgtcctcccgttacgcaattcacatcacgtagtattcattactatttattatagtaatcacacagtaggaagtcaagcataatcccgtgaaatacatactgaaatacatgacaaacacatgaacagtgttactgttcacgcacacgtgcccagtaacagattttaccgtggcttcgcatttaaatacaactaattcctgctgccaccacgttatcttacggcactttcacttccaaaagtgcctgcttgtgaacagcagctgaccaccacatcatctcgacaagaaaaacgccatcgtaatcaaacttaccagaataaatgccactgtcccgagattcccatacattgccccacatatattgcggaatttcactccctcttggagtgccccatcggacagccggattttccggaaattgaaaatcagcagaacaaacgccccgatgatcgtgcagcccataaacccggtcatcagaaacgtgataaacagcggcagcagcgtatcctgtgttccaagcatcgctatcactaacgaccagctgttgatcagaatatgcagcagacagttataacgcatccgtcccgtcttcaccgccacatatcccagaaccacgccaatcaccgccgcatagagaaactgcgtcacatttccgtgcatcagaccaaacatcagcgccgtgtaggtgatcgccgccttatcgccaaaacggcgcaatcggtttaaaagtttccatcgaaagatatattcctcaataattggtcctaaaaaccctacatataaaatcattaccggcgagagcgaatccagcatctcgttgaccgggttcatcgcggatgcatcgccgccgctacttgccgccaccgcatcattgattgcatttcccagcaggttaaagatagttccaaatccctgtgccaaaataaaaaacatacagaactgcaggaaactaatcttcattttctctgcccgttcttccgggacaaggcgcagaattaaaaatacgaatggaagaaccagcgcatagatgaccagcgtgcttccgccgtcctcataccacgctgcatttaccatccggttcaaaaacgtactgatcacgcctccgtccgcccatacgttgccagccacttccagaagtatgctgacaagcaccgtcatcacgctgaaaaatgccagcgcccagccgaggacattgcagacacggcgcacctcgcggcggcagttttttcggatttgtttcggactctgaaccgcattctgcagctcaggttccgtttgcagaccattttcttctgcctcccgctgccaaagatccgattcgttccagtttccctctcccattttctctccttcgtcattcaggcctttcattcccagaaaatacctgttttatcttccggcgctttctatcacacggcgcgccttttcctcctctgctttctgcacataaaacagatattcccgttccgatgccgcattttctcccgcacttcccagcctcgcccgctgattgccggaaagcccgcccgatttcagacggttctgcaccttgacctgatactcaattcccgcctgttccagctgctcccggatcgccgcctgccgtttcatatcaaacgtcgcgccaacctgtttccatcctccgattccaaacatacacgcacctccccgtcaaatctgaaaaaaccttgctaagtgctcctattctatcataaatactaaattcgtgaaatagtgaatcccatttgctctcttacgacaggtaataaaagagctgccacatttacgtgcagcagctccgttattatattatatatgatattttaacatattttcctatataaaacagtcctaaaccagacgcccttagttcagcatcatacccataatctcattcgaccgtgcgataaactttgtcatgcgctccggtgtcagggaaccgtggctgagctgtgccaggtcgtagagctgttcgcagatcttcggcgtattctcgccatccgtgtgctctaagacgtactgaacgagcttgttgttcgcgttgagtaccagcacctgaccgctgccgccgaacatcgacgcgtccatgcccatgttgtacatcttcatcatatcctgcatacggcgtgtttcctccgacagggtgatcatcgaagaaatctcagcatccttcagcttctcaacctttacctgcagcttatcatcgcccagtgctttcttgaaggtctctgtcagcgtctcttcctgtttcttgagcgcttccttgtcctcttccttcacttcctcgcgcagcgtgtcattgacatcggcatcaatacgcaggaatttcaggttctcatgcttctgctcttcctggctgatgaatggattatcaatgctgtgagacatgatgatcgcatcctgtccgtttgccttgaacatgttgatgtactggctctgctctttctcatttgttacatagtagatctggttctcatgaccttcctctttcgccttatccatgcagtctttcagcgtcagatattttccgtccaggttcttgtagatgatgtaatcatccatcttctcagcaaatttctcatcctttaagcagccaaatttgatgaacggagcaatatcatcccaatatttctcatatgtctcccggtcagtcttgcacataccggtcagcttgtccgctaccttcttggtgatataatcggaaatcttctttacaaatccatcattctgcagcgcacttctcgatacattcaacggcagatccgggcagtcgatcacgccctttaagagcatcaggaactccggaatgacttccttgatattatccgcgataaatacctggttattgtacagcttgatggtgccctcaatgctctcgtactccatgttgatcttcgggaagtacagaatacctttcaggttgaacggataatccatgttcaaatgaatccagaacagcggttccttgtaatccataaataccttgcggtaaaattctttgtattcttcctcggtacactcgttcggatgcttgttccacagcgggtgaatgtcattcagtgccaccggacgtttcaggatcttatatttctcggttctcggagatacctccacggtctcttttgtgccgtcctctttctccttttcctcggtctttgcttcctcgaccaccgtctcaacgatggtgtccttgtcggtcagctgatccttctcgatcgtctcatactccggctctgccgttgcatttttcaggtaaatctcaaccggcatgaaagagcagtacttctggatgacttcacgtgcgcgatactcattgcagaactcagtgctgtcttcatttaaataaaggacaatcttggtaccattgccttccttatcgcccttatccatcgcaaactcagtgccgccctcagactcccagtgaaccggctctgcgtctttcttataagaaagagtatcgatcgtaaccttgtccgctaccatgaatgcagaatagaaacctaaaccgaaatgaccgatgatctggtcttcgtttgctttgtccttatattttgccaggaaatcctgtgcaccggaaaatgcgatctggttaatgtactcttccacttcctcggcagtcataccgataccattatcctcgacggtgatcgtcttgtcctcggaattaacggtaacctgaatcttatactccgtatcccccggctcctcatactcgcccatcagcgccagctttttcagcttcgtgatcgcgtcgcatccgttggaaatcagctcacgatagaaaatatcatgatcggaataaagccatttcttaataatcgggaaaatattctcgctgttgattgataaacttcctgtttttgctgccatatctatacactccttttgattgcaaaatacagtggatatccgctcccggaaatggagtctggcagtttcactctgccgcgtccaatcctgctatccagctacataaatatacgcttgtaaaattctttttttgtgattttccatcaccgtgactcttattttaataccagcgttccaagatgtcaatagaaaattagcactcatttttgttgagtgctaataagattttaaaattctccgtcttgccaataagaagtcacttgcgtccccttcccgcctgcgataaaatagaatctacgttattgtttctacatcacacagaaaataacgaatttaccatctcagcgaggacacatatgattgcctgcaatatctgtgatataaaattatttaccaagaaactgttcatcggagagacatttgaccgctttctgctcaaggaagcggagatcgtgacgttcaacaccttctccatcgacggacgcgtccataaaagcttttattccgaagaagagcgtgccgaggggcagattgaagaatattcaacctggaaaactctgcgcccgttctgtttttccctaataaaaggaaaaaagcttccggagcgcttctccatcattttgaagcttccgaaagctgccaccgaacagtttctgaccgcccgcaaaagccaatggctcccggagcaggtcggcggactgttcttaaatattcattatgaaaaccagcatttaagctgtgtcaccgggctgtcgctcaaccaatttacgttagacaagacgctggaacgcgagtgggacgagtcgatccggacatttttgcgaaaagaagagctgccgtttgaggaataacggcagccctgttttatcggaatttccagttacacatcttcgattaattctcccagagaatcagtccattgtcattcaatgcctgttcgatcttttcaatattcttcgtggattccggtgcggtccgtcttcccagttcactcatgagcgcctccgttaccagcatcaaagcagtatcaccgctcggatggttcacagaattcgtatcaatcactacatctgcgatctttaccaatggatttaagcttgtatttgtgatcagtatcatcgggattcccaggttatgtgctaactctgccacacgaatcgtctttttcgtacatggccagaccgaatacactaaaagcacatccttcggcgtcgtattgattgcaatccggtcatagacaaactcttcctcccggctgagctggcggatatgcggataaaagcgctctgccacatattcaaaatacagcgccagcgccttgctggaacgcattcccaatatatagagctgatctgattccagcatcagctggattgccgcctcaaactgggaaatgtttgacggcgtacagagattttcaagcacctggattccgtccgcgatcgccatatggaacgtatcccggctcgccgtctccgaggtacgggaaaattcttgccgcaggctacggtacggcgttgtatttttcaaaagcgattcctgtgccaatgctttcttaaatgtagtgtagctgtcaaagcccagaagctgtaccagacgcatgaccgtcgtgcttcccacacccgcattttccgccagttccgccaccgtcatcacgccgatcttttcataattcagcgccagataattgcagagaattctctgttttttcggtacggcgtccttgatttttatgatctgttccaatacttcattgcccatcgtttatcctcattcattccaagattctcactcgattttcgtttggttttattatatactttccttagaaattcgtcaatttgacatttgtttttcgtcaaagcagacaaatttcggaggatttctttgtaaaaaaggtaaattttattctttattattgtattttggttgatttattcctttacaaattctataatcatatcataaatgtcgtttatggaataaatattctattttaggaaggggatactcaaatgcaacaaactcgatcaccttaccaaatcgccatgctccagatgaactgcgatttgttccatgtttctaataatcttgacaaagcagagaaacagatccgggaagcagccgctcacggggcaaaattgatttgtctgccagaggtatttaatgtcggctatctcggcacctgcatcccagatatgatgaagctcgccgaaatcgaagatggaccttccttgacacggatgcgtagtctggcaaaggaactttcagtctttattctggctccgattcttttttccaccccatctggagtcgaaaactctgcttttttgatcgatgataccggcacgattctcgggcattattcaaaaacgcatcccgtcggagacgaacgaacttatctgcagcgcggcacccagtacccggtctttgagacaaaactcggaaagatcggcgtcgtcatctgctacgacgtatgctttccagaaaccgtccgcctgctgacactggccggtgccgaactggttttagtcccggccgcatggcgcgccagctactatttcaaagaatggtgggatttaaaccttgcgtgccgtgccctggacaatcttgtatacatagccgcagtcaaccgctgtggattgtccggcgatgagatcttcgcaggaaaaagccagctggtaagtcctattggagaacggattgacagctgcggcgtccaggaagaagctattttatatggaagcgttgatttaaaccggattgcaaaagaacgtgattttaataccgttctgaccgaccgccacccggaggactatcgtcctatctgggatacaccctacaaggaggaatcataaatgactgataaaaatgctaaaaatgaaaactcaaaaattcgcatcatgacctttttcccgccatttattattctggtcgcgttccttgttttaagccttgtcgatcaggaaacttttctgggagtcatcaataatatcaacaactggatcatcaaaaatctcggctgggctgccagcattctcgcccttgcaatcgtaatcgtcgccgttgttgccatgttttccaaatttggcgatgtacgaatcggcggtgaggacgccaaaccagaactgagcaatttttcctggtttactatcgcccttacaacgaccatggcagccggtgtcctcttctggggaccaggagaaccgatcgcacattacgcgtatccgccgaccgaattatacggcgttgaaccttctaccagcggttccctgaaatttgccatggaaaccatgttccttcactggacgatcgttccgtattgtatgtatacggttccggctgttgtatttgctttcatgtattataacgcaaaaaagccgtattccatcgccagtgaagtttcccctcttctgggcgaccgctgctaccatcctcgctggatgcaaaccatcgacgcaatcaccttatttgccatcggcgccggtatggctggttccgtcgcacaggcattcatgaatatttccggcggtatctctaaaatattcggtcttccgtctaatgcccgactctggtttatggttggcatcgtggttgcagccgttaccgttgcaactgctgtttccggtatccagaaagccatgaagcacgtttccaatatcaatgtatacggctttgccattttcctgattttcctgctggtattttcaaatgcctccttcctgttcaacctctctaccgaggcattgggtggtttcgcaggtacctttattgaacgtatcttaatcaccggtgaatccgttggaacccagtggccgcagtggtggaccacgttctactggttcagttggatggcatgggcaccgacctccggagctttcatgggacagatcgcttatggacgcaaggtaaaacacgttcttggattatatgtaggtctttgtgcttctgtcagtgctatctggatggttttagtcagcggtacttccctgtgggtacagacctccggactgttcgacctcgttgcatcttatgaccgcggtgttgaaaatgttccttatgatatgttaggcgcacttccacttggaaatctgatcatcccgttattcgtggttctgatcttcctcagcaccattaccgcctgcaactccaactgcatcgccatggctggtatctctacacagggcatcaacccagactccccggactccccgatgtggttaaagcttgtatggtgtgtcgttccgatggcagtcggctatatcatgatcgcaaccgttggtgtcaatggtgtcaagatcatcgcaaacttcggcggaatgttcgccgccctcatcatgatcggcgcaaccgccagtctgggaattctgattaaaaattataagaaatttgacaaaacagacgctggcagttctgataaggcatagcctttcaaattaaaaacattcacataaaatttaaaaacataaaaaataaagaaacctctgcaattcttccttgattacagaggtttctttaacatatatttcctatattgaaccatttatcattatatcataagtactaaattcagctttcgcctttggctcggcttcattaagtgcttagatatgactcgcactaagttcgaaaacacctcactaagtgctcatattatatcatattgaaagggatgtcatgaaatttgcacaaactaatccaatcttgggagctatcctatacaatttcttattcggtatctcttatttaccgctaaaaatcttaactgcacgcctaaatggagatactgcactactaattgcgcttcgttttgcaatctgtcttgtgatactttacgccttaaaacataccggacgaattcatctgcgttctcttcgtgatatgggcatatctattcttcctatctgtattttccagctgcttaatggcttttttgaaaccaccggcatgtgcttctatccttctgggaaagcaagtgtggttctggcattaatcccgctaattaccaccttacttgccattccgtttttccatgaaaagccctctgcaggacaatttttctttattcttcttagctttttaggtgttttcattgttgccggaaattctgaggataaagctgcaaccgtatggggctttttcctgttgttgatggctgcctttatgtcctcctccttaaatctctgtatccggaagctcggaaaccatctgacacctctggacattacctatgccatgagcttcgctatgtttgctatttatggaagtatttctctgataaagcacctggtttctaacgagctcaccgaattatttcgtccgctctcggatcctgttatcatcggctgccttcttgccttatccattggctcctcactttatgcatcagcactgcggaatgtaatttttacccatatgaccatggctactgcatccagcttcagcggcatctccactgctacagctgtacttacaggcgttattattctgagagagcctttcggcttccgtgaattctttggtcttgtactcgtacttctggggatctggggtgtcaatgcacttcaccataaaaatgggagattttcttcctcccatcattctcctttatttcacctacattaaataaacttccgaggcgaattttctatcaataaaaaatgtgtggctattcattttcatgtccaaccacacattttttcataatatacgaaaacttatttactcataacttctgcttcgccttcccgaagctcattcatcttctccttatgtacaccaaagcattttgcacatatcaggaaaagtaccaccgctattcccgtctcaatcgcaccaactgcaatacatcccatggaaaccgccaaaattggtgtaaatgcaatgataaacacctcaatcacggactgaagcgtgtacgaatatccataatcatttaacgttccgctctttccttccgggtctacaattcgaagcagcgtaacaccaattgccacaacacccgttgtccatccaaatacaaaaatagaacgctcaaaccagaaatttcggaacagcttctgtccaactacaaatactaaaaacagggaggtcagcagtcctaatacacataaaagtaaaatcggacctgcaaattcgagtacaacagaaatagaaatagatgccacaccaaagccaaccagataatcggttaccatcgaaccaatccgtccttccacatgctcatcaatactgtctttaaaacgagtatgccctataatcgtgttaataatgacaccaaatatcattgccaggcacataaccggtaattctacattcggtaagaactgtttataaaaatcgtagaacttataaccacacagtgttgcagtcagcgtgagtgcaagatgaaatgccaacggatccatactcattggattgatggtttcttctcccatcgaatttctcttacctactggaacgattcctgtgcggcactcttccggaagagattccgctttttctaccagacgtgttcctccatgtctggttgcatagttaatacaggcaattcctacaaacaaaccaactaacaggcccacggttgcaaacgtctgccccagtacaacgccatcttcacgtcccagtgaattgttaagtgccgttccaatcgttgaagcatagccatgtccaccgcaaaatccagatggcatcagcagggcaatttctgtaaatacatttggaaacaaaattttcatcagtgcgccgcctaccagcagtgcaataccaaaacagaaaaattcagctcccatattgacacaaaaggaatcgcccacctttgtcagaatctgttttacattggttttatctttttttcccaggaacaaaccgccaaataatacacataccagcatataagcataacttcctattttaccgctccacggaatcacgtttaaaaactgcggtcccaggacaagtcccatcagacctgccagaacagacgctggaatataaaacatctgcaaaaattttatacgggaacgcaggaactgggctataatcagcagcagcgacataaatgcaaaatcatatagaaacgacatattggtatattccatagatatcctccttccagtacactatattatcccttaccttcttaaaagtacttctcgaaaaaaataaaaaggtcaagaattcttataagtaaacttataattgatttttgacctttttattttttcatattcaattatcaaatttactataactctcccagcacctt

SEQ ID NO: 11077 - DNA, 26959 bp, Unknown
  gut microbiota DNA sequence
gcaccgtatgcgtcatcacataaatctcatcttccgtgattctctcatccagcaatgtctgcataaacaacttcatcgcttccaccgggtgttctcttgaagtctgcccccgatccgttaccataaaacagtgttctgctccgactacccggatatggtctgccatctcctgcgccgtgcattccttttctgccacattataccagcatttttcaatataaacgcccagagctgccagctgtttctgcgtttttacatcgacacgcgtccgcggaaattctggatgtgtcagaaccatacggtttccctgccggattccctcctgacacaggagaataccttcctccgggctgatgtgcccggtcgcgactgccgcatcatactttctggcaatcctcaaaatctccaaaacctccgccctcagctcccctgtttcggtcaggatagagattccagagcggtcaaagaaatctcccggcatattcccggaacacaaagagttctttgcgtcccgggtcggcatccacacgatacggcatccgcgcttcatcgcattttcaaccgcatatggattgagtcctccgactggccagtttaacaccagaccgccataggctttcgtacacgaagcacagtggatattagccagaattgcccgcgcaatcgtggactcatagtgagatttcagcataattcctgccattccggctctcccggcttcttctaacagcccgtaatcatccaaaactcgatgaaagggggacggggctgcgtgcatatggaggtcatacgctccctgcattaaatatgcaatctctttttctctgtccatagattatttctgtaaaccaaactggaatgctttcagattctccttgtagaatgctgccagcgcgtcagccagtgcctggaacttcggatcgtcgtcaaacatccactcattgtgcttgccatctacatagtataactgcttcggctcctgtgccagacggtatgcttcttccgcctctacacgctgatgcagctcgttataatagccatgacctacaaagacagcacgcggtgcgattctcggaagcaggtcttctacgttgaaacggatgaagctctcgccgattgcggtgctcatcggggtcgggaactcctcgccattatccttgttgacagaatcgccgataccgccgttgatctcttttaatacatggtctgtatagaaatcgccgctctctgtgatgttcggataatcggtgtacggatgcatcagaaccggatcgttggttgtaattctcttgatacggtcttctctgaggcgtgcaacgctctttccaaacttatcatttcccatgccgtcacgcatccagcgctcgccatttacaaagctgttcagggttgcaatcgcttttacttccttgtcacgcgctgcaacggttacgcatacagcaccgccgacaccccatccaagaagtccgcagcgttccggatctacttccggctgaatctgcataaaggtaaatgcgtttgccacgtcttcaacctctgtctcaagggttgtgtacttcggcaggcatggatgaacattctcactcggcttaaatcctctgtaatcgaagcccatgcatacaaatcctcttgctgttaaagctcttgcaaacagtgccggatagcacttattaacgccagtccatccagagttacacagaactgctggtctcttctcgccctctttgtaatcatccgggagataaatatctcctaccatctttgcgccttcgctgtagaatacaacttctcttgttttcatgttgaaatcctccatttcatttaatttattcttttttgtcggttatggaatttttgttccttttgtgattttatattagatcatgttgcagaatttgtcaaccatatttttgaaaaaagaatgtattttccattttgtatagttttagcttcctgtttttgttgatccgttccaaatcttgaaacaaaaaaggatgtgcgaccacttccaactccagtcgcacatcctttttctatctaatcttcattttattccatcatcaatgtgtcgccacataatatcccagcgttgccgggactgccttattctggttccagatcgccggatattccgagaaagataccgggcaggtggaacgtcctacctcgatcgtgataccagggatgcctgctgcctgctgcagccagtccttcaagccgccgacgcccttgcttccaagaacggaataaccattcaaggcatgaacagcgtttgccagcgccttggactctgccgctttctggttgttctgcgtatcccagtaaatcacatttcccatcgcatgatagttgataaccgcattgaatcccgttccctgaatcaggttcgcgattgcctggctctccggctctgacagtgggttggttcccttataaccatttgcagacggatgagttaaagacacattgattccctcccagtttgctgcaaagttatagttcagatcgacaccgcgtgcattcgccttccagcgtctcatatactcttcatagctgaccgttgtccggctggatgccttgtccgccgcgtacgccgcctgcatcgtctggcgcagttcctccgactggataccattctcgcccatctggctgatcgtaactccatccggattcagcatcggcacaaaatgaaatgccacctgtcccaatatattagaaagcggctgcgtcatataggtaccattattcgtaaatccagctgccagatactcgagctgctgcatcatcagcggtacaacgatatactctctggcatgaatcgccccctggaacaaaatcttcttggatgcgttcggattgccgacaatcacatcgtagatatcacgtccgtccgccgattttccaatcgatttcactgtcactgttcccggataacggcttgccagcgccgaaatatcgtttaccatctggctataggaatacttgtccaccggattgacaaccggattggataacgtctgattataataggaattatccgcctgctgtcccgcattcgcgttcgtggttcccggaccgcccggtccgatcactggtgctgccgctgccggatcatccgccggtcctgcatacgctgtaactgccgataagctgctgcacacaactgacagggataaacaagttgccaaagcgccttttcgcagcaggcgctgaattttatttcgttgactcattctcatgtctccttctggccctttcaaactcttacaaacaatgtttctattatagatttacctctgtcgaatgtcaacgaactgcataaaactgaaagaaaaaagaaagatactttttccaatttatattttactttaacttacctaaaatcagcaccactgccgtaataatcaggacaacgacgaaaattcccgccattccttttcccataattgccagcgaaatcaaaaaattattccacatccgatattttcctccatctcaatcagtgcactggctgtctcttgatttttcatcattcaagtgcagccttccttttccattttatctgcccgacagacctatattacaaatactggcttaccagcttaataaccagtccgcccgcgatgaccgaggcgatctgccccgatacattggcgccgaccgcatgcatcaggataatatttcccttttcctcctccatcgccagcttctgcaccacgcgtgaggacatcgggaatgcggaaatgcccgccgcaccgatcatcggattgattttcgtcttcaaaaacaggttcataaatttagcaaacagcacaccgccgatcgtatcaaagataaatgcaatcagaccgattcccataatcagaagtgtgtcaacccgcacaaacgcatccgcacgcatactgaacgaaatcgtgatgccaagcagcagggtaatcaggtttgccagctcgttctgtgccgtctgggaaagtgccggaagcacgccgcactcgcggatcaggtttccaaacatcagaaatccgaccagcgccaccgatgccggagaaatcagtccgacaatgatagtaaccacaattggaaatgcgatcttggtcgttttggacacatttttcggactgtaggtcatgtgaatccggcgttcttttttcgtcgtcaccagacggatcgcaaatggctggatgattggcaccagcgccatgtaggagtacgccgccaccgcgatcgcgcccacatagttggaatgcatgatctgggaaaccagaatggaagtcggtccatccgccgcaccgatgattccaatcgatgccgcatccctgagttcaaatcccatcagcgatgccgcacagatcgcaaagaaaatgccaaactgcgccgccgcaccaaataaaaacatgatcggctgtgacagaagcggtccaaagtcaatcattgccccgattccgataaagagcagaatcggaagcgcctccgacgcgctgatcgtcgtctcaaacagccactgtataataccctgtgtctccccgatgccctccgtcacctggttaatgacgccggataatggcaggtttaccatgatcgcgccgaatcccatcggcagaagcagcgccggttcgtattcctttttgaccgccagccagatcaaaagcccgccgatcagatacatcacaacctgctgcggcgtgatcgccatgacgccttcccataaaaattccatgttgttcctcctgttaattttgttttccttcataaatatcctgtttcctggagccccttgccaggatacacctgctctggcagctgtctttcttcgcgctaggtatacatccatgtgagtgtttttgtttcataggacgctttttcctaataaaacaaaaaagactttcagcatacgtttcatccacatatgctaaaagtcttgttcctcacatttgaatcatacggcacacgctttttgttacaaaaacacactgccatctgacttacacaaggcatgtaaccatgaggtttactatcctcagggtctgttggttacatggttataactactcccttttaacgcgatcatcatatcatacggttttttccccgtcaaggtcaaactgagtattttgtgttaagaaaatgaaaagctacgaaaacacgaaacctgctatgcttccgccggcatattgacacccgcgatcttaatattaacttccagaaccatcagaccggtcatattttcaatcgctgtctttactttgtcctgcaccttttcactgactgccgggatgctgtagccatatttcatatttaaggacagatccacaatcacgcgatcctcggttacggtcactttcacgcccttgctcaaatttttcatgccgagctttccgaccagttcatttgtgatattgccagccatcgaatcgacaccgtctacctcggtcgctgccagacctgcgatgatcgccactacctcatcggcaattttcacttctccaatgcggtccttttcatatacgatatgtgtgcttctatcttctgcttctctcgccattccaaatccctcctgaccacttccatgtacgcccggaatcttctcttcccacaaaaaacagatgctcgaatacttccagaaatacatttcaattaagtgtttttattataccaaaaatacaggagtttgcaaaggcatttccggttcgaatctcatccgagttactgttcacgcatacgtgcccagtaacggaatttgccgtggcttcgcattttaatacggcaaattcctgctgccaccacgttttcttacggcactttcggttccaaaagtgcctacccgtgaacattaactcatccgaacttcctcaatctcccaggtttaaaagggaaatcacgatattttccgccgatatctcggttttccgttttacaatatcctcgatctgcgcgcgctgcggatctgtgatggacggcgcgttgacaacgacatccacttttccatccgtgatgctgacaaccggatcggcaaatcctttcgccatcagaagcgtttccgctgcattttccttctccgctatcgcattgagtgccagcatatcctgaacggctgcctcttttgccgacgcatccagattttcattgttaatcagggcattcagcgcttcgcggttcttggcgcggatctgttcacggctgagctgtacattggctatgtactctgccacgccggttccgcctgtcaaaaccgcctcgcccgggttatcgactgccggattgtccgcagatgcctcctctccgtccgccgccccctgcgctgtgccctcctcactgcctgctgccagcggatctccctctcccggatcgtcaagacttgcaatctcctcatattcaccgtccaccacgcttccggacaccgcctgattttccgaatatatatcgctatctgaaatcttggtcgcccccgcttcatatgtatccgcccccggcagatcggattttcccgcatagttgagataccccgccgccgcaatcatgatcgccagcgtcgtgatgatgatttgatttctcctgaaaacgcgtttcatcttcattctcatatttgcatactcctttattccacccgctttaatacttttattttatgtgccggcagtccgaataatgcctgcatcgcttccgaaatttccttctgtaccgacgcatttcctcctccctgtgcgctgatcacgataccggaaatctccggtgccagctctttttcaactaccggttccccgctgcctgaacttcccgccagcacggtgctctcccgcagcgattcatccacctgctgccgcgtaccacccgaagaatccgtctccgaggtggacgcccggcttctctccttatccacccgcagcaccttttccgaagaagaaaacagagtcagcatcacatccacctcacccacgccgtccaccttctttaaaacgtcccggatccgctgctccaggcgaagctcgtagaggcggttcgtgtcctgcctggatgcagtgcctggcagacctgtttcgacatccgaaccactctcttctgaacttccatttttgtcctgccctgctctatgcccagagtttgtttctgtttcactctccgcccatctttcccctgaccgcaagactcccgtctcactcgtcttcttcccaaacggcgcatataagatcagaattgccagcccaagcaccagcaaaatcagccatttttcatttcgtttgacccattccttgtcaaggttccatcctgacttccacatgatccgcctccacctgataaaacgatgccagccgctgctgaagctcccaaatcttttccccattcatccatgaaactgcctgcgcggcggcgggttctccctgcttctgctcctgttcaagtgaaatttcaatcgggggaattttttctatttcaatcatcgaactctgattctcctccagttccgccgcttccatccccgcctcacttcccgccacatacaccgtcacactccgcaccgaggcaaattgctccgactccggatctttttccagctctacatccgccttttccacggaaaatcccgcttccgctgccacccgcaccgcctccttggatgcttccgcctcatactggctcaaaaccatatttctgcgccgcacctctatctcatccatctcacttttcagctcgcccgcttcattttcaaacgaaagagatgtaaacagataattcagccgctcctccagccgcagcccgtccgtcagcggcttaagcacaatcagaagcaagatacagcccgcaaacaggcgaatatatttttcatacttatgtgcgggcaaaagcccggtcagaacggtcagaaacacaagataactgacgatattccccgcccagtgagtaattacttccatcttctaccccgcaaaataagccgcgttcgtgctcgcacacaccaccgcgatcgaaagtgcaaataacaccaacgccgaaccagctgctgccagcaaaaaataaaatcctttcgccactgcgccgactgcctccaccacccggctgtcactgaccggctgcaaaagcgccgcgcttccctggcaccccagatagaggattaaaagtttcaaaagcggcagaagcgacaccgccgccagcacaagcactcccccgatgcccaccgtattccggatcaggacgctgcttccaagaagtacctgcgacactgccgccgcgccctgtccgattcccggtatcaggctgaccgcccgccgcagcgccgtctggcgcaccgaatctgtatacggcgcaatcattccctgcagcacatgaaagcccagcaccactcccaaaagcgccttgctgccccagcgcatcccctgttccagcaattccaacgcttttgaaaacaaatccttcgagcttaaatgtcccgccagcgacagcaggacatacaactgggtgcatggcagaaacaaccgtaaaaacacccattccgccacattgacagaagcaagtgtccacgcatatccggctgctgccgaggtacttcccccggaaaaggagacagccagaaaaaaagcaggaaccagcacccggacaaattcaaagagctgctccaacagtgtccgcgtgatccgcaccccattcaaaaaactggcggcaagcagtgtaaaaatcagaagatacgtgacataaaagcccatctccgatacctgactgtcggcaaagagactcgaaaagctggcgaacaccgcccctaaaattcccagaaggatgacctgccccatccatctgccattttctgaaatttcccgaaatagggctgtccggcaaaaatccatcagcatccgaaccactctctgataattgccagagagaagcatcgaaaggatttcccggaatgaaagccccgggactgccgaacctcccgcttcccttaaaaatgcttcgattctgcttaaatccagtgagttcagaagagaatccatgttctctccagaaacactgaaatccgaatcttcagatatcttttcaccatttgccgccgacaccgttaaatgatttcctgccatcaaatatacactcaagaatataacgctcactgcccgcacaaccatctttgttcccaccgtcacctgctctcaccatctctccgcttttctgcacttaccacttccctacgccaaaaactgcttcaccgtctccaacaatgccagcagaatcggcatactgaccgccagaatggacagcttcgcaaatatctcaatctgtgttcccagcgaaccgtacccggcatccttgcaaatcccggaggcaaattcggcaatataagtgattcccgccattttcaaaagcgccgacaaatacactggactgatcccgatgcaggattccatcgtccgaagtgttttcagaatcacttccagctttcccgccgcatagaaaaagagacacagccccgccgccatcacaatgtacgtcccatactcgctgccttttcccttgagctggactgccagaagaactgccgtgatcccaagaaccgatacggttaaaattgacattttttaccgtccttccctgcaatgtgctctcggagtctttcccgcactcgcttttgcggctgatttttcgccagctgcatccgaatttcatcaacatacgcctcagaaatttgggctcaactgacaaaaaatcatctcacaaaatcaagcacagaaggattccgagagtacattacaacgcaaacaattccttcatcgtctcaaacaactgataaatatacggcaccatccagaacagtaccaaaagaagacccgcaagacttgtgagaaatgcctgttcctcccgcccgctgtgtttgaggatctggcagaggacggaaaccaggatgccgactgccgcaatccgaaatattagattaactcccattttctttccccacttacatcaacaccactgccagaaacagcccgcctagtatcccaagcccccagcacagccgtttcttctccggctcttcccgccgtagctgctcaatcgcccgttccaattcttccagatacagtgccagcgtcttttgctgcatttccagatcgagatacccgatgctgtttccaaaccggcacatcagctcccattcctctgttcctaacatcggacgaatcccctgctcttccagaaccgcttcccagatactcccaaacggacactctggattcgcttccagccgctctcctgccaccaaaaatagcttccccgcttttccatccccgcgtgcccccgcccggcacagtgccagaggaagaactgcctgtgtatacccaatctctccctgcagtcccgcggcaatccgttttacttcctccaaaaaacgcctccggccaatcaggcgcaatgcctcacccccgccaatccccgcacacgatacacatacaaggcagattccaagcaattttatccacatatgagctcctcgccagctgcatcatataccgcctccaccgttcccggtccgcgtctatttcccagcaccacataccgctcaaaccgtttttcttgcaaaaaagaggacaagcccggtttttcccggatgtcctccatcgaatttccatgtacggttgccagaatcctgcagccacagttcatcacatagcgaagcgcctccaaatcattctcaccgccgatctcgtccaccgcgaccacctccggtgccattgagcgaatcaacatcatcattccctccgccttggggcaggcatccagcacatctgtccggcagccaacatcgttttgcgggattccctgataacaggcggcaatctccgaacgctcatccaccaccccgaccgtctgcgccctcacttttccaccatgctgcttcctcatctccaccatttttccagctttattttcatgtcctgcacctgccttagaccgttcaaagctccccctcaaagcagagcccctatcctttccctcttctccatccgacaccatccggatcagatcccgcagaagtgttgtttttccgcatctcggcggcgcaatcagaagcgtattccggatacttcccgcccctggatccgtcaaaatcgaccgtatttttgctgcacaccctatcatctgatgcgaaaaacggacatttaaaaaggttatcggatgaatcgcctttatatgtccgttttccagtatcgtccttccagccacgccaatacggtgtccgccctgcacggtcagaaacccctgccggatttcctccccgtaagcatagagggaagaacgagccgcgcattgcagcgtctcgtccacatcctcccggctgacccggaatccacttccggctgtgtactctttatttttatatatgtaatacagcggcgcgctaacccgcagccgtacctcttccattccatccgcctcaagcggaagcgccagaagctgctcccggatattccgggagaaaaaatgaaacagcgccctcacatcctgctttgattgttcctccttcatcagcccgtcctccttacctcaatatatgaaggactggctaaaatataccatccgcctatgcatgcacggacgcactttccatccgccgcagccgtctcacctccacgcctgccatcgcaagcgccaccacgcccgccacaaaatccgcgatcggtccggcatacatgatgccgtcaatgccgataaacagcggcagaatcacaatcagcggcagcaaaaagagaatctggcgcgtcagggacaggaaaataccctttttcggttttccaatcgccgtaaacaggttcgacgcaatcggctgcacacagtttaagaacgtgaaaaacaggtaaatccggaaatatttttccgcaaactggaaatacatctccgatccttccccgaacagcccgatgatcggacgcggaatcaactggaaacacgcaaaggacaccgccgacaccgcaaatccccacctgagcgccaacccatacacctgccgcacgcgcgcataatttttcgcgccataattgaaacttgcgatcggctgcataccctgcgaaagaccgatgacgatcgaaaaaaacacctgattgaccttcgtgataattccggcacacgccagcggaatcgattccccatagtccgaatgcgcaccatagtaggtcaaggatttatttaacacgatctgcaccaccagcatcgcaagctggttgaaaaatgccgccgcccccaatgaagtaatcatgcttacatatgttctctgtggtcgaagatgcgccgctgtcagccgtccgtttttgtaacggcgcagataccggataatcaggattcctgaaaaaatctgtccaatgatcgttgccagcgcagcacccgccattcccatatgaaatccaaaaataaacagcggatcgagcaccgtattgatcagcgccccggataaattgtaaagcatcgcattgcgagggcttccgtccgccctcaccagatgcccgccgccgttggtcagaatcagaaatggaaatcccagagccgtgatacccgtatacgtttgggcatacgccagcacattgtccggcgaaccgaaaaagtgcagcatcggcgtcaggcataaaagcgccacaattcccagaatcacaccgcttccaaacagaagcgtcgccgcatttccaatataaaataacgccttttcccgatcgccgcctcccagcgtcaggttaaaggatgccgcaccgccgattccaaacagaagcgccagcgccacacaggagatcgtcaacggaaacgccacgttcgtcgctgcattccccagctctcccacgcttcttccgataaaaaactgatcgacgatattataaagggcgcctaccagcatcgcgataatacttggcaccgcaaactgccgcaaaagcccgccgatcggctccgtacctagtatatttttcttctgtacctgttccatgaatcttgattctcctgtctacgttactgcgaacaattatcagtctacctctcgttactgataatttttcctctttacatgccttccccgcgcatgatacactaccatcagttattaaaacggaaaggacttaatcacatgaatctttcatccttactgcaatttcgggacgagtgggcgcgtttcaaagcccgccaccctaaattttccccttttctgaaagccgcctacacccgcgcgctgcgcgaggacagcgtcatttccctaaaagtgaccgccccggacggaaccgaggtggcatctaacttaaaggtcaaaaaagaggatctggaactgctctcgcgcattatgaatagctgatttttaatcatccatcatgcattatgtctacttatgatacggttctccttttataatccggaaactccggtaaatctgttccagcaaaatcacgcgcatcagctggtgtggaaaggtcaggcgcgaaaagctgatcttcgtgtccgcacggtttaacaccgcctgcgacaaccccagcgaacctccgatgataaactgcagatggctctcacctcgcacgcccagatcttccatccatgccgccatctcctccgaggaacgctgctttccatcgatcgcaagtgcaatcacatacgcgtcctccttgatatgcgccagaatccgctcgccttccttgtcgcggatctgcgcttcctgcagctcactcgccttatccggcgttttttcatccgccacctgcacgatctccagacggcagtaacgccccagccgcttgctgtactccgcgatcgccgcctccagatatttttccttaatttttcctactgtcactaacgtaatcttcactttttaagctcccgttttaaaaatgccaacagattcagccgcgcccggtcttccgtctctttgcgtctcgtttttacctttttcacgaccgttccctccggttcccgatgaatccggtagatgatccgcagatattccgcgacctcttcccatgcctcgcggctctccggaatcaggtcgagtcccatctgaaatacatggaacatcccgtcatagaccgagcagcgcaccttgacgccctcggcgcgcgcctttttcgctgccgccctcgtatcatctaaaagcacctcatacgcgcccacctgcatcagcatcggcggaaatccttcaaaatctccaaacagcggtgacagatacggatttttcggattggcattcccgatgtagctgcactggtacaacatattttccttcgaattaccaaacagtggatcgatcgtatagttttcctcatacgatgccccgctcagacttacatccgtccacggcgacatcgtgataatgcccgcaggaagcggcagcccgtgatctttcgcatacaaacagagcgccagcgccaggccgccgcccgccgaatccccggctaccacgatctgggatggctggtatttcttctcttccagaagccatcggtacgcgtacaccgcatcctccagcgccgccggatacggatgctccggcgccacccggtagtccggcgtcagaacatccgcgccgaagctgatctgtgaatacttaaccgcaaaccgccggtaaatatttttcatcggaccgatatacccgccgccgtgcagctgcaaaatgacgcgccccgtcaccgcctgcttcggcttcaaatattccatcacaaactgttctgtttttaccagctcataaatatattccgccggacatctccacgccggttcgaccggatttttccggaattcgccggtctggatcggcttctttaacgatgtctccatcacgtcactcatcatatcacgcgtcagattgcctatcatgctgactgttttccgactcatgcttcttccctttctttcatccaaattttcaatcttcgtatttttatagatcgttcctttactgtgaccgattttcctgccatttacacatgaaaccgcctcttcaattcccgcttcacactccggtcgcccagaatcaccgtcgccgccagcgctgccaccgacacacctgctgccagcaccgtcagacgcggatgatgcgtccacccgattttccagaaaatcaacggcacaaagctcagaaatgtaattgtgatctgatacataaaatagctctgccagttcatccggttgactagcatcatcagaagaaccgccgccacctcaaacagcgcgacgcatgggatcgcgtagtccaccgaccacccccgaagccctgtaagcgcgtcaatcagaagcaaaattgcctgaattcccagagactgccgcaccagcgttcctgccaggctcgcatgccgcatgactgaaaaccgcagcgtcatcgccacatacgccgccgcgcccgccgtcagaagcgaccatttaaacggaatccgatgataagtcgccagattcgtaagccccgccagaagcgatacgatcaccaatgacacataaaatccccgcaccgcacggcgcacgcgctctcgatcctgggcaatcactggataacgtcctttatcatgctccgtatccgtgattccattgctctctcgctctacccggatgcccttttcctccaaaaagtgaaagaaaaactccggaagccggttctctgccatcgcactcgtaaacgacaggcataattttccgtcatacgccaccgccccgcatttcatccgctgcttcggcgatgcgccgacaagaagctgaaagccctcgatcgaatctttcaattcctcccggacctgcgccggtccgatgttggaaaatgtcatcgtgtgggcgcggctggtgtgcagaaaaatcaactgcatcgccagatgtttgacaaatagcgggatagcccgcacataccattttttctcattcgacacattgtaggagatcgtctcctccagccgctccttcacgatctgctcatccatctggcggctcacagacgcaatcacttcttccaatgcctccggcgcctttcccgccgcccacgaaatattcacgacagcaaagaagtttgccagcgtctccgactcaaaaaaactccgtaggttcaccggaagattgagcgccaccggacgtttcagcgttttcccatccgtctccgtctggatgatcgcccagagaagcaccgccgccagatatttggtgatgctgacacccaccttcctgcattccgtcttcagtgccgacacctcaatcgtcccctgcagcactgccatctgatcaaatgggagaaattccccctgaatcgcaatcgccggtctgctgttataatgccgatgcggcagtttccggtaatgtcgcagataatcgtcctcccggagcagcgaaaactcccgctcctgcaccacaaccggcaattttttcaccagttccagataatgttctgtaagccgtgaagcaaaccgcagcgcccccagtccgtccgtcagcccgtgaaacacttcaaaattgatcctgcatccatagtagctcacacggaatgggaaccgcgcgccccggtgcggatcaatgaaacggcacggtgcactctgttcttcttccacgcccggattccggttgttcgtctcaaaataataccagaaaaatcccttccgcagcttcacccggaaattttcaaactccggaagtgtccgcacaagcgccctttgcaaaagctccggatctactttttctttcagaaccgccgaaatccggaatacactgcttaaatcctcccccgacaccgccgcaaaaagcttcgccgtgttatccagccgcctccacgcggcgccctggatgcggagacgctttttctttggtttttcctctcgtttcttctctcgtttcttctccactttttctgaaactatctgtcccggctcttcctgcttccctgcaatttcatccttctgatcctgttcttggttttcctcgttcattctctgctccatctgcctttgccacctaaagaaaaagagcagctgccgggatacacactcccctgcagcgcccctttcatcctcttctgagttcttttctacattaccgaatccggaaataataccccacgccccatttcgtatgtacatatttcggatcactcggactcggctcgatcttctcgcgcagccgccgcacatgaacgtctacggtgcggacatcgccgcccgccgccgcccggttgccccagacaaagcgcagcagctcctcgcggctgtaaaccttgcccggattgcacaccaggagctccagaaggtcaaattccttcgcggtcagattgatctcgcgggaagcgataaaaacccggcggctgtccgaatccagcgtcagatcgcccgcctcgatgactttctttgtctgctgcggctcctgtctcgatttcttggagttgcggcgcaggatcgccttgatgcgcgcctttacttccaaaatgttaaatggctttgtgatataatcatcggcgccgtattccagccccagaatcttatccatatcgtcgccttttgcggtcagcataatgatcggcatctcggagaactcccggattgcctggcagacttcaaatccgttcagcttcggcagcatcacgtccagaagaaccatatcatactccgtctccttcgccatctgaagcgcttcctccccgtcataggcgcaggcaacttcaaatccatcctgttccagactgaaacggattccttttactattaatttttcatcatctaccactaataccttcgccattctccacctcaaccactatgcttctatctctctatactataatcttatcttttatcttctgaaatgccgcgttcttgatgccaggcaccttcataatatcctcaatcgtccggaaaccgcccttctgctcccggtaagaaagaatcgcttccgcccgcgccgcgccgataccgtttaaagtcatcaactcttctttggaagctgtgtttaaattaatcaatgctgcactgcttccagatttctgcgaatctgactcgctgccattcccagcagcgcctccggctcccagaagcccggagacatccttccctgtttcctgatatttccgaatctcttcccggctcggaatccgaagctgctgtccatcctcgatcgcctgcgccagatttacatattcctgcgccgcctccgatgtcatcccgcccgccttttcaaccgcctcatacatacggctgcccgccggaagctcatagacgcccggtgcggctacctcgccgcagacgtggatatataggattctcggttccggcgtttggggattttcttttgattgcccctcaggcgcagcgttctctgctgcttcattatccccatccactgacccgccgtttgaccgttttgctggacgttcggagctttcctgcgaatcatccacttcttttgaaaaactattctgcgtctccagcaccaccgtctgcttctctcgccggctctgcacaccaaaacacaaaacagccgccaaaaataccacgccgactgcccctgttcgcatccatcgtttccgatttactgtttgatttgtctgtttcatcttctgcacccctctttttccgaggcgcgttttgtccgtaattctattctaaccaaaaccccctttaaacacaagcagaaaatttttattcccatctgaaaatcacaatccccgcaatcgcaaccgccgccccgatcgccttgcgccactcaaatcccgctttctccacaccgaaccagccaaacacctcaatcaggtacgccaccaggatctgcgccacgacgatcagaagcgctgattttgccggtcccagcgcgtcaaagctcttgatgaccgtgtacgtgataaatgccccgatcacgccgccggtcagcatataccgcggttcgatctgccaaagctccgataccgcgctgcgccccgtaaaaagccacatcaccagacaaaccacaaacgcgcttatctgcacccatccagccgatacccacatgctggtctgcttcatcacggcagaattaaacacgccctgtatactcatgagtgcgccggaaaccagcgcggttatcattccccacataaaaaataaacctccgcattctgttctacattctcatgaaacagcagccgtttccgaccattcatttcacactgttagtatcccagatatgcgaaggtttatacaatttgtgtttattcccttttcctgtttaaaatccgatttttcctccgaaaccagacaacctttcatgcagctgatccctattgaatggaaaacgtagccgacacctctgcctcaacatccacctgtcccggcatcaggtttctgcctgcacccgcatcttccatcgccgtttccttcatcgccatgccgctgctgtaagaagtgtcataataacgcgcctgctgaccgctgctgtactcctgtacattcgtcatcgttcccagcttgcagccgcctgcctccgccatcgcttcggctttcacgcgcgccgactcaatggcttttttgagcgcttcctgataaatctcatcaaaattgctgcactggtactggaccgaatcgatcgaattgatacccgcattgaccgaatcgctgataatcgcccctgcatcctcaatcgcaacatccgatacaacaacctccgtcgtcatctcataaccagtgatcttcttgccattgtcccagtcatagatcggattcagccccagaccgctcgtctgcaccgaggtatctgcaattcccttttccttcaaaagagccagaaccgcatccaaatccgtctgattctccgactggcaggtgctcgcatctgccgcctgtgaatagacactgtaggtaatttccgcaatatccggctccgccttgattttctcctggctcgtcaccgtgatccccgtattttccgccgactgcaccgtcaccgatgccggtgcggacgtacaacctgccagacctgccgccgacgtcattgtcatcgtgcctgctgccagcagaactgccatcctgtttcgcatcatccccatttttctcataaaaaattcctcccgtttttctgtttcatccgtgagttccaccccacaatgggttcggaccttccggaacaactgctggtacactgtcattcttactatagttatacctgaaaacgagaggaaatgtattgcttttctcttaactttctttcgcttatttattactatttttttcctgtttcatccgtgctgcgcgcaccagatgctgtgccaaaaccgccgtcgtcacgccgccgacaccgcccggaaccggggttgccgccgaagcagttccttccagatcggcaaaatccacatcgccgcagagttttccattttcatctacattgatcccaacgtcaatgacaaccgcatccttttttacataggtgtggttgatcatcgctgcttttcccacgcaggcagccagaatatccgcctcccggcatacctccggcaggttggcggttctcgagtggcagatggtcacggtcgcattttcatgcagaagcagcatcgaaagcgggcgtcccacaaccatgcttcttcctacgactgccacccgtttgccagaaagcgcgatatcgttcattttcagcatgcataccactgcctccgccgtacacggcgcaaaaccgctcgtatcgccgctgaacacctttgcgatattgactggggaaataccgtccagatccttcgccggatcgatcattttttcaatatcctgctcgttgatctgttttggaagcgggcgcagcattaaaataccgtccaccgacgcatccgcattgatcgccacaaactccctcttaaatgcctcgtccgagatatctcccggaaataccttcgattccacctcaagcccgaacgatgtcagcttcttcgtcgcgcctttctcataggaaatatcatccggattctcgcccacccggataatcgtcagtttcggcacccatgtcagggtttccagccctttttccacctgctctttcagctttgccgaaacagcggctcccttcattgtaatcatcttgtctgcacctttcgtttttatttatgatgaatttcccgcgctttcgcgcatattcattttaaatttttcttaaaatgaaagcgacgccaaaagaccggctccgcctgccatctcaagcaggtaaaccgtcacaatcgccgcgatcgccactaccaccaggctctttcccttatatcccaaaatcaccgctacgatcgttcctccgaccgacgaatagagatgtcctgtggaggtaaatacatccggaaatgtcagtgctcccagcactgcatacggcgtataatctaagaaagatcggataaacttcgaacggatctgtttccggaaaatcgtaaccggaagaacacgtggaatatatgtaaccagtgccatcaaaaggacacaggtcagtacgtatttcatatcgagtgttccggctgctcctgctgcctctgctgtattcatcattctgccccctctttctgactctcgtcctgaccggcttctttaccgtccggatcatgcgggaatttccatgcaccgaacgccgatgccgcgatcgtaaccagaatcactcggaaaccggaggaaataccggcaaaaaccggaacatattttaaaatgcacaccatcacaactgccagaatgatgacgcagcacaccgaccgcgatttgcgtgccgccggcagaatcagtgcaataaacatcgcgtacagggcaattcccatcgcattctgcagcgcctgcggcagaaccgccgagatcgcgcctcccagccaggttccaagattccaccccagaatcggcatcgtgataagtcccagcatatacgacgctttcaaaatgcccggatgcaaggaactgacgacaaacgtctcatccgtgatgccgaatgccagtgccaggcgcgccccggttcccgtcttttcatcgagcttctgggacagggacagtgacatcagcatatagcgcaggttgatgacaaacgtcgtcaatgccacctcaaagtacccagcccccgccagaatcaggtttgtccctgcgaactgtccggcgctcgttaagttcgtcagcgatataaaaactgctacccagaccggcagaccgcccgacaccgccaggaaaccaaacgtaaaggagaccggcagataccccagtccaatggggataccgctctttagcccctcataaaatgtctttttccaactcattctactttttcactctttctgttcacgcaaccgtctatttttcaggcttcacataccgcgcatgctgcccgttcagccactctaccccgctcacaattccttcttccgaaaatggaaattccttgcgggtcttctcctcttccggcgttgcgtcgtatccatatggttccggccacgatgtcacggtcaggactgtatcctcgaccgtctcgccatctgcaccgtcttctttcggtacttcgcgctttgtcatctccatccggtagcgcatcccggtatcacttccggtaaatttttcttttttcaggaaattgaccggcatcacatcttttctcgttatcatgccatttacccccggaatttataacgacggatcaccgcctgcagcgtttttcttccattgtactcattgatgtccggataatacacgacgtcgatctcccgccgtccggcgcgctcttcctcaaacgccgttccgtcaccgaaatatagcgcctcgatcgcgtgtccgtctgtctcttccaacgtcatttttacgacattccggttgcgccccagcacgcggcttgcccggatgcggagtgatttctctgcaaacagcggtttttcgttaccctgtccaaacggttcgagacaggaaagctctctcacaagccgttctgtcacatatcccaccggcatcggcacatcgatccagactttcgctttaaaatcttcctccgtcagccccgcattttcattcagtctgcgccggaactcgtcaatgttcttctcttccagcgaaagcccggctgccagcggatgcccgccaaatttgagcagcagatcgctgacctctgtcagctttttaaacatatggtactcatcaatggaacgtcccgagcctttgaccgcctcctcgccgcgcgtcagcacgatcgccggcttctgataatattccctcaggcgccctgcaataatgcccgccagcgattcatggcattccggcagaaagaccaccagcaccttgtccttctggtaccagctctctacctgcagcttcgccgcctcagtcccctgctcggtcatatccttgcgggtatcatttaattccttaagttcctctgccaggcgttccgcctcttcctcactctgcgcccgcagaagcgccagcgcttcctttgccgtttttaatcgtccgcccgcattcaggcacggtccaatgacaaatccgatatggtatgctgtgatcgcccccagatcaagattatttttctccgccagtctgcgaagccctagatttttggtctgcgccatctttttaagaccgtattttaccagaatccggttctcatcctgcagcttcatcacatcaccgaccgtcgcaatcgcggcaaattcaagcaaatccagccattccatctgcggcacgccccggcgggcatataaaacctgcaccagcttgtacgccaccactgcgccgcagatctccggaaatgggtacggacagtctgcctgtttcggatcgatcaccgcatccgccggtggaatcttctctttttccccatctaagggcacctcatgatgatccgtgatgacaaccgtcatgccatatttcttcgccagctccacctgatggaacgcggaaataccattgtcacaagtcagaatcacctccacgccgtccgcgtgcgcctgttcgatgatcgattcattgattccgtagccatccttgatgcgatccggtatctcaaaatctacatcactgcccagccgttcaaatgcctgcaataatatgtacgtcgaacagacgccgtcaatatcataatcaccgacgatccgtatcttctttccagtatccacagcctcgcacaggatggaaacggcatgctccatatcttttaacagcatcggatcatacagatcatccagcgtgccatttaaatagcggtcgatcgccgcctctccttcaatcccacgattccggataatacgcgccgtaaccggatcgatccgaaaccgcgccccgatctgcttaaaatctgctttcttggtctgaagcatccagacttcttctgccattttgttcctcctattatctagatgtactctcggagtcttttttgcacttgcttttgtggctgattttccgccagccgcacccgaatttcagaggcggacgcaacgccaacgcctcagaaatttgggcacaactgacaaaaaatcatctcacaaaatcaagcacagaaaaattccgagagtacatctatgtctgtgcttcttttctatatcacatactccctaagccgcctgcgccgttcccgccagtccggcagtatattctccacatgcgtccagaaacgcgcggaatggttcatttccagccggtgtgccagctcatggacaatcacataattcatcagatcctccggcaaaagtgccagccgccagttaaaatttaggtttccagctgcgctgcagcttccccaacgcgttttctggttccggattgtgatttttccataggttacgcccatgcacgccgcatataaagcaacccggtgcatgagcaccgggcgcagcttttctgtgaaatttcggatttcttccgctccatatgttttccggttcctctggcgttccaccgcttctttataatggacttctatccagtcgcggtgctcctcggcaaaccgcatcgcagcctgcaccgaagccctcctcggaatccggagtaccaggcgtccttccgccgtgatctggatggcgatcgtcttccgggaagaccgaaccacctcacatggaatcaatccttcttccggctcatcagataacggagaatgccatgggttttgtatcctcaagtattgcatacaatttcccgtctctttcatcgattgtgcgcgccgcatcttccagtgcgcgttccagacgtttttccagttctttcttctcatcatccgccgcttcatcccggattacttccaggcagtaatcatctgccaggcgggcagccagcatctgtaccagaccatccaatgtcttctccggtgtctccagaattttcttaaactccggatcctccggctgttcttctgtatccatctcatacggatcccgctcgttcatctcaatcacattcatccattccggtttttcatcggcattggtaaaattcatctgaccgaccaggcagtcgtaaatctctgcctcgctcgatatctgcttcatatctaactgaactaactgcatctcttctcctttccgctgtgtcagaatccgtgatgcatctcccagcttcttcccagcctttctattttattctgcccacttaaaacctacgcgttcagcagcgccaccgctgcaaaaaacggcaccagccatttagcgacagaaccaatttttatcagatattctgttttcataattcctccacgcggtctttcatagaaaccgcaaagctatctgccttgatagggacagccctattattatatcggtcatgcggtaaaaagtcaattccgggctgtcgtaaacggaataaagaatgtgctcagggttacggttcgcacacgtgtgcccatcaacgggattttgccgatactgcacattctaaatcgacaaaatctgctgccagaactgtatcgtacggaattttcagttcagaaaattcctacctgtgaacagttgctgccttaacacattctcgcgccgagcgcgtcgcttgcgacaacctgcatcttcgcgcaagtgcacatcattggcacgttagtgcctttttgtgtaataggaaattccttggaattccctattatacaaaaaaagcaccctcaaaaggatgctttttgctctctgacaaccagagaaatcgacgtgcgtgagaagattcgaactcccgacaccttggtccgtagccaagtgctctatccagctgagctacacacacatactttttattcttaacgaacaagtcatattatacaactcattctgaagaatgtcaactgttttttagatttttttgaatttcttttattgttgattcatttcaaattatatcgatataacaaccagaaattcttcttactttccaacaatgaaatggggcctacagggctcgaacctgtgaccctctgcttgtaaggcagatgctctcccagctgagctaagaccccattacgatactctgtccctcaatccgcttacgcgaaccaatttataacagtcgtatcaaaacgacccggatggggttcgaacccacgacctccgccgtgacagggcggcgctctaaccagctgagccaccgggccaaatattaaattatttatttacctcatattgggtagagtggaccttcggggactcgaacccgggaccgaccggttatgagccggttgctctaaccaactgagctaaaggtccataaagtatatggatcaaaaaactccccgagtaggactcgaacctacgacagcgcggttaacagccgcgtgctctaccgactgagctatcgaggaatattgctttccaacaacgtagataagtataaccgattatattttaaatgtcaactactttttcaaaaaaatcgaaaaatctattcttttcatcggatgttaccgtcttctcgctgcatgagcagcatgacgcatccttaaatttcgggttcagaactcatataatcttggcaaaaaatgtaccttggcacattctcacgccgagcgcggtcgcttgcgacatgtttctgcttcgcgcgagtgcgcatcattggcacgttagtgcctttttgtg

SEQ ID NO: 11078 - DNA, 197 bp, Unknown
  gut microbiota DNA sequence
ttattacacaaaaaaccgtcgtacatttctgtacaacggtcttctttatataccttcaaaactgcacactgaatttcttctactttctatcttccatcctttaggaaataacttcctctttcctatccaattcttaaccatatccttttggttaagccctcgaccgattagtaacagtcagcttcacgtattactac

SEQ ID NO: 11079 - DNA, 1584 bp, Unknown
  gut microbiota DNA sequence
cgaggatacgtagaggcgcctcctcacgggatttactcagggtgaatccattcaggtccagtataatatttttgctgatctcgataggctctgcgttctcgatcgccaaaggcccccgcagagtgatcgtgtcaccgtccttcgcggcagtcagcgcgttttccagactggtgtatcgtgtgccgccgatttcaaatgcctccaccagcgcatggcagaaggtgcagtaaccatccttgtccaccttgcccacatggtcgcagattctgccgcaggcacatttgccgttctgatattggtcggtatgcgcgaccaccttgaccgctctattagcaatatctacattggaaacgttcaaaatttcgtcgctatcagcgtctgcaaaggcatatccgtccgccagcagagccagggccggctcaccaagttctacattgattccacgttggaacgtgccgccctggagctgggttttcccgaggaaattcacctgacgctcaaacacgcagtcgccctttaccgtcagggtaaacaggttattaacgagaccccggcctattgtaacgctgtctaatatcaataccgtggggcctttggtggcaatgacctctccaatgccctctatcgtgccgtttttgatggtgacgctgttgtacgggcaatcttgcaaatccagcgccttgaccttgtggccctgcaggtccagcgtaaggtcctttttgttggtcccatcacctcctcccgcacgcaagattgcgtcaatatcccgcacaaaataaaaggttccgccggaaatcagcctgctcccaaccatggcctgattgttcccgagttcagacgaataggggataccatcttcgtcaataaagagcacttccttgcgacacggttcgccgcactgttggcatttgccatcgtgggtgtattttgcatgggtgcaggtgttaatggtaacggtgacagtttttgtatctacggtatagttattataggacagcttgcagtagacctggccgctgtactcccagtccctgccctccactggggtcaggttggacttggtcaggacgattttattataactgccgctgcctgtgccctgaaattcttttccgttcacataccactgataggtaatattaccggactgaccgcttgccagagaggcgctgacatcgacaaccgctacactttccccatctaatttctcatatacgacctgcggctgcgttcttatggtaatggggtttttgggcgcggcggcgacggtgaccgttgcggtggcggtcgccttgttaggattggttccttctacgccgtctgcggtcagcttcagcttatagcggccctccttgacattgttgtccgcggtaacggtgatggtcgcgccgttatcggacttttggaacgccagaccggtgtgctcgcccacccattccacgttcagggtattcatctggaccttgctgccggtcacggagaaggtcgccgtctgactgcctgagctttcctgtatggttccctgctgcgcgccgacaatcaggcttgcgcggggccccatcttggcgatatagatggtcttga

SEQ ID NO: 11080 - DNA, 898 bp, Unknown
  gut microbiota DNA sequence
ttctccgcaggccgcgcctgcgtgtggatatatttgctggatacgaatttggaaaaaggagaattgaagatgaaagacaagatctttggcgtgctgcagcgcgtgggacgcagctttatgctgcccattgcactgctgcctgtagcgggcctgctgctgggtatcggcagctcgttcaccaacgaaaccatgctggcggcctatggcctgaacagcgtcatccaccccggtaccctgatctacaccattctggacgtgatgagccagaccggcagcgccgtgttcaacaatctggccctgctgttcgccatgggcgtggccatcggcatggcccgcaaggaaaaagaggtggccgccctgtccggcgcagtggcctatatcattatgaatacagccattcaggccatgatcaatgcggcaggcggcgtagaagcaatgcccgccaactccaccaccaccatgctgggcatcacgaccctgcaaatgggtgtgttcggcggcatcgtggtcggtctgggcgtggcggcgctgcacaacaagttctataagatcgagctgccgcaggtgctggccttcttcggcggcacccgcttcgtgcccatcgtcagctccatcgtgtatctggtggtcggcattgccatgttctatatctggccggtggtgcagagcggtattgccgcgctgggcgcactggtgctggcttccggctacgcaggcacctttatttacggcctgctggagcgtgcgctgatcccctttggactgcatcatgtgttctatatgccgttctggcagaccgctgtgggcggcaccgccatcatcgatggcgtcaccgtgaccggcgcacagaacatcttctttgccgagctggcttccaagtccaccacggtgttctcgg

SEQ ID NO: 11081 - DNA, 563 bp, Unknown
  gut microbiota DNA sequence
tgatggcgtcaccgtgaccggcgcacagaacatcttctttgccgagctggcttccaagtccaccacggtgttctcggtcagcgctacccgtttcatggccggtaagttcccctttatgatgttcggtctgcccggcgcagcgctggcgatgtaccagtgcgccaagccggaaaagaaaaaggcggcaggcggcctgctgctgtctgctgcgttgacggctttcctcaccggcatcaccgagccgctggaatttacctttatctttgtggcactgcccatgtacgcggtgcactgcgtgctggccggtctgtccttcatgctgatgcatattctgaatgtgggcgtgggcatgaccttctccggcggtcttatcgacctggtgctgttcggtgtgatgcagggcaacgccaagacccactgggtgtgggtggttgtggtcggtgcggtgtattttgtactgtactacatcattttccgctttatgatttccaagtttgactacaagaccccgggccgcgatgatgccgaggaagtcaagctgtacacccgtgcggacgtgaacg

SEQ ID NO: 11082 - DNA, 263 bp, Unknown
  gut microbiota DNA sequence
gaaaagagcggggcatgtatataacggatggagtaagatataatgcggatgcagtaggagcatttaatatcctgcgtaaatatctttccgtatccggaaaacagaaagaactgtccgtaaccggactaaagaatccagaaataataaaagtagctgtatagccgaaaggtaagcagtagtggtgtcatggacgcaccctgaaaaaaggcggtatcccgccagatttcagatgctctggtaacttagttaccgagtagttcaca

SEQ ID NO: 11083 - DNA, 184 bp, Unknown
  gut microbiota DNA sequence
tattcaagtcgaacgtccgtgagacttggcgcgtgattctggtcagcgtaagctgacatattctttacagaatcactgcgcatcctcgcggagcgtttatctcagtcggagacaaggcttccactgagacaaatttgctattactcaccacctgaagaggtgggagtcttctcgactgagataa

SEQ ID NO: 11084 - DNA, 425 bp, Unknown
  gut microbiota DNA sequence
ctacttctgaatacaatctataatgataaaatcataaaattcccttaatctctcaataagtgacctcataatcagttccttgctcattgcgtttaccaaagatacctcaatcgctgataattctatattggccggtatcagatccacaccttccttatgatgaaggattgttttttccatgttcagtttttcatcattcacaatatttagcatcagcgttgcaagagaatactccatttcatccggttcctcataccctaaactaattgtgagactgccctgcggatctgcatctatcagaagaacctttttcccttcctgtgccagtccgattcctaaattcacgcacgataccgtctttccaactccacctttttgatttgatactgctatgcacctgcttcgcactgtcaccacaaagttct

SEQ ID NO: 11085 - DNA, 110974 bp, Unknown
  gut microbiota DNA sequence
atgcccgtagagcctataaaataaggctttgcggacatttaagaagatataaaaagatagtcaaaaagacatatataatttacataaatttttacataaatcgcctcctgcattttacagaccatctttaagatagaatctggacacagcacaagtgatttgacagaagagaagcgcggcaaaggactcccgatcacgattttgacatagatggctggttccaaggtaagagagactgggagatgggacaccgcagcaggaggagaacgaatgaaggtaagtatgagacgtctgatggcgcttgcgatggcaggcacgatgacattgatggcaggatgcagccaggcatccagctcggcgacaggaagcagcgacacacagatcgcgtccggagagagcggggcagagaagacggcatccggcgataaaacggtgattgaatactggcactgtaacgcagaaacccagggaggtctggtcgtagacgatctggtaaagaaatttaatgaggaaaatgaccacatcgaggtagtagcgaaatacaacccggatatgtacaaaggtctgatgcagaacctgcaggcggaagcggcgaccggaaatacaccggcgcttgttcagattggctgggcatttctggattatttctccaataactttgactatgtggcgccgcaggatgcgattgataaattcgacagcgaggatgcaaatttcttaaccgacaatttccttccaaatgtcttagacctggcagtcaacagcaacggcgagcaggtcggaatcccgtactccttaagcagcccggttctctacattaataaagatctcttaaaagaagcgggcctttccgaagatggaccggagacctggcaggaagtacaggaatttgccgaggcagtcaaagagaagacaggaaaatatggtttctatatgcaggaaccggcagacttctgggcgcagcaggcattggttgagagcgcgggagcggatatgttgactgcggatgcatccggcaagaaaaaagcaagctttgcaaccgaggacggcattgcggcaatgcaaatgatgcaggatatggtaaaagatggttctgcccttcatgtttcatgggaagagggctgccagagctttatcgacggcaactgcgcgatgctttacaccaccattgcgagacgcgcttccgtacagaagggggcacagtttgacgtagcaactgtgaaatccccgctgtggaacgacaaggagcgcaaggttccggcaggcggctgtttcttagccatcaccgcgcagagcgacgagcagattcaggcggcatgggagtttgaaaagtatctttacagcgtagaatcaatggcagcatggaccgagggaaccggttatgtaccgccgagaaaagatgtggcagaggcagaaaatggattgaaagattttctggctgagaacacaatgatgaatgcagcgattgagcagatggacggcgttgtatcatggaccgcattcccgggcgatgcaggccttgaggcagagcagcttcttctggatatgagagaccagattctgggcggtcaggtatctgcgaaagatggtatgacgagcacacaggatgcgatcaaccagctgctggatgcacagtagggacaggcagcctgacgcttggaacagctttcgggtggcagaaaaatcattacaaaatttaggacagaaatgagaatggggttgttgcggaatagcagaacgtgttttggcagaatggactgcgtgcagataagacgcaggaagcggccggagcgcgaaagagctgtttggcggcagccccttcataaaatgcaggctcagggtctttccaacacctgctgttgtggctgggcaggcgccgaaagattccgatagtacattagaatggaggaaatagtttgaatcgggaggacaaaaaacaggcagcgcttggatatgtttttttgctgccgtcgctcgtcatgtttgcggtatttatgttttatccgcttttttacacgctgtatttgagtttttttgagtggaacatggtaaagccggtcaagaagtttgtgggactggggaattatatttccgttttgaaggatccgaatacatggaaaatctttggcaatacattctggtacatcgtgattcttctggtgtttaactttgtgatgccgtacattttatcattcattctttcgtgcgtcatcaaaaagggacagagtttttacaaggcggtttttttcctgccgagtgtgatttcgctggtcgtcggctcgattctgtatacatggattctgaatccgatttcgggtccggtcgcgattgtggcaggctggtttgggctgaaactgccgttttggtcgaaaacggagggctgggtcatcgcggtactgtgcattatcacgacctggaagacgtttggctacaatttcatcaacattctggcgggcgtctccggtgtctcaatggaggtcatcgaggcggcgcgtctggaaaatgtgccgatgtggaagatttttaaggatatcgtcgtgccgatgagttctgcaactgggatctatgtgtttattacgacgatcgtgcagggactccagtatgtgttcacgccgatcaaggtcgtcacacagggaggaccgaactatgccagctcgaacctgatttatatgtcgtaccatgaggcgtttacactctataaaacaggaacttcctcggcggtatcggtcatgacgatggcactctttatcattcttttggtgctggaattccggtttgtagaaaagggggtttactatgaaaactaaagacagacagatcggctggcatctgtttctggtggtggtcgttttcctccttcttatgccgatcgtatttgcaatttccaactctttcaagacgatgcaggaggcgttcaacacagtttttcaggtgattccgctgcatccgacgctggaaaattaccggcatgtatttgacaaactgccgtttgtgaaaatcacgctgaatacgtttctgattgcatcgacggtcacgatttttaagacaatcacgggacttctggcggcgtatgcgttcgtctatttccggtttaagggaaaaggatttttgtattttattatgttaagcacgctgttcatcccgtttacggtcacgatgattccaaattatcttctgatctctaagatcggtctgcgcgatcgcatctggggcgtcgcactgccgcagctggcggatgtgctgggaattttcctgctgcgccaggcaatgcgtggaatcccgctggcactcattgaggcggcgcggatggaaaatatccggcacatgaaaatcatgcgcgacattgtgattccgctggtgcgtccgtccatcatttccaccggcatcattttctttatcaattcgtggaatgaatatgtgtggccggtgctgatcttaaaatccaaggaaaattatacgctgtcgctggcattgcagatgtacatcagtgccgagggcggtacggaatttacgatcgcgatggcggtgtcggtgctcacgatgctgattccgctggtactgtatatcattttccagcgctatatcgtcaatacatttgcggcgtctggattgaagggataacgggagattgcgctggacataagaaagggatagattaattcgatgaaaaatattgtatttgaaaatgttaaaaaagcgtatggcaaaaatgtggtcgtggaggacctctgcatggaggtaaaggagggcgaacgcctgattttattaggtccgtccggctgtggaaaatcgacgacacttcgcatgattgcgggactggaaaatgtgactgccggaaacctatggatgcgcgaccaggtggtaaatgatgtgccgtgcggcgagcgcggtgtctcgatggtgtttcaaaactatgcgctgtttccgcatatgagcgtcaagaataatatcatatatggtttaaaagcgcacaagatggatgagaacgagatcaatgcgcgcttaaaagaagtcctcaaaatgctggaattggaagggctggaggatcggaagccgaaggagctttccggcggacagcgccagagagtggcattggcgagagccgtggtaaagcgcgccgactatttccttctggacgagccgctgtcaaacctggatgcacagcttaggatgcgtgcgagaaaagaactggtaaaaatccatgaaatgtaccacccgacgttagtctatgttacgcacgaccagatcgaggcgatgacggttggcgatcggatcgcgctcatgtaccggggcaagatggaaatgctcgataccccgtcacacgtgtacaatcgtccggcaagcgtgttctgtgcgaagtttatcggttcgccgtccatgaatatcgtggaggcggaatatcataacggggcgcttgtcatcgggaaacagaaggtagaacttccgggtatctggcagcggatcgccgcgcagtgcccgtcgggactgctgtacgccggtgtccgcccggaacacgtgatgatgagccgcaccccgcaggagcggtcgatcgagggcgtggtccgttacgtggaggattacggaaaccggtacggtgtttatattcaggttgagggagacaagaacgagctgattgccatccgcgagggcgagattccgcagccgggtgagaaggtatacatccatgtggagacggaaaagctgcatctgtttgaacgcgggacggagaaatcgctcggttacccggagatggtgatccgcgcacaggaaaagctggcggtgccgaaattggaaaaggcgatcgcccagtaagaatagagataatagagcgaaaaaagtgttttcaaaacaagattctgaacgtatattttgaagaggagacatgcaatcatgagaaaaattcttatcagtactaatatgtataaaggcagcgagttcggtcaggttcttccgtacctcaaacggtttccgggacaggtgggagtcgaggtgttcccgatgtttcatgaggaatgctttgagaagaacctgcgggacgccatgccgctcttaaaggaagtcccggtcagtttccatggtccatattatcaggcagagcattcggcagcggaggggactgtagagtatgcgcgcacgatggagctgcttgaaaagacgctttcgtatgcgaaagagctttcaagcaaatatctcgtttatcatcacaacaactgccgcatcataccgggcgagaaggaagaccgcgtccgcgtttcctgtgaaaattattacaccgtgaaacagctgtgtgaggaggcgggaacccaggtggtcgtggagaatgccggagttctggagcgcggaaaccgtctcttcgatgagcaggaatttatcgatctgtgccgccgggaacagtatgcagtgcttatcgacatcgggcacgcctgggcgaacggctggtcgcttaagcgggtcgtaaacgcgctggcggaccagattgtggcgtaccatctccacaacaacgacggtgtccacgacagccatcagaggattcatgagggaacacttgattttgacggcttcttaaaactggcaaagcaggcgacgccggatgccgagtgggtcatggagtatgcgatggatgtttctggaaatgtgcgggggattgaggacgatctgcagtttcttttgaaaatgggaagtgctgcacgatgacacagtggcagtggattttgccgaaaagccccgccttgtcaactcttaaaaaagctgatatactggacataagattgtgagaaaagatgtccggagagaacatccggacacggtaaaaatgaaatttgacagcgggaaaggaacggcaggatgtttcgtctttggggaaaaatgatgaaggaaaaccggatgcttagggatattgtgatcagcaacggtgattatacaatgtcgagaacggcgatggtgtttgacgcgatcgaccagatttgctatgcctttgatctggggcatccggtctggctggataagacgatcgaggagttcaaacgccacgataaggcgcgttttacccaggacaactttatcgagagcatcgatttcgattatctggagatacaggtgctggaagaataaagggcaggcagccgttacaaaaagacaaagaccgggaggggcgagatggcacaggcgataacggatgtgaaaacatttctggaagacgccagacaggcagtggtggagctggcggagtttgaaaaacaggaggagacgcttgctcaggaagagaaaaagcgtctgcgcgtgctggagacggagcggaaagcggtggcggatgccgtgaattcgaccgtgaaaaagcgccgggatgagattgaaaaaagctatgacgatgagcttgggaagctgcaggataagctgaaacgcacgcggacacgccgcgaaaaggcgaaaaaccagggcatcaaggagcggattaaggaagaaacgcaggagcttcacgcgcacaaccgagagcttgccgtgcggatgcggacgctgttccagtcggatcgtgttccatttgtctgcaaaagcccactgtactatgcgctgtatttcccgaggggattcaaagaatttctgacggtgttgattacctttgcgatctgtttcctgttgatcccgtgcggcatctacaagctgcttccagaacagaagactttatacctggcgatgatctacggcgtggatgtggttgtttttggcggactgtatatcctgattggaaactggacgaaggatcgccatctggcgacgctgcaggaaggacgttcgatccgcagtctgatcgcggcgaacaaccgcaagatcgcggtgatcacctcctcgatccgtcgggatcgcagtgaagcgctctacgatctggaaaaatacgacgatgagatctcccagatggagcaggatctggaggagacggcgaagaagaaaaaggacgcattaaacaccttcgaaaatgtgacaaaaaccatcctgaccgatgagatcaccagcaacagccgtgcaaagctcgaacaactcaaagaaggtcatcaggaggtcgagagccgcctgcactataccgagacggtaatcaaggaaaagagaatctttatcacagatacctacgagtgctacttaggcaaggaatttctgaatccagaaaagttggacgcgctgaaacatattctggataacagcacagccgttaatttaagcgaggtcatcgcagagtaccgcgaacgcggcggaaagtaagccgcggaatttatttcataaaaataaataattagatataagaacaaccagaaaaaagatgtgacacggggcggctttggcagcacccggtgtcacatcttttttcatccgggatcaattctcttcattttcgcataatttcctgccacccagcctataataaaggtaaaacaacccctgtccaacaggcagggagaaaacagggcggtgtgggagatgaacagacggggacgcagccggttcggtggcagtccggagatatattattacaattcagcccgccgggacgcggtgggagagctggcagggcagttaagtgggctgattcaggaagaaatgacccgaaggcataaaaagaaactggttttcctctgcatcggcacggatcgctcgaccggagacagtctgggaccgttgatcggatataaactcaaacaggaacggcggcgcggtacgctggtatttggaacacttgatcgccccgtgcacgcgatgaacctggaacattacgtgcaggttttaaaaaatgggtacccggatgcgctggtggtggcggtcgatgcctcggttggagatgaaaaccatatcggctatgtcacgctggggcgcgggtctttaaagccggggcttggcgtctgcaaggagcttcacgcggtcggagatctctttatcaccgggatcgtggcgggctgcagccattacgatccgatgatgctgcagagtatccgcctggcactcgtcatgcagctggcagactgcatcagcgcggggatcgggcttgtcgaaaatttttgcctggatgcggcctccgtttgacaaattttgcatgcaatcggcgttatgataggcggaaagaaattcatcatactcctgaaattacggaaaatcatgttactgtatttgagctggtattttcagcactgaaaatgctgcgcggtgcagcaatcaaatcatggaagcaagtacagacccggtttcaggagaatctatcatagcggggtgaacatatgggagaatattctggttcccgcgcagaactgccgaaaaatatccggcagatcggcgagcgggatgaggtggtccggttgtatgtggaggattatgtaaacacgtatttgaaacaggtatatccatccggcggaccgggactccgggtcgggctgttgctcggaaattcggatccacagcaggaggttccgtgcctctttgtggacggggcgctggagatggaggaggttgtgccgtccggggagaagattgtcttttcggaggcggcatggaaaaaggcataccagcggatggaggagacatttccaaaaaagaccgtgcaggggtggtttatctgcggcgcgccggggtgtatgttaagtcccctgacctactggcggctgcacaagcagtatttcggtgggaaaaaccagctcatgtacataaatagcggtgtggacggtgaggcggcatactatgtgatgtcggaggacgggttttaccgtttgaaaggatatcatatatattacgagaaaaaccagatgatgcaggactatatgattctgcggaaggacgcccgccgggtggagacaggcaccggcgatcgggtgatccgcgatttccgtaaccggatggaagagcggcagcaggaggcggcgtcgcgttacgggacgatccgggcgctggggacgctgtgcggcgtgctttcggtcgcggtgcttgccggcggcgtggtgcttttcggcaattaccagaaaatgcgcgagatggagagtgtgctggtatccgtccttccggatggtgtgcggggcactgcggacgggaaagaggcggtcacggtggaacagctccgcggcagtgtgacgccgcttgagagcggcgaggccggcgcggatgtggatgcagacggaacaacagcgcaaaacggaggacaggcgcataaatggacacttgagagcgcggcggatggagacacagagggcactgccatagcaggcagacagaatggacaggcttccggcgggcagagcgaagaggacggaaaaatggcggagacgaaagccccgtacattttgccggagccggaggcacagcgcgacctgccgaatccgggcggcaattcgacggcgggacaggactatccggtcacaaacttgaagcccggcggcacgtacacggtcggggacggggagacgctctatgggatctgttttaagctttatggcaatatccgtcatctggacgatatccttgcggtcaaccatctgaccgatgaaaaccgcattatcgcagggcagacgctggtgctgccggatgtgtccggagaatagcaaaaagataatgccaaaccatctaaaatagtgtataatcaagatggcagtccagctacaggagataaaaaaatgagtgagatgaacccgattgaacgggaacagaagaaaaagcagctgagagggcgtgtgatcgacaccgccacgcaggacatgtttccacgccggggcataagccacggggaaaatgaggaagaggtggcggagaaagccgagcgccattccagacggaaacgtctccgcagggtgctgacggcggtgttaatcgcggcgcttttggcggctggttttatgtattataaagataaccatgcctacacggactatacggtggcgtgggaaaaagagattgcggcgagtgagagcagcacgacggaatttgtcccgtttggggaaaatgtcctgaaatacacgaaggacggagcttcctatctggacaagtccggcaaggcggtctggtcgatgagttatgagctgaaatcaccgatctgctatgtcaacggcgattatgccgtgatcggggaccagcagggcaatgatatttatattgtggacaagaccggaagccagggacaggcgacgacgcttctgccgatcctgcgcgtcagcgtatcggcatacggcatcgtggcggcgctggtggaggacagcaatgcttcgtatgtgacctttttcaagaaagacggcagcgagcttgactgggcgatcaagacggttatgtcgggaaatggttacctgatggatgtttccttatcgccggatggtacgcaggtcatgctttccgacctgtatctgcaggacggggcactcaaaaaccggattgtattttacaatttctccgaatatggaaagaattatccagaccgtctggtcggaggttttgatgagctgggagacagcatctgtccgcgcgtccggttcctcgacgaggatcacgcgtgtgcatttgcggatgatcaggtggcatttttctctttggaaaatgtaacaagcccggcgctggtgcgccaggcggagatcgacggggaagtccgcggcgtggcatggtcgaaggactatgtggcggtcatctcggacaacaccgagggcggaagtgagagccgtttgagcatgtttaaatccgatggaaccgctatgggtacggcagatttctcgtattcgtggcgtaacataaatatacagggcgatttcgtcatcctaaataacgaaaattcctgtcgggtctacagtctgtccggcaaggagcggtttgccggggagtttgatttctctgtggcgcaggtaacacgcggccgcgcgtttaattcattgattatcagcggcggcgaccggatgcgcgagatccgcctcaaataacacacgtttagtttttaaaattaagatacatagcaggaggttacttatgaatcagattgacacattatccgtaaacgcgatccggattttatccgcagacgcaatccagaaggcaaattccggtcatccgggacttccgctgggatgtgcagcagcggcttatgaactgtgggcacatcatatgaaccataacccagctaacccgaagtgggagaacagagaccgtttcatcttatccggcggtcatggttccatgctgctgtactctctgctgcacctgtttggctacggaaatctttccaaagaagatctgatgaacttccgccagttagattccaagactccgggacatccggaatatggtcataccgttggcgttgaggcgacgaccggtccgctgggcgcaggtatgggtatggcagtcggcatggcgatggctgaggcacatctggaaagcgtattcaacaaagaaaattatccggtagttgaccattacacctatgtattgggcggcgacggatgtatgatggaaggcatttcctctgaggcattctctctggcaggtaccctgggactttccaagctgattgttctctatgattccaaccgcatctccatcgagggaagcaccgacatcgcattccgtgagaatgtacaggagcgtatgcaggcatttggtttccagacgatcactgtagaagacggcaatgatatcgacgcgatcggcaaggcgatcgaggctgcaaaggcagataccgagcatccgtcctttatcaccatcaagacgcagatcggcttcggctgcccggcaaaacagggcaaggcgagcgcacacggcgagccgctgggcgtggagaatgtggaagcactcagaaagaacttaaactggccgagcgaagagccgttcttcgtaccggaaaaggtatacaaaaactactccgagatcgcagagcagaaggcagaggtagaagctgcatggaacgtgatgtttgccgcttactgcgaggaatatccggagatggaagcgctctggaaccagtatcacaatgcaaaggcgggcgaggcgctgaaagatgacgccggattctgggcaaaacaggagaaaccggaagcaagccgtgcgatctccggacgcctgatcaactacatcaaggatgttttgccgaacctgtttggcggttctgctgacctagcaccgtccaacaagaccaacatgaaggatgcgggcgacttctccaaggaggacagagctgggcgtaacctgcacttcggtgtccgcgaacttgcgatggcagcgatcggaaatggcatcatgctgcacggcggtctgcgtgcgtatgtatcgaccttctttgtattcagtgattactgcaaaccgatggcaagactgtctgcactgatgggcgtgccgctgacctatgtatttacgcatgacagcatcggcgttggcgaggatggaccgacccatgagccgatcgagcagatggcagcgctgcgtgcgatgccgaacttccatgtattccgtccgtgcgatgcgactgagacagaggcagcttggtacagtgcagttacttccgagcacacaccgaccgcactggttctgaccagacagaatctggagccgatggcaggcagcagccgtgaggcattaaagggcggctacatcatcgacgactgcgagggcacaccggagttaatcctgattgccagcggttccgaggtggctctggcggttcatgcaaaagagaccctggcagcagaaggtcagaaagtccgcgttgtctccatgccgtgtatggatctgttcgaggagcagagcgaggagtacaaggagtccgtacttccgagagaagtacgccgccgtgtagcagtagaggcgcttggaagctttggctgggacaagtacaccggcttagacggcaagatcatcgcgatggaacgtttcggcgccagcgcaccggcagggcttctgttcaagaagttcggctttaccgttgagcatgtggtagaggtggctaagagcctgaaataatgctgattttgaaagaaaaataagataaaagacaggcacctgtctgtcggcagaaaagaaagcggtatcgcttaagcagaaatgcgcctttctccggcaggcaggtgtattttgctttccaaaccttgcaaaacggggatgcattgcgtataataagagccagcgcagaaaaaagatgagggcatagaagaaaggctgccagtgcagccgtaagggaagggatccagacatggaaaaaaaatgtattgggatagacgtcggcggaacgacggttaagattggtatttttgagacggacggaacgcttgtttataagtgggaggttccgagccgcaaggaagagaatggggcgtacattcttccggatgtagccgcttcgatcaggaagaaattgaacgagcggggaattccgatggatgccgtgatcggcgcaggcatgggatttccgggaccggtgcagccggacggctatgtggaggtctgcgtcaacttaggatggcgcgatctgaacccgcagaagattttgagtgagttattagatggaatgccggtccgctccggtaatgatgctaatgtggcggcgctcggcgagatgtggcagggcggcggcaagggctgccatgatatcgtgatggtgacgctgggaaccggtgtcggcggcggcgtggtacacgatcagaagatcgttgcaggacgccacggactgggcggcgagatcggtcatatccatatccgcgagggcgagaaagaaacctgcaactgcggcggacacggctgtctggaacaggtagcgtccgcgaccggtatcgccagggaggcgagacggaagatggcggcaaagccggatgcatcggtgatgcgtgcctacggtgatgcgatcaccgcaaaaaatgtgctggatgcggcaaaagccggggatgcactggcgctggaggttatggacaccgtgtgctattatctcggatgggcgctggcgaccatttcgatgaccgtggatccggagattttcgtcatcggaggcggcgtatccaaggcggggacttttttaacggattggattgaccgctattaccgcgaattgaccccgatctctgagaataagggcgaggttcgcctggcaacattgggaaatgatgcaggtatctatggggcggcgagactgatcttagattaggcgtaactgtgaaggtgctgaacagttacgattagacgccttgttttgagtgacagagtgcagggtaaaggggctggacgtttgaagaaaatagggatagaagaacgttcagatatgacgaaaaatgctgtagacaagaggagaccccggagcggtcaagcatccggggcaattatgaaaaatctatgtgcaaaatcactataaaacaaatttgaaaagtgaaatcttttatgcttttagtataaaaataagatatgaataaaatatgaacaccgtgtaaacagattatgaaaattggcgattttgtacaaaaaagtttcatgaatcagaggtttctctatcaaaacagaggatagaaagaaaaatggcagaatttgcagcgcacggtgcgaatcaggaggaaaaaatggcagcagaaaaagcaaagaaaacgattgtaattggacataaaaacccggatacggattcgatttgttctgcaatcggctatgcgaatttcaaaacacttcagacgggcggcgaatatgtaccgtgccgtgccggagaactgaacccggagacaaccttcgtactggattactttaaggtagatgtgccgaaactgattaaatccgtcaaaacgcaggtcaaggatattgagatccgcgagactccaggtgtttccaagaatatttccctgagaaaagcatggaacctgatgcaggaggacggtctggtaacacttccggctgttaccgataagaatatattggaaggtctgatcacagtcggcgatatcacccgttcttatatgaatgtatacgacagcagcattctttccaaggcatgcacccagtatgcaaatatcatcgagaccctggagggcgcgatttttgttggcgatgagaaagcgtactttgataaaggaaaagtcctgattgcggcagctaatccggatatgatggaatattatattgaagagaacgacctggttatcctcggcaaccgctatgagtcgcagctgtgcgcgatcgagatgggtgcaagctgtatcatcgtgtgtgagggcgctggcgtttccatgacgatcaaaaaactggcacaggagcgcggctgtaccgtcatcacaactccgtatgatacctacacggcagcccgtctcattaaccagagtatgccgatcagctatttcatgaagactgagaagctgatcaccttcgatacagatgatttcatcgatgatattaaggatgtgatggcaagcaagcgtttccgtcatttcccggtactcgataaagaaggcaaatacaaaggcctgatttcccgccgtaacttactgggtgcgcgcggcaagaacgtgattctggtcgatcacaatgagcgcggccaggcggtagacggcatcgagaatgccaatatcctggagctgattgaccaccatcgtctgggtactgtggagacagtcggaccggtcttcttccgtaaccagccgctcggctgtacggcaacaatcatcttccagatgtaccgcgaacaggggctggagatcgacaagaccatcgcaggtctgctctgcagtgcgatcatctccgatacgcttctgttccgttctccgacctgcacaccgatggatcgggcagcagcggtttctctggctgagatggcaggcatcaagctggatgagttagcaaaccagatgtttgaggcaggcagcgagttaaagggcaagagcgatgcagagattctgtatctggatttcaagaaattctcagctggaaagacaaacttcggcgtcggtcagatcaactccctgaatgcagaggagcttggaaagctgaagaaccgtatgctgccgtttatggagaaggcgcgtgaggacgaaggtctggatatgctcttcttcatgctgacgaatatcctgacggagacgaccgaacttctctgtgttggacagggggcggcacaggttgtggcagatgcgttccacgtaggtgatgcaaatgaagagctgaagcagacggcaacactgccgggcgttgtttccagaaagaaacagctgattccggcactgacagtgacactggagcagtaaatcaggtgacagtgcgcggacgggattgtttcatacggaaaatccagtgatagttcgtgcagggcaggaaggtcggacggaaaggaaggataccatgacatttgtatatccggcggtttttacgcctaagaaagatggaaaagggtatgatgcatatttcccggatttggagtgctgcgaggcggaaggtccggatctggaggatgcggtggaaaatgcgcgggaggcagcgtacaactggatcagcctggagctggaggaagagggcgatctgccggcacagacgcatatcgatgatatgagcctgccggaaggaagcatggtgaaacagatcatggtccggatcaaacttctcccggacaacgattaagaggatatagggatggcacagaagagagcggctggaaagccagaagagcgtcgccggggaggagcaaggcagaacccggaaggacagttgaaaaaacggatggagatccggaacactccgggaccgcgcgcccagtggaagccgggcaatatgatttatccggttccggcggtgctggtcacagtggcggactgcgaaggaaacagcaacatcatcacgattgcctggacgggcacgatctgtacgaacccgccgatggcgtacatttcggtgcgcccggagcgctattcttaccatatgctgcgggagagcggtgagtttgtcatcaacctggcgacggagtcgatggcgtatgcgaccgattactgcggcgtccgctccggcaggaatgtggataaatggaaggagacagggctcacaccggttccggcgcagacggtgaaggcgccggtgatcgccgaaagcccggtcgcgatcgagtgccgggtgaccgaagtcaaggaactggggtcacatcatatgtttctggcagaggtaacgggtgtcagcgtggacgagcagtggctcaacgagcgcggcagcctggagcttgcaaaggcggaaccgattgtgtattcgcatggcggctattatgggctttcagagcttcttggaacatttggatggagtgtaaagaaaaagaagaggtgccaaagatgaaaaataatgtaaccctgattggtatgccgtccgcaggaaagagcacggtcggagtgcttttagcaaagagactgggctattcctttatagatgtggatttgctgattcaggaacaggaaggtaagcgtctgcgcgagatcatcgaagaacagggactggatggatttctcgatgtggagaatcgcgtcaacgcgggggtggaagccgagcaggcggtcatcgcaccggggggcagcgtgatctacggaaaggaagcgatggaacatttaaaatccatcggactggttgtctatctgaaaattacttatgacgagctggtaaaacgcgtcggcgatgtcaaggaccgcggcgtggcgctgaaagacggcatgacacttctggatctctaccatgagaggatctcgtattttgagaaatacgcagacatcacgatcgacgaggaaggtaaagagctgggggcggtggttgatgagctgcgcgaaatattggaagagcgcggttatgtgctgggaagtgcgccggaggaagagtaacaatttcacatgagaatgggggcagccggttctgtcggacgggtttcataacgggttacagtgagaaaaaaatcagttgcaaaacagttgaaaatccaatacaatagaatagtaaccatttttatagaatgttaacagtcgggggtgcaaagatgcggaatcttttttgcatcccttttttgaaaggtgtgcgtatatgactacagtgaaatctctgtccagagagatgaaattctttcttctggcactgattccgatctatttcatttcagtggggctgattatacagccgtttgactccattgtgactggtatctatgaaatcataagggaaccggatttcctgatcaccgattatattgcggtcggcggcatgggagccgcgtttgtcaatgccgggatgatggcgcttatcagcatctactttgtctatagtcttgggatggagatggacgggcatacgatcacatcctgctgtctgatgtttggattctctttgttcggaaaaaatctgatgaatatctgggcgatttttctgggtgtatttctctatgcaaaatatcataaaatgcacttatccaactatatttatgtcggcatctacggaacaagcctgtctccgatcatcacacagctgatgcacgtggtggaactgccgctctggcagcgcttctgtgtgacgattctggtgggaatctgtatcggattcgtgcttccgccgctctcgacgcattcccactatgcccataagggatattccctttataatgtgggatttgcctctggtatcattgcgacggtcctggtctccacgtttaagtcctttggaattgagacggaggcgcgtcttatctggtcctccggcaatgatgcgatgcttttagggctgctatttgtcctgtttgcaggcatgtcggtggtggcagtgctgtggcgcggaaaagatacgcttttagggtatgaaaaactccttgcgacaacgggaatcggcggtaccgattacctgctggaattgggcggtgcggtgacgcttctcaacatgggactcaatggtctgtttgcgaccttctttgtgctggcagtcggcggaaacctaaatggaccgacgatcggcggaatctttaccatcgttggattcagtgcgactggaaaacatttgcggaatattttcccgatcatggcgggcgtctgcattgcgagtaccgtccgggcgtgggatatcacgaatccgtcggcacttctggcgctgctcttttccacgacgttggcgccgatcgccggagagtttggaattttatgcggcgtgttagccggttttctgcacgcgtcggtggcgctcaatgtcgggatcgtgtatgggggcatgaacctctataacaatggatttgcgggcggtatcgtcgcaatgttcctggtgccggtgatccagtcgatccgcgaccggagggcgcgggcgaagggagatctgtcgctgtaagatttcctctttttaatggaatcttaacacgaaagaggcatagagatattgtatcattataaaaacaccacatttatgatacctactaaacatagaaaggaatgatacatatttcaacttcatttgcgcttctggtcgtagcgattattatccttgtctgcatcgcgggaagccgtctttcggggcggctgggggtgccgacgttgtttatttttattatgctgggaatgctgtttggatcggacggtatttttaagattccattcggcaattttgcactggcggaacaggtctgctcggtggcactgatttttatcatgttttacggcgggttcggcacgcgctggagtgaggcgaagccggtcgcggggcggtcgattttgttatcctcggtgggtgtagtgctgacggcgcttttgaccggcctgttctgtcatctggtgcttaagatggcactgatggaaggaatgcttctcggcgcagttcttggatcgaccgatgcggcatccgtgttctcgatcctgcgttcgcgcaagctgaacctcaaatacggcacggcatccatgctggagttagagagcggaagcaacgacccgtttgcgtacatgatgacggtgattctgctgtctgcgatgacggggagtgtgagcggcggttcggcggttctgcttttgatccgccagctcgcattcgggcttttgaccggcgcggcgatcgcgtttctggtgacatggcttttaaagcggtatgccttttatggcgagggatttgacacgatctttgtctttgcggcggcaatcatttcctacgcgcttgcatcccagattggcggaaatggctacttaagcgtgtatctgaccggtattatccttggaaatcaggatctgaaaaaccagaaagcgctggtcggcttctttgatgcgtttaccggcatgatgcagatgcttctgtttttcctactgggacttctggcgtttccctcgcagatgccgtcgatcgtacttccgtcgatcgcaatcgcattgtttttaacatttgtggcgcgtccggcggcggttggcttgctgctcgcaccgtcgaaaccgccgatcgggcagtatctggttatttcctgggcgggtctgcgcggtgcggcatcaatcgtatttgcgatcatggcgacgctcagtgagggatatatgaaatatgatatattccacattgtgttctgcgttgttttattttccatcatttttcagggttcgctgcttccgaaggtggcagaaaaatgtgacatgatcgacaactcgaccgatgtcatgcggacgttctcggactatacgggcgatatgcagattcagttcgtgcagcttccgatcggggacaatcatccgtggaaaaaccgtaaaatctgtgagatcgagatgcttccgggtatgttaatcacagtgatccggcgcggcgcgcagacgattgtgcccaaaggacagactgtcattcaggaaggggataccgtcgtcttgggtgcagagggctttacggacagccagggaatccttttaaaagagattttgatgacaccagatcaccgctggtgtggtaagaagatcgcggaggcgcgcttctataagaatacgatcattgtgatgataaagcggggcagccagatcatcattccagacggcggtacgcagatactggaaggcgaccgggtggttgtatactcgcagaaactgccgcaggtggaagggcgtgtgaaacacgaaatcggaccggccgtatcggctgctgttcacaagtaagcacgttttcttacggcactttcggttccaaaagtgcctatccgtgaacagtaacgcggattcatagtaggaacatggaaatttcaggcaatacttgcagtttgttgaattataaactatacttaaacaacaacggtttgccggaggaaaagagtatgcagcagggaaatacgaaggaacggattgtagaggcttatatcgagctggagtcggaaagaccggtcgagaagatcacggtcacggcgctggtcgagcggagccggatcacaagaaaaacattttattattactttaaagatatatatgatttgatggaataccggatggaacgcgagatgaagcgcgtcatggaagagacgatgagccagccagatccggagaaggcgctgacacagctgtatatgtatatcatggaaaatcagaagcatatccgggcattgtccgagtcggtacagttcatggcgctgcgccgtcagatgggagaaaaggtgtaccagtatttttataaccatctggagcggattggtatgtttaagaacctgacgatgccggaggcggcgatggcggtgcagatcatcattttctcagtcatgggagttgcgtttgacgcgccgtttaaggatgaggcggatgtgaaggagcgcgtcgccacgttcatgagcgtgatccgcaaatgcaccgggcgtgaccctatgcaggtccgttaggaaagcaggtttccggcagttttgagaattattgtaactgttcagtaggtctgcgcgtgactgtgaaggtactgaacagttacgaattattatcaattagaaaatggaacagggaaacgcaggaggaatcagcggtatttggttggttttttctgcgtttttgctgtcatgtacccggaaaaaacggtcagcggcaggagaattcgggtgccatgaaaaaaagatgaacatggatagatacattttggaaaatttgtgtacacacctgttcgaacttgggagtggcaaagtgtatacgagatgagtaaaatatagactgagaaaaatttttaccaagaacaagcatagatggaggaaattatgaaaaaaagaggaaagattctggcgctggctgcgattgtagttgttggcgctgtcgttttgtcccgatgcggtcataagaatacggcggtggaatatgaatcccgtccaaccgtaagagtagaaaatccggttcgtcaggacatcagcttgtacacggatctgaccggactggtagagccgcagtcccgcgcgagcgtcatgccgaagatgagcggcgaggtgctggaggtttacttccaggcgggcgatacggtccaggcagggcaggcgctgtgcaagatcgattccgacgcgttgacagcgttaaagctacaggtggatgcggcttccgttgccttaaagaatgcggacagcaatttaagccgtacccaggcgctctttgctgatggttttgtctcccaggaggcgatggagcaggcacaaaacagcgcacagaatgcgaagatttcctatgaatctgcgaagaaccagtacgatctgcaggtgaaatacacgaccgtgacggcgccgatcgacggtgtgatcgagtcccggagcgtcgagccgcatgatcatgtatctccggcaggcgagatctgcacgatctccggtgccagccagttacaggttaaattcggcatcaccgagaagatccaccagacgatggagttgggcgacagcgtgacgctggagaaaaatggtgcggattacaccggtactgtaaccgaaatcggatctatggtcaacgagagcagcggcctttatgacgcgcgtgcgatggtgccggatgcagcaggtcttacgaatggttctcgcgtaaaaatgacggttatcatggaccatgtcagccaggtgctgaccgttccggtcgatgcagtcagctatgataacggtgccccgtttgtatacctctatgaggatggaaaagcggagaagaccgagatcgaagcaggtatctatgacgatgaaaatatggaagtaaaatcgggtctgacgagtgacagccaggtcatcgtgagctggagcaacgagctggtggatcagggagaagtcctgttagcacaggataccgatggcgcgcagacagacggaaacaatgagacagcagcggagacgacagaggcaggtgacaaagaatgattcgactgacaaaactcgcactgcggcgtccggttaccatcattctctgtctgattaccatcgcgtacttcggccttcagtccgtcatgggcatgaagctggaactgacgccagagatggagatgccgatgttaatcatcgctacggtgtatccgggagccagcccggaggacgtaaccgatctggttaccaagaaagaagaagatgcgatcacatcattggactcggtcgataaggtacagtccatttcccgtgaaaatgtatcgatcgtcattgtccagtatgagtacggtaccaacatggataccgcatacattaacctgaaaaaggcgatagatggcattcagagcgatctgccggacgatgccaacgatccgaatatcatggagctggatatcaactcgatggcgacggttacgctggcagtcagcggcgacgctgatcagaacctttatacatatgtagatgacaaaattgttcctgagtttgagaaattaagctcggtcggcgaggtttcgattgccggcggtcaggatagctacacccgcgtggaactgattccggaaaaactggcacagtaccacctgaatatgaatacggttgcacagttagtcggtgccgccgatttcacgatcccggcgggcgatgtccgggttggaaaacaggatctcgacgtcagtgtcggcaacgaatttaagagcacggaaagtctgaaaaatgtcgtacttccgctggcaaacggtgagacgatccatctttctgatatcgcaaatgtctatgaggcgctggaggatgcaagctcgatcggacgttacaatggcgaagatgttatctccctgggaatcaaaaaacagcagagttccaccgcgatcgaggtttccaaccaggtaaccaagaaggtgcaggaaattgaaaagcagtatccgggtcttaaaatcaccgtggtagatgatgccagtgacacgctgaaacagtctttaagcagcgtaatccagaccctgatcctggcgatcatcctgtccatgatcattctgttcttattctatggcgatttgcgtgcgtcggtcatcgtaggtacgtccattccgatctctgttgtattggcgatcatttgtatggcggcgatgggattctcaatgaatattatttccctgacgtcgctcgttctcggtgtaggtatgatggttgataactcgatcaacgtcctcgacggatgtttccgggcaaaggaaaaactggatttctatgatgcggcgctggaaggtacgcgcacgatgatcggctcgatcaccggcggtacgctgacaacctgtgttgtatttattccgcttctgatgttaaatggtatgtctggacagctctttacacagctcgggtacacgatcattttctgtatgacggcttccttattctcagcagtcatcatcgtgccgctctgctatatgttctggcatccggttgagaaggatcatgcgccggcaggacgcatcatcaaaggcatccaggcctggtaccgcaagcatatgccgcatgtcatcaagcgctatgcgcttgtattcggaacgactgcagtgctggttgtcctgtccatcctcatggcgtccagactgaacctggagctgatgtcttcgatcgatgaaggtatcgtcacgatgacgatcaagacgaaaccgggttattcggtatcggcgatccgtgacactgtgctcgatctggaaaatatggtagagacagacgaggatgtggatcattacctgatgacatatggaaacagtggtgtcagcatgacttccggaagtgatgtgacgctgaatgcctacttaaaagataagagaaaactttccacggacgaggttatcgagaagtggagatatgcgacacagaactacgttgatgcgaccattaccttggaacagggcagcagcagtatgagcagcagcatgagcagcggtgattcaattgaggtggatctgcagagtaccgattacgacaccctaaagaaggcagcggatgatctggtaactgagcttcgcaagcgcgaggatgttatgcaggtacattcttctgttgagaatgcggcgccggttatcaaggtaaatgtggatccggttaaggcagaggcagagggactgaccccggccagcatcggttcgatggtatacagtaatttaagcggtgtgaaagcggcgacgatctccgtcaacggcaatgatcaggacgtgaaggtagaatttgcgccggatcgctacgattccatcgcgaaactgcagggcatgatgatcacgacggcgacgggtaatacgcttccgctggaggatctggcagagatctactaccaggatagcccacaggagatttcacgaaaagagaaacagtaccaggtatcgatcacgatgcaggcacaggcagattataagaagacggctgaaaaagatgtcaagagcttcgtgcagaactgggaattcccgtacggcgttgagatggcgaccaatagcctggatgagtcgatgggcgaggagctttccgcgttgggaatggcgcttgtcacagcgatctttctgattttcattgtcatggcgatccagtttgagtccccgaaattctccctgatggttatggcaacgatcccgttcagtttgatcggttcctttggattcctgtttctggcggactgcccgatcagtatgaactccatgcttggtttcctgatgctggtcggtacggttgtaaacaacggtattttatacgtggatacggtgaaccagctgcggatggagatgccgttagacgaggcgctggtagaagccggtgcgatccgtgtacgcccaatctgcatgacgacactgacgaccatcattgcgatgatcccgaactgtctggcatttggtaaggcgggcaagatgatgcagggcttagcgcttgtaaacgtcggcggtctggttgcggcgacgatcctgacgctggtactgcttccgtccttctaccgggtggtttataacatgggaaaaggcaaagaagatgagtatgataagctggactgcgactaaggaaaagcaggttaagcagtgaatctgtcaggcggcggacccggggcggggaagctgcctgtacggatagaaaaagggggagaagaagatgccgtcggaacgatttaagcgattgccggaggaaaaacagaagaaaatccgggacgcgtgtatggctgaatatacgcggacaacgatagaaaaagcatcgctcaaccgtatgatagaagatgccgggatctcccggggcagtttttatacgtattttgacagtaaatgggatgttttaggatatctgtgtgagagttttatcaatgaattttatgagtgcggcgtgcgctgccttgaagaggcgcagggggacatctgggagatgttagggcagtttttaaacggttcgcttgccctgtgccgcgatgagagacgcaccgatttcatccgcaacatcatggagtgcagcagccgcgaggcgctgatctttgatatattcagctccgatccggacagtccacgcgccgtgcgtggacggaagctggaacgtgccgcctatgagtcgtgcgtgggaaaatccttgcggaagatgggctgggaggaatatatgagttttttccgcatggcgatgatggcgatcgcgatggagatcaagagctttcacgacggagttccggaaaaccgtatccgggaacggtttgccctgacactcggcatcctgaaacggggcgctgggatagaatcgggagcgggcgcgcagagcgccgaaaggaaatgaagatgagtaagatgaagaaaaacaggaaaaaactgtttgccattcttttacaggcggcgttagtcagcacggctatgacgatgccggcatatgcggctaaaacgccggggatcggctcagatgcgctggttggcgacgatgcgaccggtccggtgctgacgggcggcaataccgaggtggaggaggaaacttccccgtacaccaaagaacagctagaggatgggacgctggaatatggcgagatcgcatggcgaatcgaggggtacaacagcacgtacttaaacctgcgttcccagctctacagccagacgaccagccagtcggcgggaactgccctggcggcagaggcgagcgccctcatggaagatgcgatggacctgaagtccgacgatatggatgcggagacgagagagctgtttgagggctacaaggcggcagcgagagagctgcgcaaacagggggcaaagcttacgaacaaggagctttccggcacctatgcccggaccctgcgtcagacaaagaataagttagtcaaggcggtgcagaacttgctcatccagtatgaggaactgctcccgcaggtggaaacagcgaaaaagaatgtggaaatgtgccaggtaaatgccgatgccgcacagaagatgcaggcgctcggccgtgcttccgcgcaggaggtcctgacggcgcagaaggcgctgcaacaggccaattccagcgcccagcaggcagaaaacggggcattgcagctcaaacagaatattttaatgctacttggatttgacgcggatgcgccggtaacctttgcggatgtgccggttccggatgcgtcccggatcgcggcaatggatctgggtaccgatacacaggcggcagtcagtgcgaattatgatctgatgtcggtacgtgcaaataaggcaacgggttcttccaaccgtacggtcaaaaaaagaaacgttgcttataccgaggattcggtggcgatcacaatccagaacctctatgcggcggtagtatccaagaagcaggcgtatgacagtgcagcagccggatatcaggcggccgcgcagagttacgaggcggcaaagcgccagaacgcactgggaatgctctcaagagccaattatttggggcttgagtgttcctggctcagcagcgtggcatcgtataagaccgccgagctggaatataccaaagcggtggaaaattatgagtgggcagttagaggcctgattgtaagcaagtagttcgtcaggaatttgccgtatttaaatgcgaagccacggcaaaatccgttattgggcacgtatgcgtgaacagtaatgtgaatgggaagagaaaggaagtaggaaccggaaatgaaacatagaagaaggaaaacggcgcttctgaccgcagcggcagcagcggttctggcattgcagggaccgtttgcggcgctggcagccagcccgcagtttgcttatgacgcagatacatgggcgaagcttcaggacaatgtgatggaatacagcgaactgccgtatctggtacaggagtacaacccgacgtatttaaacaatcagacgacctatcaggcagggcgcgacacaaagaatgcgaaggaagtgcaggataagcagtacaatcaggcgaatgatctgtacgacagcgcggataacctgcgggatcaggcggatcagattgaggattttctggcggtgccgggcatggcgagtgcttacgcaagcctgatgtcagcgtccgtcatggtggagcagaatgcgttaaaaacccagcagtctgccgatgcttcttaccgcgacagcgagatggaccgtctggactatatcaacagccaggatgcggttgtcgcgcaggtgcagtcggcgtttgctgcttataatcaggttaaaaagacaattccgttgatggagaaatcgctggaattgcaggaactttcactggaaatgacccagaagcgccagcagctcggtcaggcgacccagattgatgtgttaaatgcacagaagtcgctgcagtcgctccagtccacgctgacccagacaaaagcgggacttcaggcccagcatcagcagctctgcgtccagaccggatggtcctatgacgcggaaccagatatccaggatctgccgcaggcggatctcacccggatcgtagccatgaacctggcagcggacacacagacggcgctcgaacagaatctgtccttacagtccaacaagcgcggctatgccaatatggcagaaggttcagccgataagaaaaacatggaccgcaccatcaagaaccaggaacagacgatccgctccggtatgcagacactctacaacgacatcatgcagaagcagacagccctgcagcttgccgatgcgtccctggcagcagagacgcagacgatgaatgcgatgcagaagaagctggagcttggcatggcgacccagctggagtacaagagcgaggaagtttccttcttggagaaacagatcgacaaagagacagctaacatgaacctgcagcaggcgatcgagacgtatgagtgggcgctgaaaggttacatgaagtagggacagaagttaagtctctggcacttcctctgcgcgggggttaacgtggcgctggaggaggtgtgtatatcgaaaatgatataataaaatgcttataaaataaggggcataaaatcctcatggatcggcatttgcccggtaaaaaatggatttttagacaaaaagtgtatttctgtcacggacgatacggcagttcacagaccgtatgtttttgtgacacgtacaaaaagaggcaaaaaagcggcgattcggaacggaacgccgcttttttttgcgagggaaataggtatatattgtgagactttaacaaaaaatacacacaaacaacagaatactaccaaatccgactggaaaatactgggttaataaaaaatacttttgacaattaacgcggcatatgagaaaataaaaaagatactggcagtaaggagaaaaaataagatatgaacaagtcacaagacaaaatcaagtggtatatgctttcctttatgtgtttctccaccctctgggcatttggaaacgttttaaatggtttcatatacttcaatggaacacaggttatcttctcctggattctgatgtttgcactgtactttgtaccgtacgcactgatggtcggagagcttggctccgcatttaagaattcgggcggtggtgtcagttcctggattcatgagacaaccggtgcgaaggctgcatactacgcaggctggacctactgggcgtgtcatgtcacctacatcgcatccaaaggttccggcggtctgaaagcgctcagctggatgattttccagaacgcagagaagtatgcgtcctttaacacgaaagaggttcagttagttacctttgcggtactgctgttcttctgctgggttgcgagccgcggcttaaacccattaaagaaactggctaccctggcgggaacgagtatgttcgtcatgagtatcctgtacatcctgctgatgtttgctgcgccggccatcaatccgaacggcggttacctgtcggtggatttcagcttaaagaacatgatcccggccttcaactggaagtatttcagcagcctgtccattcttgtctttgcagtcggcggctgtgagaagatctccccgtatgtaaacaaggtagaggatccggcaaagggattcccgaagagcatgatctttgcagcaatcatggttattgtctgcgcgatcttcggtaccatcgcaatgggcatgatgtttgatccggtactgattgaggagaattttgactcctacaacgcaaacggttcttactgggcattccagaaactgggtgagtactacggtgtcggcaatctgctcatgattatctacgcagcctgcaacgcgatcggacagttctcgacgctggtagtcagcatcgacgcaccgctgcgtatgctgcttgacaacgaggatgcgcgtcagttcatcccgaccaagctgttaaagaagaacaaattcggcgcgtacatcaatggtatctggatggttgttatcctgtccggttccattatcctggctcaggtcctggttccgaacgcagatactgtactgcgtcagctgacccagttaaactcggttactatgccgatgcgctatctgtgggtattcttcgcttacttcatgcttcgtaaacacacgaacaagtttgaacgtgagtaccgctttgtaaagaataacggagtcgctcttggcttcggtgcatggtgcttcttcgtaacagcagcctgctgtatcttaggcatgtacaagcagggcgatatgtatacaactgtgctgaatgtcattacgccgattgtcctggtaacactgggacttatcttaccggcgattaagaagagagaagggaagtctgcataatgaatgctgcaaatgaattactgacttttattgagaacagcccgagtatgtttcattccatcgagacaatcaagggtatgctggacgaggcaggttttacatacctgccggagtcggctcgttgggacgtgaaacagggcggagattactatacaatccgcaaccattccagtatcattgcgtttcgcgtaggagagaagctgactgattatcacttccagatgtgtgcctcccacagtgattcaccgacttacaagatcaagagtgtgccggagttaaatggtccgggcgagtatctgcgcctcgatgtggaagcatacggcggcatgatcgacaacacctggtttgaccgccctctgaccgttgcaggccgtgtactggtaaaagacggtcagggcgtgagcgcgagacttctgtacatcgataaagatctgctcatcattccgaacgtagcgattcatttcaaccgtgaggtgaacaatggatacaaatacaaccgtcaggttgatttatgcccactgttctccgctggtgagctgaaaaaaggcgcgtttgacgcgatgattgcgaaagagcttggtgtggcagcggaggacattttagggaaggatctcttccttgtaaaccgccagccgggtacgatctgggggtatgcggacgagttcgtttccagcccgaaactggacgacttacagtgcgcttacgtttccctgaaagcattcctggaggcgaagaatgagcgcgatgtcagcgtatactgctgcttcgacaatgaggaagttggttccaatacgaagcagggggcgatgtccaccttcttacaggatgtcctgcaccgcatcaacggcgcacttggaaagacgccggaggactactatcaggcagttgccggttctttcctcgtaagctgcgacaacgcacacgccgttcacccgaaccacggggagaagacggatgcagtcaactgctcctggatgaacaaaggtatcgtcatcaaggagagcgcgaaccagaaatacaccacggacgcattcagccgtgcggtatttacgaatgtctgcaatgaggcaggtgttccggttcaggtgtttgcaaaccgcagtgatattttaggcggttccacccttggaaacctttccaacacgcaggtcagcgtccatgccgtcgatatcggtctgccgcagcttgcgatgcattcctgctacgaaacggcaggtgtgaaggacgttgagtacgcaatccgcgcactgacgaaattctaccagaccactcttcagattgaaggggcagagcgggtttgctttgagtaaatatagttaaaagaacagccgcttcgcgaaggatgaaatgaatcgcggggcggctgtttttgatagaatgaaaatggttagaaaacggaaaaacggtaaatccagcagcgctgaaacgttttgttttgatgtttaattcgcgaaaattatttccgcagcagctccggcgccatctcctgaaacagcttcgcgagcgccatcgccgcccgcgagcggtattttccagcgggccaggcgagcgccagatcgaggaaaataccatctttcccgatccgcagatagcggaactcatcccgcatgatgcggcaggaacggtaggtaaacgcgagtccgaccccctcccgcgccatcgccgcagcaaaggaggcggagaggtaggtgtcgagccccagcggttccacgctagcctcgcgcagggagcggcggccagtccgtccgaggacggtgctgggcggtcccagaatatactcaaatggtgcggtgtcctttaggtcgatccacatctgttccggctccgattcacatggcttcgcaaacgccatgaccgggtggtcggcggtggtggcgatcatgatctcatcccgcatcaggaaatccacaccgtgtttgatccgaaccggcggcgcggctatcagcgccagatctaaaagtccctctaaaatcttattttccagatcaatactgtccatctcacagatctccacatgaacccgtggatacagggcatggaattttttcaggaccggcggcagcaggtaggttccccggtaggtactgatgccgaaaatgacagtgccgccctttaaattttcaatatccgaagcctcgctgcgtgcctcctggtactgctgtaaaatctgtctggcatggaaaataaacgcctccccggcagaggttggacggactccgcgggctgttcggacgaaaatcggcgttcccagatcctgttcaaataggcggactgcctgacttaagcttgactgcgccataaacaacttttcggccgcgcgggagatgctcccctcgttagcgacggttacgatatagtctagttcttttaaatccatgagaatccccctcacgagatatcggaatttccgatatctggtataacaaatcttgcctttctcctataacaaaaatagtataagataaaaacaagcaaaaatcaatggcagagactgaagcagcggctggaaaatcgaataggaatccggcgagggaacgcagctttgaaaaagtctctgtggacgattataaaataggaggaataagcaagatgaaacaggatttaatgaagggtgttatcgacatgcacgttcacacgaatccggatctgcgtctgcgggcgtatgatgatttcgaactgatggaggcggcgatccgggttggggcacgcgctatcgtcatcaagacgcatcagggaaccacgatggatcgggcgtatctgtgcaaccgccacaacgaaattgtacacgggaaaacgaacaattttacgatgtttggcagtattaccttaaataaggtagtcggcggcatcaatccgaaggcagtcgatgtggcgcttcgtctgggtgctaaggtagtatggcttccgacccagtcggcaaaaaaccatatgcagaagatgaatcaggatctgagccagtgcgtggaagtggtgaaagatggtaaaattgtaccggagctgcgttcagtgttggagctgattcgtgaccacaatgcggtactgggaaccgctcacatcgcaccggaggaaatttttactgttgtggaagctgcccgggatatgggagtaaaaaacatcgttgtaacccatccggaatggtggatcgtaggcatgagccatgaggatcagcttcgtctggtaaaggattatgacgttatcttagagcgctgctatgcacagaacatgggtggcggaaagtataagagcaatctggcagacaacctggagcttatcaaagaggttggctataaaaatgtcatggttgataccgatggcggccagacagaaaacccgcattgggagctggcgctggcagaatatatgcagtatctggtagatcatggaattccggaagaacacgtgtaccatatgacacacactattccggcaaaactgttgggcatcgaagaatagggggacgcatcatatgttaagtgcagttttggtggcatccattgcggttgccgttatattgggatataaaacgaaaatcaatacgggatttttctgtattgcctttgcatacctgattggttgttttggcatgggattgaaaacaaaagaactgattggcttctggccggtcagcaccatgtttgtcatcctgtcagtatcactgttttacaactttgcagctgtgaatggaacacttgaaaaaatgtcggccagtcttctctatatgtgccgcaagtttccgggcatgcttccttttgcattattttttgtagcagttgtactttctgttatgggtgctgcatactttaccgttctggcattcctggcaccgattaccatccttatctgtgaggaagcaaagatggacaagctgaccggtgcggtggcgatcaactgcggtgcactggcaggcggaaacttccccacagcttcgctgggcgtcgtattccgtggtctgattgatactgcttatgaagcagaaccggcatttgaagcaacgaattcctttgtagatgaaatgaaaatttttggtttcgcgattgtattttccctgattctgattgcaattttccgtttcggtttcaagagcaaccgcggtattggaaagggcgtaaccttcaaccgtccggaaccctttgataaaaagcagaaaacaaccctgcatttaatgattctgatgatggtgattgtcctggtattcccgctcttaaagatggcagttcctggcaatgagctgattggaaaaattgccggaaaggttgatgtaggactggtggcattctgctttaccatcatcgcactgctctttgatctggcaccgcagaaggaagttatcgcacgtgtgccgtggaacaccatcctcatgattgccggagccggcatgcttatcgccgttgcagttcaggccggtaccattgatgcattatccgcatggattggttccaatgttccgacagccctgattccgctggcattcagctttgtaggtgcatttatgagtttcttcagttctacaaccggtgttgtagcaccggccctgttcccgctgattccgggacttgcggcagcaaccggattaaatccggcagcactctttgcctgcacgattcttggtgcacagagcagtgcgatcagcccgttctcatccggcggcagcctgattcttggttcctgcggaaacgaggaggatcgaaatcacctgttcaaccgcctgctttttgtggcagtgccgatcagcgttatctgctgtgcggtatataatctgattgtagcagttgttctgtaagtgaaatttaattgagaagttgtttgatcgaaaagctgtcagcctgttctggcagctttcgatgaaatatgaagattggaagtaactgttcagtaggtctgcgcatttactgcgcgtgactgtgaaggtactgaacagttacgattgggaaaatcaagaaggaggataaagaaatgagtcataaaattacagtatttcgcggcgatggcatcggaccggagctggttgataatgtattaaaaatcttaaaagcggcagatgcaccgctggaatatgaaattttcaatgttggtgaggatgagtggaaacgcaacggtgctttgattccagaggaagcgtatgcttccttcgagcgcaccaaagtactcttaaaatccccgattacgactccggttggaaaaggattccgctccctaaatgtaacacttcgcggacagtatgacctgtatgccaatatccgcccggttaagtccaacgcggcagtaaaaactccatttgagaatgtggatatcgtgattttccgcgaaaatacagaaggtctttatgttggtgtagaggagcaggtaaatccggatacggttcatgcaattaagattgttacaagacaggcaagcgagcgcattatccgcgatgcattcgagtatgcgaaaaagaacggacgcaagaaagtaacctgtattcataaggcaaatatcctgaaaatgtccgatggcatgttcctttccattttcaaagagattgcaaaggaatatccggagattgaaggtgatgataaaatcatcgataacacctgcatgcagcttgtcatgaatccaaaccagtttgatgttatggtaatgcagaacctgtacggagatattctttcggacctgtgcagcggcctgatcggaggcctgggactcgttccatccagcaatatcggttctgactatgctatgtttgaggccgtacatggcagtgcaccggatattgcaggcaagcacctggcaaacccgaccgctttcctgtggtctgcctgcatgatgttagagtacttaggtgaaaatgagaccgccggacgcatccgcaaggctgtggatgaggttctggcagaaggcaagcacctgacaagagatctgcatggaactgcaaccaccgaggaatatgtggacgcagtgattgcgagactgtaagaatttaataagtgaagatgtaagaaggggctgttgcacaaaccgtgcagcagctccttttggctataaaatagggttatcggccagcatatttgtaaatgcgacagacgccctatttgtgtataaaaacagatgccagcattatttacctatcccctttaccatacaccgtttcttgaagaaggaaattccataacagaaaatttcatcataatttccttcaaattcttttgtatacatgcgttcatcgatctggacgagattcgatttgaagtccggtaaaaagattcgggcttttttttcgaatatcaaaaaaattggcaagcatactcatcgccagtgtttttccaaaacgacgcgggcgggtaatcagggtgacttccgagttattcgtcagaagatcagcgatcagcccgcttttatcaatataataatagccgtcttcgcgcagctttttaaaatcagaaataccaacagggatttttaggggtgccatcgatgatgctcctttctgaagatacggaattgttacgaataactttatcatatcatggggggaggtggttggcaaaattttaaaagaaagcgggatgcgcctatatccggaagaggtgtatgggtttggaaaatagctactgacccatctgcttctcccccagctcctccggcagtgcctcaaagaaaatatccttccaggcacgtttcagctgtttttcatgaactacatagggctgcactccaatatatttaggaacgttatcactgaccagggatttggcgactgcaagagcggccgcttttccctggtcatatggtctctgggtgctgagtccttttacaaatccttgattcatttcttctgcaatctcaaaatccagatctgtggtaaagacagcaatatctgtccggttcaaagctttcagggccttgatggcgagcagggcggggcggtcccagctcacatagagcgcctggatatccgggtgctcgtttatcatctcatagcataccttgtaggcattttcaatttgaataaatccctttctggcagtgatttcaatgtcgggataggattcccttaatattttttcggcacagttatcacgctcagtagtgccgtaaaacatggcgccgtggatgatgaagccgactttggcatgcggtttttctttcagatattcaccgatcatgcgccctgtattggtgccattttcccgctcattgacggagatacaggagacgtaattgttccggctgaaattctgcgggacattgcttaaaaagaccagccgcgtcattttggacaattcctgaaatgccggacccgtctggacatcgtcggtggggatggcgatgacggcgtccgggtgctgcattttgatgctttcgagctgcatattctggagggcaggatcaaaatgggcgtccatggtggaaataatatcgattccgtactgttccagttcatcccggatgcctttctgatgcagggcagcccaggcggttccagtgtagtggaaggagatggcgacgcggtaatttccagttcgcaaaagctgtttttcctccttggagaggcggatgctgtccggggagacggcgtgttcaccgagcggaccgttgtcgatgatccgggtggaatcacgcaaaatcagctctacatctgcgtagcgggtcaaaggtgcgccggagaggtggttgatctcgtcaaagagtgcctgcgaggcgagttctgccatctggtcgatgtcccggtggatgcaggatagcggtggggcggtcagctcgcaccagagcatatcgtcaaatccgatgatggaaatatcgcgcggacagtcttttcccagctcccgcagcgccttgagaagaaacatagtcagccggtttccaccggcgatgatagcggtggggagataccgggtgatgcttttctgaatattcaggctgatggtatcactggactgatacagattgatctccgcgatgcaggaactgctcagggtatggttggcggagagaagcgcccgctcatatccggcaatcttgtcctgtttggcgaggctgtctgttttttctaccagaaacagcacattttcgtgtccgctctcaaaaaaataggaagtagcggagtgaaatgctttggtgtaatcaaaaaggatccgcggagtgacatcgtcatcgatgaatcgttcgacacatacaaacgggataccggattcatagagaaatgaataggtagccggattgctgcttactggggagagaaagatgccgatggtcttggcactggagattaagttttgcaggatgcttttctcctcttccaggttgtcgttggtgacggcggtgtaaaactgatagccctggctggtcgcgtaggactgcagctgattgcacagatcgcagtagagcgcgctcttgatatttggaaagacagcgacaatctgtgaactgcgtccgctgcggattttacgcaccttttttttgattttttcagaatatccactttcttcaataatagcttcgattttatccaccagttccgggctgacatagcgcgtatggttgataacatgggaaacggtggcgatggagacgcctgcctttgcggcgatttctttgatggtcataaaactcccccttgctggcacggattagtccggctgttcctgcgcggctggatttgaatttgccgcagttttgtgtttctgtttttttgattatagcacaaaaataggagcaaaacgataaggtaaatataatttacgtaaaaaattagaaagagcggtagaagtgcataaatatcaataaaacaggatgaatatatcgctgaaattagtgcaatatgccacaagagtattgacgaaagggcatggaatagagtaatatctagatatcagacagggagactccttccagagagaaaaatttttacgtaaaaaaagaaaactataacaatccgtttgaaatgcactaaacagtgatgaagtaagaggaggatcagatttatgaaaaaaagtcttagatttacagcagcaggtctttcagtttgcatgatggcagcaatgctggcaggatgcggctcttccagcagtaccgatacaacagcggcagccgatgcttctgaggcagcggcagatacgcagggggctgaggcaaagaccagcgatttatcgtttgcattctgtacgaatactttaaacaatactttccagagttccattgatgcaaagctcagcgagctgtgcaaggaaaacggcatttcctatacctgcctggatccggattatgatttaaacaagcagctcagccagttatctgactgtgcaaacagcggttacgatgcagtatttgttatcccggttgactccgcaggtattacctccggactggctgagattgcagatgcaggtattccgattttcaacgtagataccgcggtcattgatgatgatatcgaacagttcgtgagacagttcgttggaaccaacgcatatatggcaggccagttagtgggcgagcagatgacgaaagattatccggatggcgcaaagattgcagttctggatttcccgtccaatgaaagctgcgtggatcgtgtcaatggtttccttgagggtcttggcgatcagaaggataaatttgagattgtagcacagcaggatggcggtgcagcgctcgatcagtcgatgggactggctgaggatatcatcacagcaaacccggatctggaagcattcttctgtatcaatgacccgtctgccctgggtgcggcagcagctatcaaggcagcaaacaagaccggcgagatcggtgtatatagcatcgatgcatccccggatggaaaacaggcactcttagacggcgagttcaccgcagttgcatgccaggttccgcttcagattgcagaatatgcatttgacgcagctgagaaatatgtaggcggcgacaccacaatcgatgagaagaaagtatatctggattcccatctggtagagaaagaagaggcagagaagactctgaacgactggcagtaatgaactgcgaggaagcttaacagttacgtgaaataaaataaaacatggaaaatgcggcgatggggttcattgccgcatttctaaaaaacggagggttctatgggaaaaacaattctggaaatgatagatatcaagaaaagtttttccgggatctatgcattgtcagggatcaatttttccctggaaatgggcgaggttcatgcgcttctgggagaaaatggagcgggtaaatcaacgcttatcaaggtccttggaggaatttataaaccggacagcggaacaatcaagattaatggtcaggaagttgagataaatggtgtttcggacgcccaggagaaaggaatcggaatcatacatcaggagatcgtcctggttccgtatctgacggtcgcgcagaacctgttcctgggacgggaaatcaagacgaaattcggcaccgtggatatgcgggagacgaaccgccgggcaggcgagatgctggcaaacctcggggtcaatatccacccggatacgctggtagaatctttgacgatcgcccagcagcagatggttgagattgtaaaggcggtatccttcgacggacggatcatcgtcatggacgagccgacgtcctccctttccaatgacgaggtagaacagttatttggaatcattgagagattaaaagcaaaacaggtaagcattatatatatttcccaccgtatggaagaactgttccggatctcggatcgggttaccatcatccgcgatggcgcctatgtgggaacgaaaaaaacatcggagacgaatgcgaacgagctggtagccatgatggtaggacgggagttagagagcttctatgccagagattacaacgatctggaacatgcagaaacggcattggaagtgaagaatttaacctgtgagggtgtgttctcagatatcagcttccgggtaagaaagggagagatcctgggatttgcgggtctggtcggagccggacgaagcgagatcatggaatgtatctttggagccagaaaataccagagcggaaccattcttttaaatggaaaggaagtccgcttcacgacaccgattcaggcaatcaaggcgggcatcggactggtgccggaggatcggaaaaaacagggacttgtccttggcaatacggtcggttttaacctcacgctggcatcgattgactcttatattaacggaattgccatcagcgaccggaaatgtcaggaagtgattgattattataaagaaaagcttcatatcaaggcagtggcagaccgggtggaactggtggaagcgggaagcctttccggcggaaaccagcagaagattgtccttggaaaatggctggcaatcaagccggatgtcctgattctggacgagccgacgagaggcgtcgatgtcaatgcgaagtttgagatttattccgttattaatgagctggcgaaggcgggtatcgccgttatcatggtatccagcgagctgccggagatcatcaatatgtgcgataacgtatgtgtcatcaaggcgggaaaaatgacgggaatgctcggaagagatgaactggatcaggagagaatcatgcagtatgcagcaggaggcgaagagtgatgaacggaaagaaaagtacagcaggcaattcggtactctcggtatttaccggaaatacaggaattattggagtgctggttatcttatgtgtggtagtcgcactggcaaccgataaatttttgacaccgagcaatatcatttcagtgctcagacagatttccattaatacatacattgcactgggaatgacgttgattattattctcggacacatcgatctggcagttggcgcgatcgtagcgatgagcggaactctgacggtaggatttgtagttaatcagggacttccgattggcgtggcgattgcggctggcatcatcatcggtgttgtggctggtctgattgatggtatggttgtatcgaaattccgtgttccggcatttatcattacgatggcaatgatgaatgtctgcaacggtatcgcgtatgtatattcgggcggacagtccacccgtattacggataagtttttcattgcaatcggaacgggttatctgtttaacattattccgctgccggttgtctatatgattattttaattatcgtatttagttttctgctttctaaaacaaaatttggtacctatgtatatgcaatcggcggaaaccgtgaggcggcgcgtctctcaggtgttccgatcaagaaagtcgagatcatcgtgtttacattgtcgggcgccctggcggcgtttgcaggtctggttctggcatcgagaatgtattccggacagccgtccgtcggaagtggctatgagatggatgcgatcgcagcctgtgtcctcggcggaacctcgatggcaggcggacgcggacgtatcagcggcacagtattcggtgcgatggtaatcggtattatttccaatggtctgaatctgatcggcgtcagctcctactggcagctgattgtaaaaggtctgatcattgcctgcgcggttgtactggattcccagaagggcaatctggcactcctcagaaaaaagaaatgattccaagagcacatttagaaaggcaaggagagaagaatggactttttcagaaaaatgtcatttgcggattcgaccggtgacgcgattccgttttatcatgaaggtaaatatcatattttttcactgacatccccgccaggaaccacggtatatccggcgagactgcgtactacatggagccactctgtttcggaggatctggtgcactgggaggagctgccgacagcactgtatccgggcgagggcgatgagccggatgcgtccggcgtgtggacgggatcggttatctacggcgaaggaaaatatcacgcattctatacgggttactgcctgacggcagaatatcagcagacgatctgccatgcgacgagcgaggatggtatcacctggacgaaggacgcggcaaacccggttatcacgccgatgatagagttatatgaaaagctggactggcgtgatccgtatgtattttataatgaggaagataaatgctactggattctgatctcggcgagacggctggatatgccggtgacaagacgcggctgtatcgtcctgtaccgctcgaaagatctggtaaactgggagtattatggtccgttgtattcggcaggcaatacgaattgtccggaatgcagcgagatgtacaagataggcgatacctggtatctttcctattcccgcttttccgagtttgtcaacacgatttaccgcacttccaaatctccgtttggaccgtggaaaaagccgaagaaagatggcatcggcggacgccgcttctatgcagctaaatccatgcaggatgacaacgggcgccgtttctactttgcctgggcgcatgaccgtgcagaaaacagcgaccgcggcgagtggtactggggcggcacgttctgtattccgcatgaggtcgttgcaacgtcagacggacagctggatgtgaagcttccggaagagtatgtaaactgctttaaagagaaagttgactggaaataccttccggtcatgggagaatataagctgtatggggatacaacggttgagctggatggatgcgggacaacctcgtatggtttcctggagcagccggaagaaaagttcctgtttaccggcacggtgatcccgaaagaagcgaatgattccttcggaatcctgttgaaatccgactgggaggcaagcggctgcctgttcttagagtttgatgtggcgatgcagcgagtgtcccttctgtccctgccgatgggagttgacccgttctgggagcagtcctgccaggcagttccgaaggcaaccgaaccgggaccggatggcgtgcgcgtggcagagaaaaccttcgcgattgaaaatggcgcggcaatcgacgtcaagatttcggtcgatcatgatatggttgaggtgttcgtgggcgagcaggtggcatttacctatcgtattttccggaaaccggagtacgagatcggtctgttggctcaggacgcgaaagtagaatttgcaaatatcgcgattcggaagtaaaattccttgtgagagacgaacggatgtggctgtccgcctgtgagagggctggatggcggcaccattgatataacttgtaatacggaggatgattcgtatgagaataaaaacagacatcacagcgctgggagagcttctgattgattttactccagcaggcgtttcacagcagggaatgcgtctgtttgagcagaatccgggaggtgcgccggccaatctgctggcggcggctgcgaaatttggaaggaagacagcatttattggcaaggtgggtaaggatatgcacggtgatttcctgaaggaaaccctgatccgggcaggtatcaatacggacaacctgattcaggatgagaagtattttaccacgcttgcatttgtaagcctgaaagaaaacggggagcgcgaatttgcctttgcgaggaagccgggggcagatacgaatctgtgcatgaaagagatcgatccggagatcctggaaaatacgagagtatttcatgtcggttccctgtcgctgaccgatgatccatcccggacggcaacctatgaagcgatcaatattgctagaaacagcggtgcggtgatttcctacgatccgaactaccgggcggcgctctggagtgatccggagaccgcacagcttcggatgcagtcgctgattccctatgtagatatgatgaagatttcggatgaagaaacctcgcttctgaccccgtatcaggacccggaggaagcgattcagtatctgctccgtcagggcgtgcacctggtggcagtgacgctcggaagagatggcgccctgatcggcaatgaaaatggaatcataaaagcggagggcttttcctcccatgcggtcgatacaaccggcgctggtgattccttctggggaggttttctcgcctcctatctgcaggaagaaacctcgccggaacacctgacccgggcgcagatgattcagtttggcagggtcggcaacgcggtggcaagcctgtgtgtcgaacgccgcggcggaatctcggcaattccggagatggaggaaattgaagagaggctgagaggctagaagaaaagatggagtaagtagttggtaactagcctcagattggtcatctgtgaatgacacaaaaccccagagagcggcaactctctggggttttgttgtgtgaccgtttggatatattaatattcctccacatgcagcaaatgatgtgcacgatcggataacggagcttcaagatactcgtcatacagtgtctgaacggcctggttttcatggctgaagcggattgcgctgtttacatcataagcacgcaggcactggtcgcggtctgcgcagtccttcggcttattctggaaggatgggcggatcggctgaccgccgccgttgatacagccgcccggacatgccatgacttcaacgaaatcatagtggcattcgccgcgtttcatcgcctgaatgaggcgtctggcctctcctaggctgctgagtgctgcacagtgcagtttcacacccttgatatcgatttccagttccttaaaggaaccgatctggcgcagaaccttcagcggactctgctcgccgatctccggattttcaccggttacggtgtggtaagcggtacgaagcgctgcttccagtacgccgccgctggcaccgaagatcacaccggctccggttgcttcaccgagaggatcgtcaaaattgcactccggaagtctggatacatcgatatgatcggccttgatgagacggcatatctcacgggtggtcagaacataatcaatatcctgtccggttccggcgctgtccatgcctggaagagtcagttcgcgcttcttggacatacacggcatgatggaaacacaggtgatattttccggtgcaatgccttttttctgtgcaaaataagttttgatgacagcaccgaacatctgctgcggggacttggcagtggaaagctgcggcagaagctccggatactggctctttgcaaagctgacccagccagggcagcaggaggtgaacattggccagctgtatttatccggctgctgtaagcgggctaaaagctcgttgctttcctccataatggtcaggtcggctgcaaagtcaacatcgaatacatagtcaaatccaacggattttaaggtggatacgaaacgtctgtcagtagcaaattccggggaaagaccaaattcttcaccccatgcggcccggacagccggagcgacaactgctacggttaccttgtcatcatttgcaagttcaccgtggataccattgatggcttccacatcatcccgctcctggagagcggcagtcgggcagtgggtaacgcactgtccgcagagagaacagtcggattctttgatttccagattgtgggaaacatcgacggttgtatgggaaccggttccggacacatcccagatatttaaggtctggatcttgtcgcagatctggacgcagcgcatgcatttgatacattttcccgcatcgcggatcagtgggaaagtagaagtccagatcatttccggatattcgtttttataacggtcaacggtcaggttcagatcacttgccacctgttttaattcacagttggaactgcgcacacaggtgggacagttggtgtgatgctgggaaagaagcagttccacgttgatcttgcgggcttcgcggacccgcggggagtttgtgagaatctccatgccttcctgaacctggttgttgcaggaggtaacgagatggtggattcccttcacttctacaacgcagacacggcaggcaccgatctcattgatatctttcagatagcaaagataaggaacgtgaaaaccgttgtcgcggcaggcgtccagaatccgggttccggcaggaacctgcagtggtatattattaattttgatggatacaagattcgtatttaccatgatgtggtccgccctcctttgaagtttccataaccgaagtgatcacagcgcaggcagcgtctggcttcctggccagcctccttgaggctcatgccgcattcggtaagtgtaaagtcacatttgcgttctccggcaggccgctctgtcaggttgacacgcccgcaaggagtacggtcggagagatctggttctggaatcttgacatcgcaggtgatctcatgattgtagccgagatactgatcaatgttggcagcggctactttgccggcagcgattgcacggatcacggttgccggtccggttgcacagtcgcctccggcgaaaatacccggcatattctgaatggaggtccatccggttgcctggatgatgccccattttgcgtcgataccctgttctacgaagtaacggctttcgatgccctgccccacagctgcgatgacgatatcacattcaaccgggatagagtcggtgccgatagccttcggtgaaggacgtccgccgcggatttctcccggcatctgctggcttacccagagagcttttacctggccgtcctcgtctgcttcaatccgctccggtgcgtaaagttccatgatctctacgccttcagccatggcactttcaacctcttccggaagagctgtcatatcagctttgcggcgtctgtaggcaactgccaccttgtctgcacccaggcggacagaagaacgggctacgtccatggctacgttgccgccgccgatgacacagaccttctttccggtaagatccggatatttgccgtcgccgatagcacggaggaattcgacagcggagataacaccgccggcatcttctccctcaataccaatctttttatcactatgagcgccgatggcgatgtagatagcatcatattctttgcggagttcatccagagacagctgtcctggatcgtttccgaccgaagtttcaagacggacttccacaccggtttccagaatgacattgatatcatcctgcaggcgctctcgtggcaggcggtagcttggaattccgtacagcagcatgccgccgagtttcttgcgtttttcaaatacagtggtctgatgtcccatcaactgcagataataagcagcgctcaggccgctggggccgccgccgatgatcgcgatgcgcttaccggtggaggttggacagaccggtgccggtacatatcctgccatatccacagctacacgtttgataccgcggatattgatagaattatccagcatgttgcggcggcagcgggactcacatggatgttcgcataccagcgcacaggcggttgggaatgggttatctttgcggatcaggcggactgcatcggcatagcgtccttcaccggtcagggcgatgtaacccggaatatcaactccggccgggcacagagccacacagggaaccggctgatcaagattactgcggcagcggttgtgtaagatatgttccataaaatcctctttgaagccgtccagtccttttaaaaccatctgggcagcggtatagccgatggcacagtcagccgtgctttcgatgacacgggctgtttcctccagcatggttaaatgcttcatggttccttttccgttcaggatgtcttccagaagattggagagctgcgcgagaccgattcggcagggaacacatttgccgcaggtctgtgcatggcacatttttaaaaatgcagcggtcaggtcgacaggacaaagacctggcgggctggcgatgatgcgccgttccagatctttgtaaagcccttctacgacattctgagcctcgctgttagtaggtataacgagtctgctcataaggtgtaaactcctttcataaatgtgaaataaaatgcgttatatttttcgatgcaattatgtgtttactataacataaaacgattgaaaaacacaaggtatttattgcaaaatatctaaaaaaagaaatgaaagtgaggtaaaaacagataaaatagataagaaagataggcataaagtgtgaaagaatgttgaatatatagctgcggtaatttcatgacaattaaaaggtgatgaaattatggattatttacaattaaaatatcatatttatgaaaatcacagccatatatatgaaaataatagggcgaaaattctatgatatttttggctttacagacgttcagtaaaaaacggcaggagccgtcaagctgcgctcctgccgttgggtccgccctgactgtttttgttcagtccgcaggcgtgttcaaattcgcgaagtttctgttctgcctcgggggtcagatggttcgggacatcgatctggaccgtcacgtactgattgccatggatggacggattcttcatggaaacaatgccttttccctttaatttaatcttggttcccgactgcgtcccggctgcgatcttgcacaggacattgccgtacagggtggaaaccagcgcctcaccgccgaagactgcggtggtaaacggaatgcggacggtcgagtaaacatccatctccttgcgatcccatcccggtttttctgccacggtaatgttaaggagcagatcaccggcctcaccgccaccggttcccggcatgccttttcctttcagacggatagatttaccggtatcgatgcccgctgggatgtgaacctgtaaagactggcgcttgccggtctgtgggttctgcagagtgatgagcttctcgcagccggatacggcttcatcaaagcttatggttacatcggacgtgagatcggaacctttctcacggaaatcggcgctgtgaaagccctgactgccgccgaagccgccaaagccagacccgccgccaaaatgagcgctagaaccgccaaaactggaaccaccggtaaaatgagtcccagagccgccaaacccggaaccgcccgtgaaatgtcggctgcgggaactgccgcccgaactcttgccgtggaatatgccaccaaacatatctccaaaaatgtcacccatatcgtccatgtcatccccggtaaaatggtattctgcataaccgcccggaccgctctgatagtgccaggaaccgccctgaccggtaccgccaaagccggagccaaatggaccatttccagaagcgccggcaccgccagctccgccgtatgcggcgctgttcgggtcaaatgcggcgtgaccgaagcgatcgtagagtttctttttttctggatcacttaagatcgaataggcttcgttgacatccttaaacatctgctctgcctggggattaccggcattggaatccgggtgatactttttggcaagtttccggaatgcctttttgatcgtctccgcactggcgtcccgctttatccccagtatgtcataatagtctcttttctctgccatcgattatcacctccgtagatgcagtgatttaagtttcaattatttaggttatgataaaagattgggtatgatagaagctgccgcatccctgcgacagctcctgaagctatctggctgctggcaacacaatgtgtgagccgcaactgcctatctgattattaaccttcgatggaaacgaaatgcttctcttcaaccgctttcttttccagctctttcgggaaggtcagggtcagagtgccattttcaaatttggcatggatatccttttcttccaagttctcgccgacgtagaagcttctgcttacattgccgctgtagcgttcctggcggatatatttaacggttttctgctcggctttagcgtccttcttggaagcatctgcttctgcggtcgttgcatctttctgattctcctccggcatatctttcgatgtaacttctttcgaaccgctgacggtcagatagccatctttcagctcaatctgaagttcgtctttcttaaatcccggcaggtcgatggaaacttcataatccttatcggtttccttgacatccgtcttcatcagctgggaagaggaagcgccatacagtctctggttaaagctcgggaaggaaaaatccatccagttatcaaagttatcaaatacactattattaaaaatactcggcatatacataagtcatctctccttttagttatctgtaaatgtctttgtagttatcatctatgtaaaaacattgggaggaaaaggggaactcattcatttccttgtcctttcctttgttctagctgtaatataacacacataattagcactgtcaagaggcgagtgctaattttctgtgaagtttttgtgaacaacgcaattattcacgggtaggcactttcggttccaaaagtgctgtaacgataacaggcagacaccttcgctctgaaagtgcctgcctgttacggagcagttcctatgtttttatatgattccttccactggcgggtgctgctgtttccgggttcagtaattcaagaatgccggaggctatatcagatgggagtcatcttacatctgatataatatccgatgttcaggatgatgccgacgatcgtagaaaccggggctgcgagaccgattttcgtcaggctggcgtccggctggatactcatgaaatacgctagcgggagacgcaccagaagcgtctggatgagtccctgtgtcataacccagagtgtctggttatttccgttgaaatatccgatcatgctgaacagaaccgcggtcacgatggactcaagtgcgaatcctttcaggtaatcatagctgttctggatgaccgccgcatccgtcgagaagaagccggacaggatatcgccctttaggagaaccagggtaaagacgatacagccgacgcacagaccgacgccgattcccgtaaaaagggtgtgcttggcacgcttgactttccctgcccctacgttttgggagacgaaggaagccatcgactgcatcagggcgctcgggacgagcatggcgaaattgacgatcttgcaggctacaccgtaaccggaggatgcctccagtcccaggcggttgacgaaggcgcacagggctaagaaggaaagctgggttaaaaattcctggagcgcgagcggcagcccgatggaaagaaatttcgggcactgggggttgaatcggaaatcatgccgggtgatcgtaaatggcagttttttcttaattaaaagaagaatcgcaaatacgacgctgagcgcctgcgcggagacggtcgcgatggcggcgccggcggcgtccatatgaagaccagctaccagtgcgaggtcgccgatcacattgacgatgcaggcaaccgggacaaagagaagcggcgactggctgtcaccgagcccgcggaagatggcggacagcaggttgtaggcgacgatgaagaaaatgccgcctccgcagatgcggatgtagctggcggtcagatccaccgcctcctcgggcgcctgcatgagaatggcgatcgggcgggcaaaaaagaccatgacgacgaataaaacggcggaaatgagcgtaaacacgatcgaagctccgccgacaaccgcgccgatctgctgcggtttcttttcaccgagatagcgggcgatcaaaaccgtgatacccatagcgaactggattacgacgaaggtgacgaggtttaagacctggctgccggtggagacagcggaaaggccggaagtcgaaccgaaccgtccaaccaccagcagatcgaccgcgccgtatgccgcctgcagaatcagtgcgccgagtaccggaatcatgaaggcaatcagttttttcagaatactgccttgtgtaaaatcagctttatcattgttcatgggaatccctctgtttgcacataatctgataaaatgtctccatcgtctgaaccatctggcgggcatcttcctcagagatggtatctaaagagggggcgagcgcgctgaagtattcggcgtcatacgtctgtgagagtgccctgcccgcttcggtgatggaaatgtaggtgatgcgtctgtcgtccggcgaggttttcttttgcagataaccacccgtctccatctccttgacggtccgggtcacgccggggcgcggcaggttcagcgcatcgctgatgtccgatattttcacgtggacgccgtttcgttccagcgactggatgacatccagatattgaatataggaggaagtgactcccttcggcagcggcggaagcatatcccggatccgcttgccctgataacaggcgtccaacatccgcttgattgtttcgatggtcatatagaaagtctccttatcaaatagttgcttgcgataattatcatagataattatatagggaaatgagaagttgtcaagaaaaaaataccgccagctcccgggatgggcgctgacggcgcgtgttgttataatgtaagggcagttgtgttgctgtttgtatgtaggtgggcagcaacacagaatgcagcggcgtggcattttatgaagtatgaaaaatttccatagccgcaatgtgtttggatagtacgttcactttccatggtgtttaccatgaataatagcaattactttacttcaactaattcgatcttgaagttcagctccttaccagccatctcatgattggcgtcaaacgtgatatttacctcatcctttgcgataacctttaccgggaacggctgtcccatctggttggttaagtaaacctgctgacctacctgcagttcctcggaacccggcagtttggcaatctcaagctccagaattgcgttcggatccggcatgccgtaagcttcctccggcatcaggtggatctcctttacctcgccgacttccatatcagcgacagcggcgtcgaagcccttgatcatctgaccggcgccgcagacaaactccagcggttcgccgcgatcgtaggaagaatcgaactgtgtgccatcgttaaaagtacctctgtaatgtgtgcggcaggttttgccgacgttgcgtcctgtgatttcagacattttaaaatcctccaaatgatattgatatgcggtaatggacaatcttcctcaaacggacaatttccagtgatttcagatgcatatttatcagtatactagaaaacaaggcgaatgggaagagaaatgttgtctctccggtaccgatattgtcagtttttgcaacgaggatggggcaagctggaagcagagaagatcagttctcccatcgaatctgctccccctgcaccagcggaaaccgcgaaagcgtctccccgtccaggttctcccggttcatatccactgccgtgatctgatggttttcatacgtcgtgtagtagtaaatccccttatccgcattgcagcaggaggtgtagagtgtgatttcatattttccatcggagacctcgcagcatccgcgctgctggtcaaccgaacctaggatatggaaaaactggctgacactttctagttcggatgcgccggagcgggcatttgattttgtaaaagcgacccgtgcaaaccgggaagcggaggagaggtctcccggaagtccgagagcgcccatgccgcggctgtaggttgtaagcggcagatcggcagaaaatgtattctgcggctgcttcggggacaggttcatgtaattgttgagggagaacagctgctgcgggaacggcggattgtttgtcaggacacccaccggattgtcgtagatatgcagtccgtccgccatcggctcgatgacgatgcattcatttttatcggcaagaatccagtgaagctgcgccggggcaaactgctcgttgaatggggtgtcggtcagtaccatctgggcgaggtggacgcgagcctctttcacggacgcgcactggctgagaatccaggggatgaactcaaactgtgcgatgttgtcatgatcctcctgcggcttctggtaggaggcattgccgacgaaattcagtcccgccatgcaaagccctttctcattaaaagcatcataataaagcggataatcccccgccacatgtgccatgccgatgatggcatagtgggtcgaaaccgcgcttgcgtggcggaaagtaagtggatagttgcgaggtgtgacggttacttcgtccccgtaagaaaattcataatctaaggttctgccgaagtagaaatcggcggttttgtaggttgcggctgtacacatggtcatttctcctttttctgtttcaaagtgtgtgggtcagatggtgtttatcaatgttctatttatttgttgtatgctttatactcaactgcatcattgtaaaagtggaaatgaatcttgctgtttttagtatatttagtatatcaaatttttgagaaaaatatagaggaaaagcggatatggaaatagaaagagattggtcagatcattttaggacttaaagtgaaaggtaaaatcaatctgcttcacaaatgtattgtctgggtatataataaggggcataaacaaatagaaatgataggcaaataattttttttacaggaggactcacccatggctgatccagatagaatccagataaacgaagcccgcatccgcgctgaatttgatgagctggcgcggatcgactcagaaagtttcggggaacgcgagatggcggatcgcttgaaggaaaagctcgcagagctgggaatccaggcaaaggaagatgacacagccgagaaaataggaggcaatgcgggaaatctgtttggaacgttaaagggcgggatgtctggcacgccgatcctgctgtccgggcatatggacacggtcgcgccgggaatcggaaagaagccggtttttcatgaggacggaaccatcacttcggatggaaccaccgtgcttggcgcggacgatctgaccggggtaatcgccatcttagaaggcatccgtgccgtgcaggaggcagaaatcccgcaccgggatatcgagatcctctttgcggcggcggaagagccgtttacaagaggaagctcggagttcgatttcagccagatgaaagcgaaggaatcttacgttttggatgtaactggaccagtcgggacagcgatcctgcaggcaccgacgatcctttcctttgaggcggcagtcaaagggcgcgcagcgcacgctggatttgagccggagaaaggcatccacgcgattcagacggcggcccgcgcgattgccgcattaaagctggggcacgtggatgaggaaacaaccctgaatgtgggcttgatttcgggcggttcggttgtgaatgccgtgccggaactctgcacctgccggggcgagatccgcagctacagccatgaaaaggcaatggagaccctggaagatgtccgtgcggtgtttgaaaccgctgtcaaagaggcgggggcagagctttctttcacacaccgcctccatgtcaaagccttccatctggaaccggacgcgccggtggcagttcattttgccggggcctgccgcaccctgggaatcgagccgaaattcggcagcaccttcggcggcagcgacggaaacacgatgatgcagcacggaatcccatgcgcggtgctttcctgcggtatgtacgatgttcattccgtgcgggagtatgcgaaggtgggggatattgtgaatggggcgagattgatcgcggaactgattacgcaggggcaagaagcgagtatagagtaaaactgaaaaatgttgacatagccgaacggctttattatttcaccaaaacaattatatagccgttcgaaccaaaaatagggtgatttggaatgaaaataacatcgacaagcgctgaatgaaatgtccatccagcttatggaagaaggatatccaaaggcaagggatattcgagagcagatattaaaagagggcggatattctcatttataaaagtacctttccattttggtagagttatttttgtaactattttgtaagaaaagtaagaaaatgtctatatattttggaacataaatctgatattattagaataaataagagacatgtctggttttgcaaaaataaagagaggttgctgttttgtgagatttcagccctgtcaggatagtgaatcgagaggtgatcgatatgaagaaaaaattctggctgatattataccatttaggcggttcggtggtacttttattgttactgtacacgtctcttcaaggcttgacaacggtgaccttatgtttagcgataccggtattggcagcaagtattatagaggcaaaatttgaatggaaatttttacgagagaatccggaaatcaaaaaggatacaacctatcggatcgcaaaaacactcggatatctttgtggtcttattttggtggtaggagtatggcctcgtcattagaacatttttgcttaataaaagactctgttacacttggattgaatcgagaggtgattaatatgaagaaaaaattctggctgacattatacaatataggcgtctctattttattcttactgtcattgtacagttatgcaaaaggcatggcaggcttttctttatttttagcgctggcagtttttggagaaattgcggcaagggcttttattgaatgcaaatacttgcaggagagtccagagataaaagaggatacagcttatcgaatcacgaaagtattgcgattgctttgtgaaattatcttgatcataggagtatggcggattcgttttaaatagccacattctaaaaataacacttatgatatattccatattcaatgaaagaggaggcatccgtccatcaacctcggttgcttcctctttctctatctatttcaatcaaaatctatttcatcatatcgcgtaaaaccgtcaatatctccatcgccgccgcttccttgctcatctgctccagatggcgggtctgctgcttatcgatcagcgtgatgacgtttgtatcggtgccgaatccggcgccggctacatttaagttgttggcagcgatcagatccaggtttttgcgctccagcttgccgcgggcgcgttcctccagctgggaggtctccatcgcgaaaccgcagagcagctgtccaggacgtttgtgtgcgccaaggtaacttaaggtgtcctcggtgcgctccagcgccaggctcagatcgccgtcggattttttgaccttttcatcagaaacgactgccggacggtagtcagcgacggctgccgccttgatgatgatgtcctgttcctcgctccgggaggtaactgccttgaagaggtcgtgcgcgcttttgatgtggacagtattgacaaacggaggtggagtcagcgaggtttggccggtgacgagtgtcacatcggcgccgcgcagcatcgccatccgtgccagcgcatagcccatttttccggtcgaatggttcgtgaggtagcgcaccggatcgaccgcttcctgggtcggaccggcggtcacaaggatcttctttccagcgagatccttcgggtaggcgatcgcgcggagaatatattccagaatcagcccctcatccgggaatttgccctttccagaatcgccgcaggcgagcagaccgcttgccggttcgatgatggtaaagccgtaatgccttaacaggtgcaggttgtcctgtgtgatcggattctcatacatccgtgtgttcatcgccggagcaatgatgcgcgggcactggcaggctaagagcgtggtcgtcagcatatcatcggcaagtccgtgtgccagtttggcacagacgttagcggttgccggtgcgatgatagccagatccgcttttttagccagttcgatatgttctacctcaaatttaaaattccggtcaaaggtgtccgtcaggcatttattgacggtcagggtctcaaaggtaagcggtgtgataaattccatcgcatttttagtcataatcacgtgtacatccgcgtgctgtttctttaaaaggctggcaaggttcgccgccttgtatgcggcgattccgccggttactcccaaaataatcgtttttccagttaacataatatatatcctttcggtttgtactctggttttctgggtcatttttgaacagcatagcatctggaggaaaaattgtaaaccatttttggcttccgttctctgccagattctttggtaagcgcatataacaggaggggaaagaaacatgtattttgtgaaaagacaataaaaaacagtacatattctggtagaattgttggttgtatgttgaaaagtgatgtgatatagtgtggaagtgtctgctgactggcctggttttcactggatgtgaacagagacaggcggcagcagttgtattgtatcccatagaaaacaggcactgaacgtgctggcagcaaatccgcggaaagcggcagaagaaacttctgccggaatgtgcgtatctgcatacggatctgtatctgagatggagaatcataccggaagagacggggaattaaaatgccctggctcgcagcttttctggatggtatcgccggaaagaacggaatttgtaaggattttatgcacatgatattggcgcaggtaagcggcagtctggcgaacaaaaggtgcagcaggtttttcgaacgggaataataacaaggaggaaaatttcatgaacacaacaaacaacacatctaaacttgtcatcttaggtcttatgaccggcattcttctgctgatggcgtacactcccctcggatatctgaatattgggccgctggcgattacgtttaatgtgattccggttgcgatcgcggcgatcacactgggaccggcaggcggcgcagcgatcggtgcagtcttcggcatgaccagctttttacagtgcatcggcatcggcggcagcagtgcgatgggcgcgatgcttttcagcattaacccgtttttggcatttgtacagagattcgttccgcgtatgctggatggtcttctgttaggctacattttccagtttgtacgccgcagaaccgatgcgtacatggcaagtctggtaaccggattctgttccgcgtttttaaatacagttttctttatgacggctttagtcgttctgtttggcaataccgaatatatgcaggggctgatcggcggaaaaaatatcatcctgttcgtatgcggtttcgtaggaatcaatgcagtatgcgagatggtatcgtccacaatccttaccggtgcagtcggtgcagcgctttaccgggcaaaatttgtaccggctctggaaaaaagcagggggtaagacagtatgattttggcattggatatcggaaatacgaatgtggttctcggttgtattgcggatggggaaatcctctttaccgagcggatggcgacagacagcgggaaaacagagcttgactatgcgatttccctgaaaatggtgctggagatgcgggaaatcaaggtaagtgagatcaccggcgcgatcatcggttcggtagtgccgccggttacatccctgatgcgggaggcgatccgcaaggtgacggggcaggaagctctggtcgtcaatgtggatatgaatatcggtctggaagtgctgatggacaatccgtcctccgtcggtaccgatctaatcgtcggtgccgtcgcgggaatcaaccggtatccggtgccgctcattctgatcgatatgggaacggcaaccaccatttgtgtggtgaatgagaacaagcagtacatcggcggcatgattctgccgggaataggtgtatcgatgaattccctgaccagccggaccgcccagcttccgcgcatcagccttgacccgccaaagcgcctgatcggcaagaatacggttgaatgtatgcagagcggcgctctctatggcaatgcgtcctgcatcgacggcatggtagaccggattgaagaggaactcggccagaaagccaccgttgtagccaccggcggtcttgccagaaaaatcattccgctgtgccggcatcagatagaattagatgatgaattgttattgcgggggttgtggattatctataagaagaataaataagataaaagcggctggaaaaaatcaagccgcttttaaaatgcaattaaaaaagatgcagaagcacaaatatagtgcgagtgattaatttctgtgttatactgatacagctaccacccctagacaggtgcggaaagggggtgtactgtgtgggaggaatactgtcattcgtgctctctgtgatagccagcattgtggcttactatatttgtaagtggctggatggagatgagtaggtagcaaaggtttaagcctccttttcaaaaaaggcgagcccccggtgtcagcacacaccgggggctttttgtgtactctgtgagtactgtcattcgtttgcctattggcattatagcatatggaaaaattgatttcaatatgcatataatataattttaataggtaatctcccgtccttcttttctccactccctaaactgtgccgctgcggaaagcagaagatcacaggaagagttgagggcggtctcgacggaatcctgcaccacgccgatgataaatccgacaccgatgacctgcatggccacatcgctggagatgccaaacaaggagcaggcaagcggaattaagagcagggaaccaccggcaacaccggatgcgccgcaggcggaaagtgccgacaggacgcttaaaatgatggcggtcggaatatccaccggaattcccagcgtattggttgccgccagcgtcatgacggtgatggtaacagccgcaccgttcatattgatggtcgcaccgagcgggatggtaacagagtaggtatttttgtccagtcccatttcctcgcagacttccatgttgatcgggatatttgccgctgagctccgggtaaagaaggcggtgaccgcgcttcgtttcagacacttgaaaatcagcgggaacgggttttggtggatgcaccagtatacgagaatcgggttggttacgaagtagataaacagcatcgagccaaccagcacggcgagaagccgtccatattcggtaaatacctgtaaaccgttggtggatacagtgtcaaacacaagtccgagaataccgaacggggcaaagttgatgatccaggtaacaaccttggacagtgccgccgcaaaattgtccataatttctttcgtgcgttcgctggcgccgcgcatcgccacgccgaagagaaccgcccacgccaggataccgatgtagtttgcctctgcgatggaggtgatcgggttctttacgacatttaataaaagtgtctgcaggacttctgcgattccctgcggggcagaggtttcttctgcagcctgtgcaagtgtcagggtgatcgggaacagtttacttgcgacgaccgcgatcacagcgccgagcagtgtgttgaacaggtaaaggcagataacggtgcggatgatgccgccgtggctctgctttgcctggcagagggaactgataacaaggaaaaatacgagcaggggcgcgatgccctttaatgcgttgacaaatagatttccaaggattgagagtccgactgcctgcggaatcatcattcccagaacagcgccgagaatcatgccgcccagaattcgtttaggcaggctgatggctgtccagcgttcatagagtgctttcataaaatacatacttcctttgtgatgatgaaatggggttgacgagtgtcggggagctgagtcaaatgtgcaaatgcaatatctcccgaatgattcaactgtctgtgcagcatccggcacaaaatcacgtagattctattatacaggagatagaaagaaagggaaagtgcttttttatggcaaagtggtagagagatagaaaaaatgatttttgtccgttactgttcacgcatgtgtgaacagtaacagtggcgataagcgaaaagaaaacttgtatttctatctgctctatgttatactcatacccgttgcaaagcccgcaaaaacaaggtcttacagggctgccgccgatttccggcgtaaaatgaatcgagtgttcgtgaccttccactcgtaaaacaaaactaaaggagaattgaatatgaaagaaaacaacctgaaaaacacgtattttctggcgtatggtgcggcgatcgcggccatctacgtagcgctgacgatggcattccaaccgatcagcttcggaccagtgcagttccgtatttcggaagcactctgcatcctgccgttctttaccccggcagcgatcccgggactctttgtcggatgctttttatccaatctgttctgcggggcagccggactggatatcgtattcggaagcctggcaaccctgatcggtgccgtcggttcctatgcgcttcgcagaagcaaggttttagtatgtgtaccgccgatcctggcaaacacgatcatcgttccgtgggtgctccgctttgcatacggctctgaggatctgattccgttcatgatgctgaccgttggtatcggcgaggtgctggcaatcggcgtgctgggaagcattcttctggcggcgttaaaccgttataaaaccatgctgttcggcaagtgtctggcaacgggacgctaagaaaaagacataacttaaatgatataaaagatgcatgttacagacggatcgcagtgcgatggctggcgtgtatcttttatttttttttgccttatattgacaatttcatgtaaaagaagttaaattaaaaggacgtgaaaacacaatgcctcgcggttccatatcgtttttctatggcgtctgcgaaaacaaaaaccgcctgcggcggggaaggaatgcacaaatatgagtgagaatgtatatcagattgattttaataaaccagaatccgtccatttcatcggaatcggcggtatcagcatgagcggactggcagagattttgatggacgagggattcactgtgtccggctcggacgcacaccgttcggagctgaccgataacctggaggcgcgcggcgcgaaggtatatatcggacagaaagcggagaatatccaggatggcatcgatgtggtagtctacacggcggcgattcacccggataacccggaatttcaggaagtaaaacggcgcggcatcccgatgctgacccgtgcggaactcttgggcgagatgatgcggaactataaaaatgcgatcgcgattgccggaacacacggcaaaacgacaaccacttcgatggtgacggagattttcttgcaggcgaaaaatgacccgacgatctcggtcggcggcatccttccggcgatcggcggtaacatccgcgtcggcggaccggaatttttcgtgacggaggcgtgtgagtataccaacagcttcctatccttctacccgacgatggcggtcatccttaatatagaagaagaccatctcgatttcttcaaggatctggcggatatccgtcattccttcaagctgtttgccgagcgcgtaccggctcagggcgcgattgtcatcaacggcgatatcgagaactatcaggagatcatagaagcggcaaaaggcaaggttattacttttggtcacagccgcggcaacgattacagtgccggtgatatccagtatgacgattacgcgcatccgtccttcgatctttatatcgacggtgagaagaaagagcgcctgacgctcggtgtggcaggtgagcacaatgtatacaatgcgctggcagccatcgctgtttccctggaaaatggcatctccatggacgccatccgcgtgggactggcacattttaccggaaccaaccgccggttcgaaaagaagggtgaggtaaatggatttaccatcatcgatgactatgcgcatcatccgcatgagatcgaggctaccttaaagacggcgcagaactatccacacaagacactctggtgcatcttccagccgcacacctacacgcggacgaaggcatttctgccgcagtttgccgaggcgctctcactggcagataaagtcattctggcggatatctacgcggcgcgcgagacggacacgctcggcatcagctcagaggatatcgtgaaacttctaaaagaaaaaggaaaagaagcctggtatctgccgacgttcgatgaaatagaaaaatttgtcatggaacattgtacacagggcgacctgttgataaccatgggcgccggagacgttgtaaatgtaggggaaaacctccttgcgaaatagatgcactcccagagtacatatagttatccacattatccacatagttttcaacatattatgtaaaggaactatgtggattttttgcgcctaaatgcggaaatggggaaatgtcgaaaatgttgataaaataaggattttgtcggaggaagggttattttttgaggatttttgaaggctttttccacattatccacattatccacaatcaaaatagtggaaaaattggtctaaaagtgtcggccgcgaaccataattaggagtatttctttttaaaaaaaggtatgttatgataggaacagacgcagtgagcctgtgataaatggatgaaaactgtcttgtccagagcaaaattgtggaaaagtccggaaacaaaatcaaaacggtggaaaagtaagaaaacaggaagatttggatggaacaaatagagaatatttcaaaataaaagtaaaatacagcagtttgaatggttcacacagccgcagacagctgatagataaatggtaacaggaaatgtgaggacacagaatggctaagagggaagttagaagatgggaataggactcaaaaaccggctggcggtgggcgcgacgccggttccggacgtatttattgatacatatatggcgggagccagtggagaatatgtgaaggtatatctgtacctgctccgccaccagcaggaggaagtctcgatcggacagatcgcggacgcgctcaaccacacggaggcggacgtgcagcgcgcgctggcatactggcagagagccggggtgctgggaacggaagtcggtgaagaggcacagcgatcgtttcaggagacgccgggacagcaaatttcgccggtttttgcttcaacggaatccctggcaggcgctggttcctttgcgccatctgccaaaactgccgcgcgggaagccgcagcctgcgatatgtcacgcctgacctcggatgagtcgtttaagcagctcatttatattgcccagcagtatttaaataagctgctcacaccgacggactgccagattcttggaaatctctattcgaatctgggattttccggggaattgctggaatacctgattgagtactgcgtgcagaaccatcacaccagcctgcgctatatggaaaaggtggcgctcggctggcataagcgcggcatcaaggatgtggaacaggcgaaagcgagcggcaggggctacacgaagggttcattcgcggttatgcgggcgatggggctttcggaccggagcccggcggaggtcgagagtgaatttatcgaaaaatggttctgggagtacggtttcacgcgggagctgatcgtcgaggcgtgcagccgcacgatccggcagatacataaaccgtcgtttgactatgcagacaagatcctgcgggattggaaaaatgccggggtcaagagcttccgggatgtgtcagagctagataaaaaacggaaggaagaaggcggggcgaagcgccggcaggcgtctgccggcagcagccgttcttccaaccggttccacaatctggaggaacacggatatgattacgacgagatggtatggagcatgataaacggagcgcagaagacaggaggggacgatggcactcagtaattcgcagtatgaatcgatcatgcgtgtttataaccggacacagcttcagaagaaacatgagctggacgcgcgggttgatgaggtctatgagaaaataccggcggtccgggagatgaacgacgcgatcgccgccgcggcggtcaagagcgcgaaagagcttctggcgggcgatgcggacgcggtgaaacgtctgcgagggacaatcgcagacctgaaagagcagcgccaggtgctgatgagcgcctacggctatccggcggactatctggagatgcagtataattgtccggactgtaaggataccgggtacaaagacggcataaaatgccactgtttccgtcagcgggagatcgatctgttatacgcccagtcgaatatccgggaagtgctggagcgggaaaatttttctcatttttcctatgattattttgatgacacgaagatcgatccgcgtagcggcaagactgcccgcgcgtatatggagcaggtgacggcgttctgccaccgctatgtggacggatttaaagaagaaaagggaaatatcttatttaccggaaaaacggggcttggaaagacgtttttaagcaactgcatcgcgaaagagctgattgagcgctgtttcagcgtcgtgtatctcccagcggtggagatgtatgagatattttcaagggaccgcttcgcaaatgatgcgaccgatgaggatcgcgaccgctcccagtatttattagagtgcgatctgctgatcatcgacgatctggggacggaactggtgaatacgtttacgacttcccagctcttctatgtggtcaacgagcgcttaaaccggaagaaaggcacgatcatttccaccaatctgccggtcaatgagatgcgcgacgagtttaccgaccgcgtcatgtcacggatcataagccagtatcagatcattccgctctacggcgaggatatccggatacgaaaaaagctggaaaaccggtaatgggttgacttataagggacataatgatataaaagagacgttagaatgcgctaacatatgcaaaaaaaagcgaattaacagagagtaaacaggctggaggaaaatggaaaatgctgtacgaagagaaaatcattgagacgataccggtaggtccgctgggactgattccattaaagggatgtgaggaactggtaggcaaggtagacaaatatctggtggactggagaaatgagcgcgagagcgagcacaagacgtcgatcgcattttcaggttatcagagagactcctacatcatcggggcaaacacaccgagatttggttccggcgaggcaaagggcgagatcaaggcgtcggtgcgcggcgatgatctgtatctgatcgtggatgtctgcaactacagccagacatattctctgtgcggcatggtaaaccatatgtccccggatgatcattatcaggatctgaaacgtgtcattgcggcagcaggcggaaaggcacgccgtatcaacgtaatcatgccgttcctgtatgagagccgccagcataagcgctccggccgtgagtccttagactgcgcgctggcactggaagagctggtagatatgggcgttgagaatatcattacctttgatgcacacgatccgcgtgtccagaacgcgattccgctcaagggttttgagaccgttcagccgatttaccagtttatcaaatatctgctgaaaaatgagaaagagctggagatcgacagcgatcacatgatggtcatcagcccggatgagggcggtatgtcccgcgctgtcttcttctccaacgtgctgggactcgacatgggtatgttctacaaacgccgcgattacaccaggatcgtcaacggacgcaatccgatcgttgcccatgagttcttgggatccagcgtagagggcaaggatgtcctgatcatcgatgatatgatctcctctggcgagagcatgttagatgtagcgaaggaattaaagagccgcaaggcgagaaaggtattcgtatgcgcgaccttcggtctgtttaccaacggactgcagaagtttgacgagtactatgagaacggtctgatcgaccgcgtcctgaccaccaacctggtataccagacaccggagcttctctccagaccgtactatatcagcgtcgatatgagcaaatacatcgcgctcatcatcgataacctgaaccacgatgcctccttaagcgagctgttaaatccgaccggacgtatcaataagctgctggcgaagtatcgggcgggaatacgggactaaaaatagacctttaaaatagaaacaaaaagaacgtcatttccggaccaatacatgtcagaaaatggcgttctttttaatgtcataggaaacaggcaatgtcacggttatgtacgaaaagagtcctacaaccgcacttcatgcaccgcagcttcttcttccttcagcacccgcatctccctctcatgacaagtaaatacaagaatctgcccggaataggcggttggcagccatttgaggacggttctcaggcgctcgtcgtcgtagaggacgaagctgtcgtcaaagatgagcggcagccggtctgcatcgccctggataaagtgggcggcggcgaggcgcagcgccagatagatctggtcggcggtgccgctgctgacctgttcaagcgggatcagcttccggcgggtgtttaaaaacgcattcaagttctcatcgatgctgatgctggaataaattccgccggtaattccggcgatcaggtcggacgcagtcttatttaagtacaggccgaaagaatcccggatggtggtggaaagctcttttaaggtatcaagtgccagatccacggaggcgatctcctgatggatgcgctcattttcatttaaaatgtgtttgagcgccgctgcccggtctttgcaggcggataggtgctccagctttttctctaactcccactggacgcgctgttgttcctcgatgacaaggctgcagtcattctgctttgccatcagcgccgagatctgttcggaacgttttaccagtgaatcctccgagtttgtaacggcgtggcagagcgtgatgaagcggtccagccgctgggacaaaagcttcatggattcatccgaaatctcggattcgcccaggtggcggcgcaaaatctccgataaaacagaggcacttttctccgcctcctgcctgcggcggctccggtgccgtgtgacgcagattcccagcatgagaagcacaagagcggcgacgccaaagatgagggcggtgggaccagctcccagccacggggacggaagcgggaagaacgccagatatccgcagtatgccgcgcagatggcgcagatcgccgctgcgataaagaaaaacacctggaaaaaccgggatcccttgctggaggaagacacctgtgcatgctgatagtcctggtagagtgtttcagcctgactgcggtacgcctcgatggacgcctcgtccgtaaaggaaaactcatccagtacctgacggctcttctgcagccggtcggataaatcttctttttctattttctgatgttccagttcatttcggaccgagtcacgcagttttgagtattcctgtaactgattctcatattttggcgaagaaagctcgcgttccagcgcgcggatctcgctaagaagggaggtatagttgaccgaagcctccgggcttaactgggattcaaattgtttgcgctgatttttcagataggcggtcgccttagtgatattgagcgccatattgccagaggtattcatgttggcaatatagtttttcagttctgaaaccatgccttcatcggtcgcactctttaactggctgatgctgatggtgttgttgtacatggtttcactcatgccgcccaaaatttcctgcaaaacggcgcggccgtccggttcctcgcgtccggtcgtctcgttgatgacggtaaattccttcttatttttctgaaacgagcgctcgatccggtaaatggtgccgtcgtcggattcaagccggagctgcccctcgtaggtgacgctgttttcccacggctcatatttgctgtagatgtcgtttctggcggcgcgccccctctgacgctcgataccgaagagcatgccgcggataaaggtgtggatcgtggatttgccagcttcatttttaccgtaaatgacgtttaacccgtcctcaaaggagacggctgtgtcatgaaattttccaaacccactgatataaagatcaagaaaacgcatggaagctaactcctttcatcggtggtgagaagcagggcgtggatgccgtaaaacagcgcctttttctccaccggactcatgtccggttttttcagtgcctggatgtaaaagccgatcatatcgcttggatgctcggcaaacagggcggaaaaatcgtattgcggttccgtctcatcgatgatatccgcgatgcggaaacgcagctttaaggcgtccagatcgaaagaaatatcgggatcgcgcatgccctgcaccttgaagcggaaaatattgtcattgccgcgctgttcgatctcatgggcgatttttaagtacagctccgtgttggtcgtatctggcgtgacgcggacgatgagcgggatgtagcggagcttcgccatcggaataaagtccagtgtcgttacctgacagctttccgggtcgatctcgccgtaaaggatgccgtgcctgccggtctcggtcttatcaagcggctccggggaaccgcagtatgccatctttttgtccagtaggatctctggcctgtggatgtgccccagcgcgatatacgaaaatccggaggaagccagcgccgcccggtcgatcgggacgtggttcgcgtcgccgccgtgccccagcagaatgtggatttttccatcctccggcgcttcaagagcatcgaggcgcggctccgggatctccgcagtatagtaagaaaagccggtcacctcggtgttgatatcctcaaaatagacggatgagacatcctcactttccagaaacgtcacgttggaagcccaggaaaagcttaaaacagctgaatttttgcggatccggtcgtgattgcccgcgatgatgacaacctgtgtctgcgggatcgtggaaaacaggtaattgacctctttcaggtcgcgcagcagcggctggcggtggaacagatcccccgcgatgaacaggcagtccacgcgcagttcctttgccttggcgatgatggcggtaaacgtatcgcggatatcgcggctgcgctcccggctccacggcttgtcgctgtccggggacatgccccagtggatatcgccggtatggataaatttcacattctctccccctttcaggagtctgtcgctccgtatgtacatattgaaataataatagaaaagggactgctgcaaatagcagaaagcagattccagtatttgcgacagccccatagttgcttattgtttacagttcacagttgtttacggttcttgggaacgggatgacatcacggatgttggaaacgccggttaagtacatcacgcagcgctcgaatccaagaccaaatccggagtgtcttgcggaaccgtatttacgcagatccagatagaaaccgtagtcctcctttttgagtccaagctcgtccatacgcgcctctaacttctctaagttgtcctctctctggctgccgccgatgatctcgccgatgcccggtacgagacagtccatcgctgcaacggtcttgccgtcctcgttcatcttcatgtagaatgccttgatctccttcggataatcggtaacgaagaccggtttctggaagatcttctcggttaagtagcgctcatgctcggtctgtaagtcacagccccagaataccttgtagtcgaattcgtcgttgtgctcttcgaggatgcggacggcctcggtgtaggttacatgaccgaactcggaatttaatacgtggtttaagcggtcaaggagtcccttgtcgatgaactggttgaagaaattcatctcttccggtgcgtgctctaagacgtagcggatgacatattttaacatatcctcggcaacttccatgttgtcgttcagatccgcaaatgccatctccggctcgatcatccagaactcagctgcatgacgggtcgtgttggagttctctgcgcggaaggtcggtccgaaggtgtagatattgcggaatgccatcgcgtaggtctcgccgtttaactgaccgctgacagttaagttagttggttttccgaagaaatcctgggagtagtcaaccgtgccgtcgtcctttttcggaacattgttcagatccatcgtggtaacctggaacatctcaccggcgccctcgcagtcacttgcggtaatcagtggagtgtggacatacacgaaatcgcgctcctggaaatactgatggatcgcgtaagctgccagggaacgtacacggaacacagcctggaaggtgttggttctcggacgcaggtgggagatggtacgcagatactcaaggctgtggcgtttcttctgaagcggataatccgaagcggacggtccctcaacggctacctcggtcgcctgaatctcgaacggctgctttgcctccggggtcgcaaccagggtaccttttacgataatggatgcgcctacgtttaacttggagatctctgcaaagttcggcattgtatcatggtaaacaacctgaagcgtctcaaagtagctgccatcgctcacaacgatgaagccaaagttcttggaaccgcgcacgcttcgtacccagccgccgatctgaacttctttgtccagatacgtctctctggaacggtaaatttctcttacagtggttaaattcatctcagtaaactccttattttgcaaaataaactttctcatgcggactgccctgcagtgtgcagaccgtgtttaactttcattatactgtattttccttgtagattcaagggacggagggaaatttgctaggggaagaaacctgcccgtataaaaagtgatagctttaagaattaacagaaacaaatgcaaaaacagaaggaaagggcagaaaacaagctgggtattgtgtcaactctgtgaatacttgttttacagagacaaatgcctggtgttagaatggggataaagaaagaaaaccgcggaatactttcaaagagtctatcaaacggaaagggtgtagacagaagaattatgactgaacttgacgcaaataaaaaagcggaagagcttctgaaaggtgcatacgatttacatgtacattcatcgccctctgtttttccgagagaattggatggattccagttgatccgggaggcagacgcggcaggaatggcgggagtgatgctgaaaagtcattatgaatcaacggctttgcgggcagaactgatcaaccgctacagcggctgtaaggcgaaagcgtatggcgggctctgcctcaactgcccggcagggggcttgaatgtatacgcggtgaaaaatgcattgcgggcgggggcaaaaattgtatggatgccgacccgggatgcgaaaaacagcctagtattcggaaacatggagggagatttcttcgaccgcaggggtattaccattctggaacaggatggaacattaaaagaatgcgtctacgacatcatggatgctatcaaggaaaaggacgcatttctggcaacaggacatatcagcccggaggaatccctgattttatgcagggaaggacggaaacggggggtcaatatgattttgacacatccagagtttccaaggacgagaataggaagagacgatcaggcggaactggcgaagctgggggttgtgattgagaagaactggttcaatctggcacagaaaagtgtgatgccggaagagatggcagagacgattcggaccgtcggaagcggacacgtatatctggcaacggaccgcgggcagaaaggggcaccgacacccgtttcggaattgaaacggtttatcgccgtgatgctgacctgtgggattgcggaagcacagatacgggacatggtccagaaggtaccggaagaaatggtatgcagataaatttatataaatgcacatttttttagaaggaggattttacattatgaggaaagacagagtattggcaggggcattagcagcagtgacagcgttcagcatgacagcgtgcggcggcggacaggcaggtggcaccacacaggcagcggcggcaggaacacaggcggcagccgagaacaccgctaacccgaatgccgagacaacactcagcatcggttatacgaccgcagcaaacgcggatgatccgtatcactttactgcaaccaagttcaaagagatcgtggaagagaaatccgagggtagaattgcagtcaacctgtatgcgagcagtcagcttggttccgagccggagatgtgggaaggcatgcagaccggaacatgcgacatggcagtcatgacgaatgcatatgtttcttcttatgtaccggcaaacggcgcactggatcttccgttcatttttagcgatctggcacaggcacgtgagatcgtagacggcgatttcggtcagtccctgatcgacaatatggacggaacaggcgttacatgtcttgcattttctgagggcggattccgtcagttatgtacaaaggacaaagaaatcaaagcaccgtccgatttgaatggactgaagatccgctgcatggagacaaagatttacctgtctgcttataaggcactgggtgtaaatgcaaccccgatggcatggggcgagcttttaaccgctctgcagcagggtaccgtagatggctgtgatgcaccgttaagcgtattatataccaacggtttcccggatatctgcaaatacattgataatgtaaacctgttctattctccacttccggtatgtatttctaccagcgtatatgagtccttatctgaggaagatcaggcgattttaaaagaagcagcacaggaagcagccaaagaaacacgtgaaaataacgatgcaaccgctgaaaagatggaatcggatctgacgtctcagggcatgacgatcgtatcttctgaggatgtagatacagaggcattccagagtgccgtacagccgtgctatgacgagatggaatcctacatcggttctgagtgggtggatcagattaaatccctgaccggcacggaggggtgattgcagaaagagggtttgacagcatgaaaaaattacagcaggtttcagacataattaataagtgcgtcagttacataggaatggtgatctttattgtcctgattgttgcctgtgtggcacaggtgtttttccgcttcattctgaataattcactgtcatggagcgaagaacttgcccggtactgttttatctggatgcatatgctgggcgcttccttgttgattgagggaagcggacatgctacagtaacagcaatcctggatctgatgcatggaacgcttcgaaaaattgtcgatattatcattgaattagttatcttttttgatggaaccgtaatgctgtacgcaggcttaaagcttgcgtacagctccagaaccaacttgagcaccgcgctttctgtcccgatgtggtgtatcaattcctccgtggcagtcggcggaatccttctgatgttccaggcatttgtagcgattgcgatgatcgtatcagcgacagagagaaaggaggataaaccggtattatgacacttgtattagtagtattatttggtctgatgcttttaggcattccggttgcatttgcaatcctttctgccggaatggcatatctggcgacaacgggaggaagtatgctggtagtcgcacagcggctgatttacggtcttaactccttcacactgcttgcagtcccactgtttatcttggtaggaaacctgatggatttcggtggtatttccaaacgtctgaccgattgggcgaagagtattttaggctggcttccgggcggacttggaattgtaaccgtattcagttgtgcgatctttgcagcgctgacgggctccggtccggcgacggtagcagcgattggttcaattatgcttccttccatgctgaaggcaggttattccagagaaacgagcgcggggttagttgcatcggcaggtgcattgggaccaatcattcctccgagtattcccatgattatttatggagttacaatgaatctttcaattccggcaatgtttatggcaggggttgtcccgggacttgttatcgcactggcgttatcgttagtcaatgtcgtattcgcatacaggaatccggaggttctgaaacatgcgaagacgatgaagtttgattttaaagaatccatgaaattgttctggaaagcgctgggcgctctgggacttccggttctgattctaggcggtatttatggcggtatctttacaccaaccgaatccgcagcggtcggcattgtttatgcgctgattctgggttttgcattgaaagaactgaaagtaaaagatttaccgaagatcctgatcaattccctgaaaacatcgacaatggtcaatttcatcatcgcggcggcgtccctgttctcctgggttgtatcgaaatcccagatcggaatcgtgatttccaatgcatttatcagcttcgtaggtggcagccaggcactttatctcttcgtactagttgtagtgctcttaattgtaggctgtctgatggataatgtagcggcaactctgattctggcaccaattttaattccggttggaattgcactcggatgtaatgaactccacatcggtatgctgttctgtatttgcctggtagttggattcgtaacacctccgtttggatataatctgtttacggcggtttcgatttcaggcttgaattttaaacagattgtaaagggagcgcttccgttccttttgacggaaatattgcttctgtttgtatttgcatatgtaccgggaatcatcacatggcttccgagactaatggggtacggatactaagtattagaaaaatacgtaagaaaaaggggctgtgaaaagacagcagaagagacttgaaaggtcaatgcgctgtttttttacggctccttttggttagaataagaaaatagatagaactgagaactggcggaggaaacaatgaaaataggattcgaagtttttttggtggtagccagagaaatgagtattacaaaagctgcaaatgagcttcatattacacagcagtgcgccagcgatcatataaagaggctggaaaaagagtataatgtcgtgttgtttgagcggcggcccaaattccgtctgacgcaggctggcgagatcatgcttcataacctgttaaatatccagattatggagacgagtatgagccggagtctggcggggatagcggaggggacggtgggcggttttaccttgggaatcagtacatcccgcgcgccgatcatactgccccgtgtgctgccgcgatattaccagtgttacccgaaggtaaatatatcctttacggaggaggacacacagattctggaggaacgcctgttgaacggacaggtagatttatttatcggggtcaatacgtcaccgcatccggattataaaatccagaccctgacgacggatgagatcatcctggttatctccgccaagcttttgaggcgggaatttagcaagcaggagatccggcagatggaggatggtattgatctgaaacggttttccaacattccgtttacgcagagtttcaagaccggaaaagtcaaccatgcgattcaggaatatctggacagttataatgtaaagcttaatgtcatctataacatcagtgatagtgagacgcagattctgctctgcgcgtccggcatctgtgcggcgctgtgcccgaaaatgctgctggcagccgcgtaccgtcacaatcagacctgtaaaccggaggatgaactctatatgttcccgatccggaacctgggacgggagttaaagatcgagctggtcagccatcggaatgcgatgcatccgatgtatatacaggactttgtccatatcttacaggaggagttgccgcggattgcagattcgatgagtctggaagaattgagaaagagtatacagtaaaaaagccttgaatcggaaatgcttttgagtcaaaagtgtctctgattcagggcttttttcagttcacgggaggttcactctcagattccacatcccggaattacgaaaatattatgtaaaaggaatgaaaaatgtcggaaaatgtacaaaattgggacaaattctattaaaaatttgttcactattttcgtgaagtatgttataataaaaacaggtttaaaatacacattatatgtgagcatcgaggggtgatatcgtgattaaaaaggaaatgatagctatgctgttggcaggcggacagggcagtcgtctgggtgtcttaactcaaaaagtagcaaaacctgcggtttctttcggaggaaagtatcgaatcatcgattttccgttaagtaactgtatcaattcgggagtggacacggtaggcgttctgacccagtatcagccgctgcggctgaatgcacatattggaatcggtattccgtgggatctggaccgcaacgtaggtggtgtgacggtacttccgccgtatgagcggagcaaaggaagcgattggtacaccggtacggcgaacgcgatttaccagaacctggaatacatggaaacgtacaatccagagtatgtgctgattttgtccggcgaccacatctacaagatggactacgaggtaatgctggaataccacaaagcaaacaatgcggatgtgacgatcgcggcgatgcaggttccgatggaggaggcaagccgtttcggtatcgttataaccgatgacaacaaccgcattacggagtttgaggagaaaccggcgaatccgcgcagcaatttagcttccatgggtatttacatattcagctggaaggtgctcaaggaagcgctcatcaagctctcggacgagcctggatgtgattttggaaagcacattatcccgtattgccatgcagctggaaaacgtatcttcgcatacgagtacaacggctactggaaagatgtcggaacccttggctcctactgggaggcaaacatggaactgatcgacatcattccggagttcaacctgtatgaagaatactggaagatttacacgaagagcgatattattcccccacaatttatatcggagcagtccaagatagagcgcagtatcatcggcgagggcaccgaggtatacggcgaagtcattaactcggtcatcggagcaggcgttacgatcggagaaggtgcggtgatccgtgattcgatcatcatgaagggcacgacgatcggcgctggcacggttgtggataaggcgatcgtggcggaggacgttaccatcggtgagaatgccgaggtcggcgtcggagaatatgccgagagcaagtacgacaagaaggtatatcagttcgatctggtaacgatcggagagcgctccgtgataccggatggagtgaagataggacggaacacagcgatttccggtgtgacgacggcagacgattatcacggcggcgagctggagagcggcgattatatcataaaggcaggtggaatacaatgagagcgatcgggattgttttagctggcggcaacagcaagagaatgagagaattatccaataagagagccatcgcagcgatgcctatcgcaggcagctaccgcagtgtcgattttgctctgagcaatatgagcaattcccacatccagagtgtggcggtactgacgcagtacaactcccgttccctgaatgagcacttgagttcttccaagtggtgggatttcggacgtaagcagggcggcatgtatgtattcacaccgacgatcacggcagagagcagcgactggtaccgcggtaccgcagatgcgctgtatcagaacctcgatttcttaaagaaaagtcatgagccgtatgtggtcattgcaggcggcgactgtgtctataaattggattacggcaaggtactggagtatcatattgaaaagaaagcggatattaccgtagtatgcaaggagatgcctccggaggaggacgttacccgcttcggtctggtgaagttaaatgatgacggacgtatcacagattttgaggaaaaaccgatgctggcgacctccagcatgatctcctgcggtatctatgtaatccgccgccgtcagctcatcgaacttctggagcgctgtgcagcagaggatcggtatgattttgttaccgatattttagtcagatataagaacctcaaacgcatttacgcgtataagttaggaacttactggagcaacatcgcttcggttgattcgtactacaagacgaacatggatttcctaaaaccggatgtacgccactatttcttcaaggaatacccggagatctactccaaggtagatgatcttccgccggcaaaatacaatccgggtgcaaatgtcaagaacagcctggtatccagcggctgtatcttaaatggtacggtggagaactcggttctgtttaagaaggtatatgtaggcaataactgtatcatccggaattctgttattttaaatgatgtttacatcggggacaatacagtgattgagaattgtattgtagagagccgtgatacgatccgtgccaacacgacgcacatcggtacgccggaagatgtaaagattgtcattgagaagaacgagcggtttacattatagggtacatcaaagaacagacggaaggggtaaatgggtatgcagattacggatgtaagagtgcggcggatagagaaggaaggtaagatgaaagccatcgtatccatcacacttgacaatgaatttgtggttcatgatatcaaggttattgagggagaaaagggactttttattgctatgccgagccgtaaggctgcggatggagaataccgggatattgcccacccgattaattcgggaaccagagacatgattcagaatgtcattcttgccaaatacgaggcgacagctctggaactggcagagctggagaaagcagaataaaaagcaggaaaagaaagtaaaaagagagaaaatatgaaaaaatgtccccggacgctggacaaagtgcccgggggcatttattatgtagatacagtatgctcaaaaacgggcggaatttgcccgaatgtgtacagataatccataagggggtaattatgagcggtacgattttttctttaataccgcctatcgtagccattgcgcttgcattgattacgaaagaggtgtacctgtctctgctgataggtattatgtcgggcgcgtttttatttacgggtccaaatccgcttcatgcggtggaaacaatgatcgcgatcatgggcgagaagatcgggggcaatgtcaacattctgcttttcttggcatttctcggcatcgtggtagcactgatcacaaagtctggtgcgtcgaaggcttatggtgagtgggcgtcccacgcgatccgcacgaagaagggcgcgctgtttgcaaccatgttcctcggaatgctgattttcgtggatgactattttaactgcctgaccgtcggcacggttatgcgtccggtgacggataagcacaagatcacacgtgcgaagttagcctacatcatcgatgcgacggcggcaccgatctgtatcatcgcgccgatctcaagctgggcggcagcggtcggttcttcgcttccggaagacagcggggtggatggcttcagtctgttccttcacacgattccgtttaatctgtatgcgcttctcacgatctgcttcatgctctttttggtagcaggcgattttgatttcgcggcgatgaaacgctatgaagaacaggtgaaaaagaccggaaaagagacgacggtcgaagcggaggcgatggagatctccggcaacggaaaggttatcgatctgattcttccgatcctggttctgattgcgttctgcgtcagcggtatgctgtatacaggcggcatcctggacggcgttggtctggtcgaggcgttcgccaactgtgattcggcactgagcctggtgcttggttccttcttcacactggtgtttatctttgtattttacatgatccgccgtgtcatccggttcaatgagttctgtgaatccttcacgatcggcgtcaaggcgatgatcccggcgatcatgattctgtgccttgcctggactctgtctggtatctgcagtgcggattacttaaacatcggcggctatgtcaaagaggtagtgggaggcaatgcgctggtcggctccctgatgccggccctgatgttcgtcatcgcggcggggctggcgttctcgaccggtacgtcctggggtaccttcggtattctgcttccgattgcatttgcggtggttggcgctgaaaatatgaacagccttacgatcgtgacggcttcgattctggcaggtgcggtctgcggcgaccatgtttccccgatctcggatacgaccatccttgcgtcggctggcgcccagtgccaccacatcaaccacgtatcgacccagatcccgtatgtgctgtgcgtagcagcgtgctgtttcctcggttatctggcagccggaattaccgccaatggctgggtgggaaccggcgtgggattcgcagcgctgattgtggttctggttattctggatcgaaagaataaagggacgaaagaggcgtaaaagcatcggcagtaaacgaaaattggttcgtttactgccgatttctttcgtttcatcggaggaagcggtcgtatcttccgccggggcatcggtagcagctgcggttgtttctgccggagcagaagattgtccgcaccctctttatgaaatagcggtggcatggaaactttggaaaaacgcattccccaccagcgataaactccgttccttccgtttgaccagacagatacttgagtggatctggggctgggtgatgatccggcggatcagggcgggatcggaatttaaacagagggcagattcaggcgcgagcgcgatgcccagcccttcggacgcccataaaagggcggttctggcatcgtcggcaatgcagacgatgttcggttccagcgcctgttcctcaaaatatcccagaatcagcggctgccagcggcggtaaagaatgagcggcgcgcgggtgagggcggagaggggaagagatgtgggcgtatggcttttttgtggttcggaagcgtcggatgcaggcataggatgggaactttgaatcccagaaccagtgtcggatggagaaatgtcggtcagaagggcattcgggcattcctggtaatggctccagatcatttcgcgcccgatcgccagaaatgcctccggcggcagtgtctgcatctccagcccggctttggcaaatggcgtccggatcacggcgaggtcgatctggttggagtgaagcagatcgagcaggtggtaggaattggactcatggagttcaaacagggctttgggataggatcgccggaatggggcaagataatgccgggtcacaaattcgacggcggaggagatgatgccaaggcgcacaacgccctgaatctcctgtttctgtgcagttagctccgtgcgggcagcctggctcagatcgaggatcgcaagcgcccggtcgtagaacgtctttccagcaggtgtcagtcggatgcggcgggaaccgcgctcaaacagcgtcacacccagttctgcctccagaagcttcatctggtggctgagcggaggttgtgagatgttcagttttttggctgcctgggaaatatttccctcgttgacgatggtggtgaagtaggataactggcgaagttccataaatgctccttcctgttcggattcgttgtaaaactgtgtatacggcagatatattatataacaaaatccgatagaataacaggcgaactatattttttcgatatatattctatatccgaatggtatttttcaggctccttgaattctgatatgatacataagcaggtatatactggaaattccagagaaataaaagtgtagggataatacggaagggagtgggcagaaatgaaagaactgctggatatgtttctgacgtttgccagaatcggagggtttaccttcggcggcggatatgcgatgctgccgatgctgcagaaagaggtagtcaatggacgccattgggcgacggatgaagaattgatggattactacgcgattggtcagtgtacaccgggtatcatcgcggtcaacacggcgacgtttgtcggttataagaatcggggaattccgggggcaattgcggcgacactgggagtcattgcgccgtcgcttgtcatcattatgattattgcggcatttatttctaactttattgaacttagctttgtgagcagcgcctttgcaggcatccgcgcctgcgtttgtgtgctgatcggcagtgcggttgtcaagctggcgaagaaatcgctggttgataaaggcgcgatcgcgattgcggcggttgtgtttgtactgtcactgtttacatcggtttccccggcgcttcttgttgtcgtggcgggtgcgatcgggattgtactgaagggcggaaagggggagaagaaatgatgctgatacttgaattatgcttccgcttcttctgctgcggactgtttgcgattggaggcggactggcgaccctcccgttcctttacaatatttccaaggagacgggatggtatacctttaatgatatttccaacatgatcgctgtctccgagtccacaccgggaccgatgggagtcaatatggcgacctacgtcggcttccatattaaggggattctcggcggactggcagcgccactctcactggtgcttccgtcggtcatcatcattgtgattatctcgaagattcttgataagtttaaatcctcttcgatcgtacagaatgccctctatggtctgcgcgcggcatctaccgccctgattgcggcagccggtatcggcgtggcaaagatagcgttcctccatgtcggcgaggatggcagcctggtgctttccaagctgttttccatcatcaactggaaggcgatcgtactggcgcttgcgatctggtacggcttagtcaaatggaaaaagcacccgatcctctatatcgtggtggcggctgtggccggaatcgtgttccagttccactagggaagatagaagaaaatagaaccatttccagaagaggtagttcggtatcggcatattcttttggggtggttcttttttgtcataggaagtttcgtcctatgacaaaacgctctgcgggatgcgtactcacgcgaagaagaaacatgccgcaagcggccgtgcgagaagcccggatgtgtcaaggcacatgatttgttcatgggactttcttcattttacaggaaattgcgtcctataaaacaagaaatacaagaaattgcgatcgcaaagcggaataatagttagaaacagaataaataaaacagaaatacacaacaattacaaaaatataatcagataaataaagaaaaatatgaaaaataattagaaataatacttgacaaaatggaaattatctagtaaaataaaaccatcaaaagaaacagagataaccccaacaaacggttaccatagtttctaggacgaaataaggaacaaggaggacagtccaatgggatagttagttactaaaaaacatgatcatggttttaaaaatcgaatttatcaaataaataaaaagataaaaatcggtattgatggaatccatcatcatacaatctctaaaagagtttacatagatacatgtaatcaaaggaggagattcatatgaaaggaagaggtccatagcacatttaaaacaaaatataaaaggaagagaggttatatagtgaaacttcgggatatttcataaaagagctgtctgatgacgagaaagtcggacagctctttttttgtttcatagaaaatcgaagcaagcgcagcagaaaggttgacgaatgaagtcaaaaaggatattctggagaatgaaaattatatacattacaaaatgaagggaattgttggaggtatctatttaaaatgaatgaaaacaacatggtcattaaagacgccagaacactgggtctgccgaagatgctgcttttaggtttgcagcatatgttcgcgatgttcggcgcaacgatcctggtgccgattctggtcaatacctattttgagggagagggactttcgattcaggtaacgctgatgtgtgcgggtctgggaacactgtttttccatgcctgctctaagttaaaggtcccggcgttcctcggttcctcgttcgcattcctcggtggatttgcgacggtggcaaacttggacagcggtatttttgcagatatgacgatgggtgagaaattgccatatgcctgcggcggtatcgtggtagctggtgcgctgtacctgattctggcgctgatcatcaagctggcaggcgtggagcgtgtcatgcactatctgccgccggttgtgacaggtccgatcatcatatgtatcggtctttcgctggcgccgtccgcaattgccaacgcatcgacaaactggctgattgcgttgattgcgctgggaaccatcatcatttttaatatctggggcaagggaatgttcaagatcattccgattctgatgggcgttgtgatctcctatgcagcggcggcagttttccagatgatgggaatgacaaacccggacggaagtgcgatcctgaatttctcagaggtagcgacggcttcctgggtcggacttcctccgttccagctgtgcaaatttgacccgacggcggtcatggtaatggcgccgatcgcgcttgcgacgatgatggaacatatcggcgatatgtcggcgatctctgcgacggtcggagaaaatttccttgcggatccgggactgcaccggacgctggtcggcgatggtatcgcaacatctctgtcggcactcgttggcggtcctgccaatacgacttacggcgaaaatacgggcgttctggaattaagccgtgtccatgacccgcgtgtcatccggattgcagctgtctttgctgtgattctgagctttattccgaagatggcagaggtcatcggttcgatgccgtctgccatcatcggtggcgttagtttcatgctatacggtatgatctctgcgatcggtgtccgcaacgtggtcgaaaaccaggtggatttaaccaaatcccggaacctggtaatcgctgcggtaattctggtctgcgggctgggattctccgacggtctgacctttgaggcggcaggaacctcggttaccctgacaggtcttgcgatcgcagcgattgcgggcgttctgctcaatgtgattcttccgggtaatgattaccagttcggcaagaatttacagggcgacatcaaccgcggtgtggcgatcaatccgaatccgaagaaacggcaggaataaaaaacgcaaaaattttcagttctaaaattaggacgaaccatttcagatgtataatccgcctgcatttccacatactacccataagacacacgatatggcaaacgtggtatgcaggaggaagaatcatgaaagctacaggaattgtgagaagaatcgatgatctgggtcgcgttgtcatcccgaaagagatacgccggacgctgcgccttcgggaagggacgccgcttgagatattcacggaccgcgaaggcgagattatattgaaaaaatattcaccgatggtggagctggcggcatttgccgtgcagtacgcggaggcgatggcgcagtccacggggctgatggtctgcatcgcggaccgggatcagatcatcgcggtatccgggggaccaaagaaggaatattaccagaagacgatcagccgggcgctggagctggcagtctccgaacgtcagaatatctgtgcggcgcggggagaaaaagcatttatcccgattacctcggatgaggtggaggagagcagcgccgaggtgattgtgccgattttgagcgagggcgatgcgatcggggcggtgattctcctcagccgggaggcaaagcaggcgcttggaggggcggagatgaagctggcagcgacggcagccggatttctgggacgtcagatggaaggataaaaaagataaatgagataaatctgcctggaaacaggcggtgagagaaaaaagaagacgggatcgatggaaaacgtaaagagagataaaactcctgatcggttgtccatcgatcctgtttttgatagtcctgtatttgataaaaactggtatttgatataacagatatatcgaaaaacagacgaaagcgcaggagagttcacagatactccatgatttttcacagaaaaagcacagcaaggcgcatgacaaacgcatgagtaaataaattgtgaacacgcccccttttttgttaaaattaagaaagagaggttatatagtgaaacttcgagatatttcataaaagagctgtctgatgacgagaaagtcggacagctcttctttatgcctcaatgcgtttatgtgtgcagtggaaagggttccgctgttatttttttgctttgacacggtctccgcgctctggaagcagaaagatacagattaaagaactgataaacagcatgcttggatagaacagaagcggcatgacctcaaaggcagacagttcatagcccagctcatgaaccgccgataatgctaccagcatctgagcaccgtaaggcaggattccctgggagatacaggaaaaggtatccagaagggaggctgtctttctggcactgatgccataatcttcagaaatttcctttgcaatagggttggccataacgatagctactgtgttattggcagttgcgatatccagcagggtaactaaaaggccgacaccaaactgaccgccgcgttttccgcggaagatgcgatgaataacgttaagaagaacatcgaagccaccgttttcacggatcagtgcgcacatagctgcaactaagatggcaaccatactggtctcaaacatgccggaagtgccggaccccatgttggtaagcatttcccagggagtagtctggccggagcccagcataatgatggcaccggatacgattccgactaacagaacgacaaatacctgaataccggcaatgccgcctgctaataccagaagataggggatcagctgaatcaggttgtatggttttatgatggcagctcccggatcctgatggaaggaaacgaccaggataagtgccagggaagcgatggcagccggaagtgcgatgccgaagttctcacggaatttatccttcatagcacatccctgaccgttgcaggctgcgatggttgtatcggagatgaaagagagattatctccaaacatggcaccgccgatgacagatgcgacgcaaagggccagagagaaaccagaggtctcagatacggcagtggcaatcggaacaatcagggtgatggttccaacggaggttcccatggaagtagagacaaagcacgctaccacaaagagaacagcaacggaaaaacgggccgggataagagacagcatcagataagcaacgctttcagcactgcttcgtcctacgacaccgacaaaggttccggctgtcaggaagatgagaagcatggtgatgatgttcttatctccgatgccttgccccatcagctccagtttccggtcaaaggaaagagaacggttctggaaacaggccgtcaggatcgcaagcataaatgcgacaacaatcggaatgttgtaaaagcccatcgggatcttcatgatatattctgaccagattcctagccccagataaaagatcagaaatacagcgataggcagaagggaagatagtttttgctttttcataataattttcagcctttctatatgtttgccgtaatagaccggatatacattatttgatcttaccataagaatgggattcaggcaagtaaagaagacagtgtaactgtaacgaaaaggttgacgaaagcctgtaaaaacgatattctgaaagacggagaaaagcatgcaaaaacgatagaaaatatgatcggaaatgtgataaaagcacaagggatttcacagatactacacgggttttcaccaaaaaatcacagtgtgaagtgcttgcgtgtgcttcacactatgattttggcgatgcttcgcatttaaaatcggaataatctgctgcctaaacggcatcgtacggaattttcagtttagaaaattcctatttgcgagtcgtaacgattgtcggttcggaatgtgaggaaaagtgcaaaaaaccttgacaaagcaaggagaaatgtatataaatgtaaagtaagatttgcgggcatgtacgaagaaaactaagaggattcatgtgcaaagatataagctaggaggaatatacgatgaacaagacagaattaatcgcagttgtagctgagaaagcagagctttccaagaaagacgcagagaaggcaatcaaggctttcacagatgcagtatccgaggaactggttaagggcggaaagattcagctggttggctttggtacttttgaggtagctgagagagcagctagagagggaagaaacccgaagaccggcgagaccatgccgatcgcagcttccaagactccgaagttcaaagctggtaaagcattaaaggatatggtaaacgcataattatctcagtcagatatgtgtgacggacagcccttcgtgatgatacatcatggagggcttttgatattatggggattgagggaaatccgctatgatgaaaatgccctgcaagggttatggaaagggaagatatgagattagacaagtatttgaaggtatcccgcatcatcaagagaagaaccgtggcgaatgaagcctgtgacagcggacgagtgatgctgaatgataaagtggcaagagccagtgcagaggttaaggttggggatgtgattgaaattgccttcggcaataaatcggtgaaggtccgcattacaagcgtacaggagaccatccgcaaggaagatgccaaagaaatgtttgaatacctgtaaaaatccaagagacgtcagtaaaaggcgcggaggacgaaatgccaagaaatatagagcgggatgaaaaagaggcgatgcgccggaaagaacagctgatggaagctggattcaggctgttttcgcaatatgggatcgagaatgtcagtttacagagggtggcggacgctgcggaagtgggcgttgcgaccctatataactattatcagacgaaggtcaagcttgtgatagcgatcagcggaaaaatctggggcgatctctggaaggagattctggaagaaaagggaccggagatatttgaatcattcacggcgtatcagtacattgagttttatacggaccagatcatccggatttatcgggaacgcccggaaatactccggttcagtaataactataaaaactttatctcccgggagaaagtcaagggggaagcgctggctgaacatctggatgttttgaagccggcaggagcgctgtatcataagttctatgagcaggcgaggagcgataaaagcatccggaccgatatcccggagcagcagttatttacaagcgttgcgattgcgatgctggcggtggctgagcgctatgcacagggaattgtgtgggcggacgatcacaaggaagaccacacgcaggaactggaatttttaaaaggaatgctcctgacatggtgcagaaccccggagaacctgggaaaacaatgatataaagaacggaaataaaaaaagaagtcaagagaatgaggtgccccctcaaagttagacttttacgagacgacttcggtcgtctcgtttttctttatgcgcttaaaagaacagattctgtcttgaatttgtgagagttgattattataatataaatatagtgacgactcatttgtgtatacacactttatgacggataatcaacatttcgagaatgagaggaaaaagcgtatgagaaggagaaaaagaagaatcctggcagcaggaatggtggtagtgataacgtgcagttcatatggctctgtgcctagagtttatgcgaacacgaatttttatcagatcagggagatcgagagtttatcggaacaggttctgtatcagaaagttccctatggcacccggtatcaggatctggagatgccggacagcatagacgtttttgtcagcgggggggggcaaaatgaagatgtgcctgacgcagggaacgatgagaatgtagctgcgtttgccaaccgcacagatgatgatgccgtgctggaaaaactggacagcgaagagaagggagaaaacgaagataccgaaggaaaagatgctggagagaatagcaaagacaaaagcgaaggtggagagggcttagagaaagcggaatccggttcaggtgaacagggagattctgggaaagatggaaattcggcggaaaatggggactctcaggatgaaaatgcaaatccggggaacggtgaatccgatgagaaagacgattccggtaagacagattctggttcttcaggtggaaatgcagatttgaatgaagagggcagttcttcgaacggaaaaacggatgaaccgagggaagatgtcaagacggatgagaagaccgaggaagagattgacgaaaaggaaggtttctggcgaaaagtaaaggtgcgctgggttctggatgcagaagagagccaggcatcccgttatgatggagaaaatccgggtatctacctgttccgtgcagagctgaaaagcagcaattatgaggtagatgaggacgaacttccagtgatccagatcacggtcctggaagaagagcaggcgaaaacgacgctggaatttgcaccgttggaagaatcgatcaccgatcagcttctcccgcttggaagcaaagaatccgacatccagttcccggagactcttaccgtgcgtgagacgatgggagaagaaaccaccgagcggactttgtcgggtatcacgtggaaactggatgcggaaaacagcgactattctgaatttcagggcggactggcaccggaggactattttgaccgcttcgatgaggacggcgaaccagaagaaaccgaagaaaagacctgggaaggctacgataaagccaatgaagaatacaagggggcgatctatacctatattccggtgattccggaaagcgaagagataccggaagacactgctttgccggagatccatgtgcaggtgggagacgcggggattgcgctgtatgcggatgaaggaatcacgggaagcggtacattggaagatccgtatgtgattacgacggcagatcagtggtctatcgtcatgggtaaaggaaataaaaatcagtataatggaagtggtcagtacaattctaatgtaaataaatatattaaattggggaataatattgatcttagcgaagttgacccgtgggaggaaagaacattaacaacttgcttagacggtgatggctatactttgagtggaatttcacagccgttgtttagcagtgtgaaaggaacggtaaaaaatttagttttatcgaatgtgaaaattaaagaggcgaaaaatttcaaacatgtaggcgcgattgctagaacgacagcaggtacagccatcattgaaaattgttatgttgaaggtgccaaggacaatggcgatgatgatgcggggattcttaatacaggaaactacgcagcgggtggactaattggacaggttccttcaagtagcacgttgacggtaaagaattgtgttgttaatgcggatgttaagagtacaggctcagattctcaaaattcattggctggtggtttggttggattggtttcagcaaaaaatatattaaacattgaaaattgcatggcaatgggaagtgtttcaacagagtgtaatagtggctgcggtggcttagttggcggaagaaatgtaaatgttataatcgaaaaaagtgtagcattacagaaaacagtttccacaaaaaaacttagtagttatgtagatagaatttttggctatagtggagattcaaccgtttatgtatcaggaaatcaaaattatgcttatcaaaatatggcaggcggatataatggaaattttgctaacaaacatacagagcaccatggcgaaggtgtcacgaaagcagaacttttaacaaccaatttctgggaaaacaagatcggctggggaaatgactcaaattcaagctggaaaattgaagcagatcagttcccttcgctggaaacaacaaatggtgatgtgatattttcaggtgatgatttaccagattacctccaggcaaccaatatggtaacaggaactgtaagctctggagaaacaggacttgatggtgcggagattatctttaagaaggggaatagtgaaaaaagtaccacaaccaatgcagatggtgattttgagattgaactcgcaaacggaatttatacggtaacaatcaaaaagaccggatatctgacgtggacagatagtgttacaattccaggaaaccttgatttcaccttggaagccaacccggtttccatgcctgcgagacaaactgtgacaggaactttccagacaaccgatgcggaaagtgccacagcagaaggggaaattaaacttatatatgcaggaacagatagtttgcagccgaaagattttaccctttcatccgaggaagatggaatggagtatggcgaagttacaatttctggagtggaaaaaacagaaaatggatgggggataaagattcgatttgctaaatcgctggctcttggcagtataaatgaaaaacagctttatgtccattataagggaagcttgattggctcaatcacgctgacaaaagaggtgaatcttgttcagcttgcagcgcctgcggatgtcaaatgggatgagacagtaaaaggaaaagccgtctggagtccggttgagaatgcgtcgggttataaagtacagctctataagaatggttcatcactgggggctggggtaacacttggggcggatgcagccagttacgattttacctcccagattgcagatagcggaacctatacgtttggagtccaagcaacgggcgatggttcaacctatgatgacagcgaggaagagaagagtggaacctatgaattttccgagcagacattagcggatgtcaaaaaagcggtagcggcagcgctgcaggcgaagacagtgacaaatgagacgacatcagaggaaattttgcaggttgtacagattgttatcacaaataacaaaattcaggcgaagtggtccgatgaaaaaggttttaagctaacaccggcaacagacagaacagatccgggacaaaacggaagtatcacgggaacgattgttttgagctataccgctgatagcgcgtcaacagaaacagatacaatcgaaataaatcttccaatcgcggcgaagtatgcaattacctttacgtctggacgtaaggattcacagggaaaggcgccgacactggaaaatgccgcagccggaaccgtgattacgcttccggagaatacctttaaggtatacggcatgaattttggaggctggagtgacgaaactaagacatatgccagcggtgcaagttatacaatgccggaaggaaatgtgacatttaaggcggtatgggtgcaggatcagtgggatggacaggcggttgtggaaccggccaaagatgaaaatggttattatcaaattagtacaggggcagagcttgcgtatttccgagatacgaacagttcaaactggaaagcgaaactgatgtgcgatattgatatgggcggtcacgactttgccccgattaatcaggccggagctgaatttgatggatgcggacatacgattcaaggcttgaatgtagtcggcgatgcttatgtgggattgtttcgagcaatttcttcgaattgtgaaattaagaatctgaccatagaaaatgcggtggttaaggcttccggcgataaagcgagagttggcatcctggttggtgatgtatatggttctctgacagtagaaaattgttacgtcagtggaacaatcgaaactgcagatggaacaaataagattgaatcggcaggaggtttgattggaaacgtaagggagtattcgaattattcggtaaatattaagtcctgctatgcagatgctaaaatcaaaggaaccaccgacaagggatttgcaggtggtttggtcggttggaccggtggaactacaaccattgacaacagctatgcagttgtggatatggacgttgataagggatattatatcggcggactggtaggaagcggcaacgtaacgatctcccacagctacgcggcaggcgaaacgctgacaaaaaatcccactggcgcatccgtggcgggcatttccagcaacggttcgatttcctcctgtgtcagcattttcccggagatgcgatcgctcaaccggattggtggaagaacgggaagttaccagaacaactacggctttgccggcacagttgcgagaaaatcagatggaatgattttgaccccggaaccggatatgatgggggcagataagctatatggagcggacgcagcggcggcagatctgaaaaatccggcattttataaggggctgggctgggattttgattctacctggatgatggattcaaccggcgagtatgccttcccgattctgaaaaaccagactttacgtccggatctgacgctggatctgacaccttcggttaccggaattacgctggataagaccaatgagacgatttacccaagaggaagcgtccagcttactgcaaccgtcgatgtggcaaacggagcgtccagagaagtgacgtggaaaagcagtgatccggcagtcaaggtagaggacggcttggtaaccgctgcggatgtggcaaatggaacctatataatcacagccatcagcaaggcggatccttccaagcaggcagaatgccagctgacagttgatacggcggagcacacagttacagtaggacgggagaatacgataaactccctgaatgcagttgtgaaagcgtatgcatccctggatgatgcaaaaaaggaaacaaatccgatttctacgataggtagtgaaactggtacatttacattttcacggaaagccggagaaaaagtgtaccttgcatttacgggtctggatccgaaagatgtcgtaagcgaagtaacgattaccggtgagaataattcaaaagtgaatgcgacaatttgcaatctggagaatccgacggtgtattgctttacgatgccatgttcagatgcctccgtacaggtttcctatgcggaaaatatgaacgcgtaccagtatacctggttcgtaggacaggaatggggtacctggggaacaacggcagcctttgaaaccaaagagtggagtggagtggaccatattggctctctggaagtaacaaagattatcaatggcaagctgtttaaagaatttaatataaaatcaatgtcgctgtataagaaaggttcagttacaacgaaaaaggtaaatagtagagcagaacttaaagagaacggcgattattacatcgaaaaagataatacaaccggtctcccgactctctatgtatacttagctggaccgggcatggtagctgtggatatcgaggttaagaatgatcaaactgcgatattttcgatcacaaagaagccggaaagcagttcttattatatgctggacaagcctgcggcaagagccggggaagtggtaacggcgaccttgacaaatgaaggtgtcagacagatgaaggagaatccgaacaagaatgcatgccttacatacagcggtggtttccttgtagttatttacccgccgaaatttaccgaatccgatggcaaatggacggcttcctttaagatgccggcgcaggatgttgagacacatgtgtattttggggacaaagataaggttacactgaatggtacggataaagaggttgattacgatggaacgccgaagtctgtgggggatggaattcaggcaacgataggtggacaggatctttcggaacagtttcagggtcagtatgaggttcactatgaaggtgtgaacggaaccgtttatttcagcacgacaccgccgaccaatgcgggaacgtattcctgtaggattaagatcccggacagcaacgtaaattataagagtgatccgattacagtgcgcctgacgatcaaaaaaatagcaacaaagaccccgaaagcaccgcaggcagcagcgtggacagacaccagcgtgaccctggaagcaccgtctgcatttgtggatggaaccgcgattccggcaggatatgaagtggaatactgcgtggatcagggagaatggcaggattcaccggtatttaccgggctgacaccggaaacgacttacaatttctatgtgagactcaaagaaggtgtcaatacgacggcatccgcagccagcgaggcggtaacggtccagacaaagaaagcatcgtctgacccgtccaatccgacgaaacccaacccgtcgaacccgaatccatcgaccccaggcaatccgcagggaacgaccacttccggccgcgacagaagtaccagcacatgggtaaaagagagtgccggatggcgctaccgcctgtcaaatggcacgtatctgtccggaagcctggttctggatccggcgaccggcaggcaggttgaacaggttgtgtggaaacagctccggggcgcatggtgggcatttggagccgacggatatatccggacgggctgggtctatgattacagcgcaggcaaatggtactatgtggacgaaaacacaggcatgcggacgggctggtatctggatccgcaggacggcagatggtattatctggatccggtaacgggagagatgctgacggagtggcagctgattccggatttgggctatgtatacttaaatccggatgcaccgcagccgacctgggcgtatgatgaagcattaaaaacctgggtttacatggagggcgcagggcgtccatatggctccctttatatggctgagtggacaccggacggctattatgtaaatgcagacggtgtctgggaaccggccagataatcattcataaacctgaaaacctcccaatatatttaacaataggcagctataggctataagttagataaattgggaggttttttgcatggaagaaaaattggatgccagacctcacaagctggagcttctgaaccgggaaaaggggagtgtgacggggatccaggatgtggtgtcatttgatgagaaccagatgattctcgatacaaacatggggcttctgacggtgcgtgggaaggctctgcatgtgagccgtctgacgttggaaaagggcgaagtggatattgagggcgagtttgaaagcttttcgtattcctgcaatgagtcccaccggaaatcgcaggagtcgttctttggacggctgttccgttaggcggtggcggatgagcgggacggtgagaggggaaatatggctgcttggcggcagtgtgtgtacgggaatcgcgctgatgatgatgtatgacgggcttaggatcttccggtggctggtacggcacggctcattttggacaggcatggaggatgcggcgtattggctttttgccagctttgcgacgttccggcttttgttcgggcagaatgacggagtcttgcgcggctatgcggtggcgggcgtgctcggcggcatggtgttttatgaccggacgggcagccgtcttttgtttgcggtattgaaaaaatgcagcggatggattaaaatgaaaagaagaggcaaaaaaagccagaagaccggaaagaaacgtacaacaaggggacaggcagaaaacatggaaaggaagtgagatgagaatgcgtagacagatgtcggaaggcagaccgggtggaaatgtgcggaaaaagaaaaaggataatttaaacaaccggatggcgcttgtgggcgttacgatggtagtgctgagtctggcggttgccgtgcacatcaagggcatcgatctcaaggaaaaggataggagttattcaattcgtgaggaaaatctggaggcacaggttgcgaaagaagaagaacgtgccaaacagcttgaggaataccgcgtatacgtgcagaccaagcagtatatcgagaaggtagcgaaggagaagctggggcttgtaaaccgcaatgagatcctgctcaaaccgtccaattcgaattaggcttgcggtgcatcatagaatgtccggggcatgccacacaggggagcagcattcctggatgtgtcggaaaatgtcgaagttttccctggttttgctctgtccgtttgacaaatatttctctccagcctgtatataatggcgttatacaggttaggagggattttttgtgcttaaacggagaactttacatagagatatggcggatgtcaacgtctacacggcaagacgtttaaagagcatggcactgtcactgggcggtctggcgcaggcgtttgcggatgagatcggcgggcaggggcatctgacgaaggaggacgggctggcggcaatgcagacggcggcgtcggcggtatgcggcgattgtacacggtgcaacctgtattatggcagccgccgggacgacagttattatctctattatctgcttcggacgttcgagcagaaagggaaaatcgacctggaggacatgcctcgcctgtttcatgagatctgttcccagagagaggcatatttgcgggaattgaaccggagtctcgggcgggcgacgatgaatctggggtggaaaaaccgttttctggaaagccgggacgcggtgatcgtccagttccgggagctggcggcgattctggaggaattttccaaccagatggaacaggcggcggatgtgacggcatcctgggaggaggtgctttcagggatactccgcagaagccatctgcgcgtggacaacatgctggtgcttcaatatgaaaatcagcagaaggaggcgtttctcacactccgcagcgtcaacgggcgatgcatgacggcgcgggatgtggcggaacttctgggacgcgcgatcgccggaagccactggagtgtggcgaaagacagcaaaagcctgatcacccgcaatgcggcgaccttccgttttgtggaagaaggtaaataccggatggtgtacggcatggcgtgcagccccagggagggtgaaccgatttcaggcgatacgtgtacggtgcagaccgggcttccggggcaggtgattatgagcctgtcggacggcatgggaagcggcagaagcgccagcgaggacagcgagaaggtcattgagctgacccagcgcctgctggagacgggattttcggcacgatcggcgctcaaattggtaaatacggtgcttctgctggcgggtacggagcagaatccggcaacaatcgatctatgttgtatcgatctggggacaggtgtgctggaagcgatgaagctgggcgcggtgccgacctttattctggggcgtgagggcgttgagtttctggaagcaggcgggctgccgatgggaatcgtacagaacgcggagccggttctgatgtcgcggaaaatgtgggacggcgaaaaaatcattatgataagcgacggtattctcgaagcgatgccgggggaacacaaggaagagacgttcatggaatttatatcaaacctttccggcggcaacccgcaggaactggcagaacagatcctggcgtttgcgtccgggctttcggacgggggtgtggtggatgactgcacagtgttggtcgggacggtgctggaacgtgggtagttactgggcacgtatgcgtgaacagtaacgtagaatctggcaggttgagaaataagaggagatccgttatactgtgaaggtacggaacagtagttacgagtggatgttaagagggataaaaagaaatataaaagaatgcagaaacaaacagaaatttatatgagacaaaatcatatggccaggccgggggatggcgttctggtcggtttatccgggggagcggattccgtcggtcttttgctggtgctctggaagctgcgggagacgtttcagatttccctgcgggcgctccatgtccatcacgggctgcgcggcgcggaggcggatagagatgcggcattttcacggatgctgtgtgaacggctggaagttcctttttatgagttccgtatcgatgcggcgaaagaggcgcttgaccggaaatgttccgtcgaggaggcgggacggcaggcgcggtaccgcctgtatgaggagacggcgcttgcgtgggagaaagagatgtatccggatttgacatcggagaatgcggggagaaaagaggcggcagccgcccgggttcacatcgccaccgcccaccatgcggatgataatgcggaaacggttctttttaacctgttccgcggaagcggtctgaccgggctttctggcattgctccggtgcgggggcgcatcatccgtcctcttctctgggcgcagcggagcgagattcagacctggctgcggcagcagggacaggactgggtcgaggactcgacgaaccaggagagtgaatacagccgcaattggcttcggaatgaactgcttccggcggtagaagagcgcctgaatgcacaggcagtccgtcatatcgaccaggcgggcagacgcatccggcaggcagatgcctatctggaagaggtggcagaagaatggcttcaaaagcatgcaccggacggaaaggcggatgcaggagcgctggcagaacaggcggagattgtgcagggttatatcgtgcggcggttgtttttaaagagcaaaatgccgctccgggacgtgacggagacgcatgtgcaggcggtgcgggaacttctgcatcagggaaccggaaagagtatttcgctgccgcatgggttccgggcggtaaatatatatggatttcttgaagtgcgcccgcttagtcatccaggagaaagaaaaggggggttgcttccgggcatccagaatgagaatcttttgcagatgcatactttcccctgtgaaaatggggatgaatttccgaaaaaccagtatacgaaatggtttgactatgataaaataaaaggtaccttatcgctgagacaccggcagccgggggactacctgacactgccgtccggcggtcggaagacgctgaaatcctggatgatcgatgagaaaattccgagacaggagcgggaggaaatctggcttctggcggaagaaaaacatatcctgtggatagtggggcaccggatcagcgcatattataagataacagaacagacaaaaaccatccttgaggtggaatttaacggaggaaaaagcagtggctgataagattcgtgtattattaacggaagaagaagtaaacaagaagatcagtgaagtggcagcacagatcaacaaagattatgagggaaaggaagtccacctgatctgtatcttaaagggcggcgtattctttacctgtgaactggcaaaacgcctgactattccggtttccctggatttcatgtctgtatccagctacggttccgacaccaagtcaagcggtgtggtaaagattatcaaggatctggacgagccgctggagggcaagaatgtcatcatcgtggaggacatcatcgattccggacgcaccctggcatatctgatcgaggtattaaaacagagaaatccgaaaaatatcgagctatgcaccctgcttgacaagccggagcgccgcgtaaaaaaacaggttcaggttaaatatacctgctttacaatcccggatgagtttgtcgtaggttacggcctggattacgatcagaaataccgcaacctgccgtacatcggtgttgtggaagtataaggaggaagccagttgaaacaacgtcagtcgatgggaggcgtggggcttctgatcctcatgctgctcgttatcatgtttttctcgttgaaggtccctggaatggcgacggagcgggaattaagctatccggagttcatggtatatctggaaaataagaccgtagagagcgcacagatccgcccgaaccgcgaggtgccgaccggtgaggttatttttgagacaacctccggcgaccgggaggagttcaatgtgctggatgtgaaggaagtagagatggcgcttcgcaaggcgggggttccgtacacgaccaccagcgtccgccaggacagctattttatgacggtgatcctgccgatcgctttgtccgcaggcgtcctgatcttcctgtttatgtttatcaattcccgttccggcggcggggcaaatgccaagatgatgaattttggacgcagccgtgcccggatggtatcgaccagcaaggtcaactttaccaaagttgccggtctggaagaggagaaagaggaactggaggagatcgtagatttcctgaaaaatccgcagaaatacaccggtgtcggggcgcgcatcccgaaaggcgtgatcctagtcggacctccaggaaccggtaaaaccctgcttgccaaagcggtggcgggtgaggcaggcgttccgttcttctcgatttccggttcggattttgttgaaatgttcgtcggtgtcggcgcatcccgtgtccgcgacttgtttgaggaagccaagaaaaatgccccgtgtattgtctttatcgatgagatcgatgcggttgccagacagcgtggtaccggcatgggcggcggtcacgacgagcgagagcagacgctcaaccagctcctggttgagatggatggtttcggagtcaatgagggcatcatcgtcatggcggcgacgaaccgcgtggatattctcgacccggcgattctgcggccgggcagatttgaccgaaaggtggcagtcggacgaccggatgtcaagggtcgcgaggagattctcggcgtccatacgaaggaaaaaccgctgggcgaggatgtggatttacaccgcatcgcgcagacaaccgctggatttaccggagccgatctggaaaacctgatgaatgaggcggcgatcaataccgcaaaagagggacgtaagttcctgacccagacggatattgagaaagcctttattaaagtgggaatcggtgctgagaagcgcagcaaggtgatttccgagaaagataagaagattaccgcataccatgaggcgggtcatgcgattctgttccatgtcctcccggatgtgggaccggttcataccgtttcgatcattccgaccggcgttggtgcggcaggttatacgatgccgcttccggagcaggatgagcttcatatgacgaagggcagaatgcttcaaaatatcatggtttcgttgggcggacgaatcgccgaggagattatctttgacgacatcacgaccggcgcttcccaggatatcaagcaggcgacctcgatggcgcgcgcgatggtaaccgagtacggtatgtcagagaaactgggcatgatcaactacggcggcgacaacaacgaggtctttattggccgcgacctggcgcatacgagaacctacagcgaggaagtggcgagcgagatcgacagcgaggtaaagcgcatcatcgatgagtgctacgccaaggcaaaacggatcattctcgaccatgaagatgtgcttcattcctgctgtgccctgctgatggagaaagagaagatcggccaggctgagtttgaagcgctgtttcaggatggagaaaagccgtcaggggaagctgaaactccggtgacagaagcataaaaagttgaaagcatgagacaggtctggaaataagcctgaaaaaaggtgccagtcagctgccagaatgtgcgggagacatcccggacagccatcggatagatggaaatggcagtggcggcaccttcttttatgcaaatttcaggcggattttgctggacatttctggaaagagcgttgatttgcacaaaaaagaaatcgaaataaaacgatgtttgtgcacacttatttccgctcctatgctattataatagacgtaacccccccaatacattatatagtttttgctacaccccataaaacgaaataccttctcctaaaaaggtcagctaccccgctgaccttttttatttcataggaaattacgtcctatgaaacaaaaaacgctccgcggggatgcacactcgcgcgaagcagaaacatgtcgcaagcgaccgcgcgagacgcccgaatgtgccaaggcacattcttttttattacctaaaattaggggcgtgaaaataacttgtgtaatttggggaaatcctgtaaaatatgggcagaaaataacatgattgtgaaagcggcgaaaccgctggaaagggaaacagatggagcagatcaatcgcgacgcgctattttgcgacgagacagaggattaccgttgtccttcggaggcagatgcgggtgaagtcgttacattttatttcagaacagagaaaaatggagcagatgcggttgtactgctggaatgtgacccggagaccggggcgcttttgcaggagtggcagatgaaacggctttcgtgggagtgctgtgctggcagcgttgggaacggtgcagatacaaatcgaggcatagatggtagcggtatggctgacaagtcagacagccgttttgattactacagctgtgcgctgactctgggaacgaaaacattttcgtatgtatttcaggtaacctggggcgagaacgtctgtctttacaaccggatcgggctgacagaggatgcggcggcgcacccgttccgcctgattccggggtttcatgtgccggagtggagcaagggcgcgctgatgtatcagatctatgtggatcggttctgcaacggcgatcctacaaacgatacggaaaccaatgaatatatttatctgaaaaagccggtcacccgggtaacggactggaaggaaccgattagtacactcgatgtgggacggttttacggcggtgatctgcagggtgttttagataaacttgattatttaaagagtctcaagatagaagcaatctacttaaatccggtatttgtatcaccgtcgaaccataagtatgactgtcaggactacgaccatatcgatccgcattatggagtgattctggaggacgcagacgggctggtgtgcccggaagatacggacaatgaccgcgcacataaatatatgacgcggacggcggatgagcagaacctggaggcgagcgatgccttttttgcccgcctgattgaggaagcgcacaagcggggaatccgggtgctggtggacggtgtgttcaaccattgtggttctttcaataaatggctggatgcggaacttctgtaccagcacgcgggcggctatccgcagggggcatatgtctcggaggacagcccgtatcgctattttttccagtttcacaatgaaaatgcctggccgtttaatgacagctacgacggctggtggggacacgcgacgcttccgaagctcaattacgaggaatcgccggaattgtaccagtacattctggggattgcgaaaaaatgggtgtcggcgccgtttggagcagatggctggcggctggatgtggcggcagatctggggcggagcgcttggatgaaccatcagttctggcgtgatttccgcgcggcagtcaaggaggcaaatccggaggcggtcatgatcgcggaacattatggcagcccgtatgactggctgaagggcgatcagtgggatacggtcatgaattatgatgcgtttatggagccgctgtcatggtttctgaccgggatggagaagcacagtgacgaagaaaatccggcgctgtttggggatggatgcgccttttttgaggcgatgcgctaccatatgagtgaaatgccgacggcttccgtgcagtgtgcgatgaacgagctgtccaaccacgatcactcccgctttatgacgcggacaaaccgccgggtgggccgtcttgcgtcggcaggtgcaaaagcagcggaggaaggcatcagctatggcattttccgccagggtgttgtcatgcagatgacctggccgggcgcaccgacgatctattacggtgacgaagcgggtgtctgtggatggaccgatccggacagccgccggacgtacccgtggggcggggaaaacctggagctgatcgagttccaccgctacatgagcggcatccggaaacgctgtccggcatttagaaatggttccctgaaagcgctggcggcgggagatggctatattgcctatggacgttttcagggtgctcagagagctggcggcgcgtgctgcggagtaacggtggtcaatacaggtgatgactggctgacgctcaagattccggtctggcagatcggggcgcgcgacggggcggtcctgcgccgggaaatgatgacctatgaggacggttacaacgccggacaggttgaacatgaggtaaaggacggctatatcgaggtgaaaatcccaccggtcggaagtatcgttttgacgggaaatgatacggcattgtaggaaatgcggcttcgacaagatatatgatttctggcagttgagcgagaagaatcaaaagcaggaaaaaatggaaataaaaatattaaataaaatatataaaaacacttgcttttttgagacagccatgttataatcttcaactgtcagagcaattttggatgggttcccgagtggccaaagggggcagactgtaaatctgttgcgtctcgcttcggtggttcgaatccacct

SEQ ID NO: 11086 - DNA, 680 bp, Unknown
  gut microbiota DNA sequence
tccggtggtagaaagtgggattgccatcgctcaacggataaaagctaccctggggataacaggcttatcactcccaagagttcacatcgacggagtggtttggcacctcgatgtcggctcatcgcatcctggggctgaagtaggtcccaagggttgggctgttcgcccattaaagcggtacgcgagctgggttcagaacgtcgtgagacagttcggtccctatccggcgcgggcgtaggatatttgagaggagctgcccttagtacgagaggaccggggtggactggcctctggtgtatctgttgagctatcaagctcatggcagagtagccaagccgggacgggataaacgctgaaggcatctaagcgtgaagcccccctcaagatgagatatcccatacgcaagtagtaagaccccttgaagacgacgaggtagatagggcagaggtggaagcgtagtaatacgtgaagctgactgttactaatcggtcgagggcttaaccaaaaggttatggttaaggataggtaagaggaagttatttcctgaaggatgaaagatagagagtagaagaaattcagtgtgcagttttgaaggtatataccttttggcccggtggctcagctggttagagcgccgccctgtcacggcggaggtcgtgggttcgaaccccatccgggtc

SEQ ID NO: 11087 - DNA, 2931 bp, Unknown
  gut microbiota DNA sequence
agatacgactatttcaattctttgaaaaatgaatatggactggtgcagtatcgtagatggggtcttagctcagctgggagagcatctgccttacaagcagagggtcacaggttcgagccctgtaggccccattgttaccaatgttttatgccgatgtggctcaattggcagagcagctgatttgtaatcagcaggttatcggttcgagtccgatcatcggctttttaaaatggatgggttcccgagtggccaaagggggcagactgtaaatctgttgcgtctcgcttcggtggttcgaatccacctccatccatttggctttgtgccagtcatgagtaatcatgatgccggcgtggcggaactggcagacgcacaggacttaaaatcctgcgagggttaaacttcgtaccggttcgattccggtcgccggcagtatcgggaacagtttttaactgttcccgattttgcgttatacggacgtatttgcagcgttggtttatatcaggatatagaaatcctgtcataaaccggcgcttcttttgcatataatacaaagcaaaggagtgaaaacatgtctgcatatcatcggttaatatcatatatctatgcatacgagggcggaatcaaagggaaaaatacgggatttgcgaaattggagacacggggaacttcctgccggattcaggtcagcgtccgccgtgtctttgcgggcggcagcccgatcggcgtataccttctggcagggcaggaggagatccgtatcggcaccctgtttgtccgtggcggaaatggggagttccgtgccgtcgtcaattgtgaaaatattgaaggaagcggctgcaatatggaagagtgctgtggtctgactcttcatgagacggacagcgcatggcgtgcctatacgacgatctgggaagatgccgtcgcgcatgcggcagaggttgagctggcggatgtgactgctgagaaagtgcgggagcaggaagcagagaaggaagaggcaacgcggaaacagacagagagggcgcaggaggcagagggccagaatgcggaagaggttccagatatctcagaaacatccgatcatcaagaggcagaaattgttcaggaagcgcaaacggaaacaccgcaagaaagttctcaggaatccactcaggaagcgcaaacggaaacaccgcaggaaagttttcaggaatccaatcaggaagtgcaaacggagacaccgcaagaaagttttcaggaatccactcaggaagtgcaaacggaaacaccgcaagaaagttttcaggaatccactcaagaagtgcaaacggagacaccgaaggaaagttttcaggaatcctatcaggaagcacagacagaagcacggcggaaagattctcaagaatccacccgggaagtccggaaagaggcgcttccagattctccaccagaccatcaagaagcatttcagccaggctctcaaaatcaaaaacaaccgcaaccagattcatccaaggaatttccgaaagaagatcccgccgagtccctctggaaccgtctgcgtgctgcctatcccaaagtaaccgccttcgaatgcgccgacggctgcgagattctggtaatcaaaccgcaggatatcgggcttctgccgcgggaaaactgggtgtatggaaataacagctttcttctgcacggttactacaactaccgatatctgattctggcgagactggggaaacccggcgaacgggggcgctacattctgggcgtgccgggacattatggaaacaatgaaaaatatatggcagcgatgttcggctttgaccgctttgtccgttccacccgccagccgccgcgcgacagccggttcgggtattggtatacggatttgaattttacataaaagccggtcgctccttttacagaactcttgacaaaggatagcttttctgggtaggatggatataggtcaaatgctttcaggtgtttggttggcagcggatcaaacttgtcgggaaactgggataaggatgtctgttgttggaagcggatgaatttgaacggaggaaaaaacagtggcagcaaaattgacacgggaagagaaatatatgaaagcggcgatccgcgaggcgaagaaagcctgggcgctcggagaagtgccgatcggctgcgtgatcgtgtatgaggacaaaatcatcggcaggggttacaaccgtcggatggtcgatcatagcgcgctggcacatgcggagatcgcggcaatcaaaaaagcgtgcaagcgcatgggcgactggcgcctggaagaatgtgagctgtacgtgacgttggaaccatgcccgatgtgcgcaggggcgatcgtgcaggcgcggattccaaaagtttacatcggttccatgaacccgaaagccggttgcgccggttcggtactgaatcttctggatgaaaaaggattcaatcatcaggtggagacagaagaaggacttttgggcgaggaatgttcgatgatgttgaaagaatttttcaaagaattgcgtgaaaagagaaaaaagaagaaagaagaaaaagctggcaaataaaggcttaatagtgacaagtaactattttgtcgcagagaacggtgtgacccgaaggtcacgccgtttttctgtgttcataggttgtttgcgtgatgataggctcggaaataacgggaatatctacatcgtccacgaagttgaagaaaatcttcactttctgcttgcgcttgccgctggatttgtccggggcatagacgatgattttcttgatatactcgttcacgatggtctgtgtcagctcctccacatccacatatttctgtgtcagggcgataaaggcatccagaccgtcgttcatttcttcccgctgttccacccattcttcgataacttcaatttcgagctttaaccgttcctgctccgcttcatagtc

SEQ ID NO: 11088 - DNA, 35297 bp, Unknown
  gut microbiota DNA sequence
aatttaatatctggccccatggtcaagcggttaagacatcgccctttcacggcggtaacacgagttcgaatctcgttggggtcatttatggcgacatagccaagtggtaaggcgtgggtctgcaacaccctgatcaccagttcaaatctggttgtcgcctctgaggaatcatcgaaagatggttcctttttttatgcctgaaaagccgtattttacaaggattttcgggatttcaactgtttgattcgctgtgaagtaagatggcgctatcggattttcgcatcttctgctataatagaatcattcaagaaacggcattttaacatagccgcgacaaaattattttataatatggaggaagcgaaaatggcagaaaaattacaggaatacagcctgacctgggaagtaacggatgagatgacggcaaagcgaatcggaagcgcaggttcccaaattttgtctactccgaatatggtggccctgatggaggcggcagcgctggaactggcgaaatcgtatctggaggaaggacagacgacggtcggagcggagattcactgccgccatctggcgccgacgccggtgggaatgaaggtaacagcgactgcaaaactccgcagcattgagcgccggaaaatgtggtttgatattgaagtaaacgatgagaagggcaaatgtggcgaagggtcccatctgcggatcatggtaaattcaaaggcgatgagcgacaaggctgcgagcaaggcggaataaggagtatcaggtttaagtatcatgcgtggattttgccgttctggaataagggggagcggcaaaatcggtttgtggtatgccatgcgtgtgaatagagataaagaaaagttactggtcacgtgtgtgtgcagcaacatagaaagagaggcagcggtgcggacagaaacgatagggtggatcattggcattttgattgcggcagcgcttgtctggtggatttaccgcaaaataaagaggaaaatgcggcagctggcgagtacgccggaggtacaggtgcttcggtatgtggcaaagcatttatcggaaggtgatttgacgcagccagacgcatccaaaccgcgttcgctggcgggaatggaccggctgtgcctgccgcagattgcaaaagatttcccggagtttaactggagcgagtggaaggctcggatcgagacagaattgagaaaaaaactggaaaaagagtatcagaaggtacatatccaccggacggtcatcagccgctatcagaaggaaaaaggactctgccggattctgtgtgagtcggcggtcgagtatgaggaaatgactgaatatgagaaaacgcctgagatgcagtcagaactgcattcgaatctgattcagacggtttatgagacggaactggtgtatgtctatgaggatgcgaaaacagcaggggcagcgctttcgcttatctgtccaaactgcggtgcaccgattcagaagctggggttgaaaaagtgtgaatattgtggttccgtgctggaagtccagaataagaaggcgtggagactgctggagatgcgggaaaagtaagcgggtgagatcccggaagaagacagtgatggagaaagaataatcccggataaattgcagaagagttttatatggggcaggagcttcctgatggctgccgcgaaagcggacaaccatgcaggtggtttcctgccatttgtctgtgcccggaacggagaaagcttccggcgaaatgccgacatcgcctttccaggtcagaccgctgtttcagtctgagacttgtcgaactggcggatggaagtttcaagattcagatgggaatggagcatttattcagtttcaactggatgtaaattcataaccagcttttccggatgccgtctaatccaccgcaatgcaatcaggcagatggcaacggagatgagagatccgatcggcgctgcgagtcccattggatacagtgtttccgggaaatagcggcatgcgagccatgcgagcgggatgcgcgctaccatgatcgagatgcagttgtgcaggaacgacagcccggacagtccgcaggcgcagaagaaaccgctgcagcagaaatggataccggcgatcatgcagtccagcacatagctcttcatatactgggttccgagccggacaacctctgcctcatcagtaaagagggagacggcagcaccggcagcaaattgcatggcaattgcgatgatcagcccgaaagaaaatgtgatgcagatcgcgtagcgcagcgtctgacgggcacgctcaggttttccggcgcccaggttttgagcggagagggcggaaaccgtggagagaagcgaggatggaaccagaaacaggattccgatcagcttttcaacgattccgaccgccgccgcatcatttaatccgcgctggttggcaaacatggtaataaccagaaaagaaacctgtataaagccgtcctgaactgcaactgggattccgacctgcaggatggaggctatggtagtcttatgtggatggagatcacggagacgaaaacccggaaacatccgttttttaatgattacgaccagggcgatcaggacactgcacatctgtgacagggtcgtgccgagtgccgcgccggacggaccgagcgaaaatacgcccattaaaaggtaatcaagcgcaatattgataatacaggcgattgcaacgaaatacatcggacttttggagtctcccatgccgcggaaaatagagctgatgatattgtaggcggtgatgaacgggatgccggcaaagcagatcatcagatatgccgcggtgccgtttaccgcttcctccgggacagacagcagcctgataatgccgtgaaccgccgtcagcagaagtccggtcagaagaatggacagacctgcaaataaggaaatcgtgttaccgatgccgcgcgccgcaagcttccggtcacccgcgccgaccgcgcgtccgatgagaaccgttgcgcccatcgccagaccaacgatcataaccgtcagcatatgcatgacctgactgccgaccgagaccgccgtcgtcccatccacgcctccaaactgcccgataataaacagatccgccatgccgtagagtgtctgcaaaaaataagataacaaatatggcagggagaaatagataactgttttcagcacactgccggaggtgagattcttttccatgaataaatcctcgtctttctggtaaaaatagatgactctgccgtcggccgtcagaaagaaaacgccgcataaatcatcttctgagtatagtttatcagaaataactataatgtctacaataattatagagtcaagggaagaaaatccttgtttttaagtaggaaatttgtggtataatatgagcacttagcgaggtgttttcgagcttagtgcgagtcatacctaaatacttaatgaagcagagccaaaggcgatagctgaatttagtatttatggtataatatgagaaggcaaataaaacccactttgattttacacaggaggtttcatgagtttagagtttaaaaaaattgaagttaacagtatccaggagatgcttccgttttacgcgatgcgccacaatatgacgtgcgacagcgtatttctggagagctatgtctggaaagattattataatgtccgctatgcaatctgggaaaataaggcgcttttatggctgatggagaatgaaggacgttgtttttccgcgatgccgctgtgccgggaggaagacctgccgggggcgtttgcggcgattgaggagtattttaatgaagaactgggatatccgctggttatcaatctggcggatgagtatgcagtgaaatatttaaatctgccggaggacaaatatctggtggaagagcaggtcgattcgagggattatctctacaacggcgatgcgatgcgttccctggcgggaaagaaactgcataagaagaaaaaccgcgtcaacgcatttaagcgcgaatatgaggggcgctatgagtaccgccgtctgtgttgttcggacagccacgatgtctgggtttttctggaccgctggagacagcagaagggcgaggaggtcgaggaacatctcgattatgaggtaaagggcattcacgatattctgaaaaactgttcagaattcagcatccacatgggcggcgtgtatatcgacggtcagatggaggcatttacgatcggaagctacaatccggtggaaaatatggcggttatccatattgagaaggcaaacccggagattaacggtctgtaccagtttatcaaccaagagttcctgatagaggaatttcctgaggctgagtgggtaaaccgcgaggacgatatgggcttagagggactccggaaggcgaaaatgacgtattatccggcggattatgcacgcaaatatctggtagaacagctgttaaacggcagcaagggctatcactgggcggagcagatcgccaatacgacggcgggaagtgtgctgacgtatctggatgcggaggataaggacgagacgaagcatctctggcatatgtgtttcccggaagattcggagagttttatcgagtattattataaggaaaagacgaaggataacgagattctggtgaaaaaggataatggacttctgatttcaatggtgcagtacaatccgtatgcggtgaagctgcgtggacgcctctggaagcttgattacctggtcggagtagcaaccgaggagagccgccgccgcgagggacatttccgggacgtatttgtgaaaatgcttcacgacgaggaggcagccggaaagccgatcacgtatctggttccagtcaacccggctgtgtatgcgccgatgggatttaccttcatcggaaatgtggcattctatgagctgaccgaggaggcgaaacagacgctgacgcgcacggtgtgccagaatacgccggaggactgcgggcgggctgctgtctatatggaacagtggctgggcgcacggtatgagatgtatacgcgccgggatgcggcgtatgtgagccgtctcatcaaggagctggcttctgaaaatggcacgttggaattcctggaacaggacggcagactggttggcctggatgcctactggggctgggaagtccgtgaacaccggcttttgtatgcggaggacgcatacacggtcaagacgggtgagaagccgtggaatatggcgcgcctgacgaatatcggggcgctgctggcggcatttggcttaaaacaggcagagcagcagggagaagaaaaacgtatgctcacactgggcatccgtatgaatgatccgattctggaaatgaacaacggtgaatttgtctggacgattggggagacaggttccagcctgaaggcgcggaaaccggagccggatacctgcggctgcacggaaaatgtttccatatggctggagacgaagccggaagagctggtgagctggctgtttggctgccggaaagcggaagaaatctggggcggacagcttgaaaataaggggctggcagagattctggcacaggtggatacggtgaacggcgtgtatctggatgagatcgtgtagagtgcgtgctgtaattgtataggatagagaatgtactgattttatgtaaactaatagcaaccgcttttatgttttcagaaaaaggagaggagagtgcgtcagatgggagagacagacacattaaaaaaatggattaatgagtcaaattatattgtattttttggcggggcgggtgtttcgaccgagagcaatatcccggattttagaagcacggacgggctgtaccatcaggagtatgactatccgccggaaacgattttaagccacagcttttatatgagaaagccagaggaattttaccggttttaccgcaataagatgctgttcccgaatgcaaagccgaaccgggcgcatctggcgctggcgaagctggagcaggaaggaaagctgaaagcggttattacccagaatatcgacgggctgcaccaggcagcaggcagcaaagaggtgctggagctgcacggatcggtgctccgcaaccattgtacgcgctgcggcaggttttacggattggatgatattttgaagatgaagggcgtgccgaagtgcggctgcggcggcgtgatcaagccggatgtcgtgctgtatgaggaaggactggacaatgaggtaattgagcggtcaattgcccatatccgcaaggcagatatgctgatcatcggcgggacctcgctggtagtgtacccggcagcggggctgattgattattatcatggaaataaactggttctgatcaataaatcagcgacctcgcgcgatggtcaggcggatctggttatcagcgacagcatcgggaaggtgctgggggacgcggtcggagtataaggtagtaacaggggagagaggaaatggtatacgaggttggagatattgtaaaactcaaaaagccgcacccgtgcggcagccatgagtgggagatcctgcgggtcggcgcggatttccgtttgaaatgtgccggctgcgggcatcaggtgatgatggcacgaccattggtagaaaagagtaccagaggactgaaaaaagcgggagagaagtccgaataagagcggcgggtgggcgtacagatgcaggcagcttcatgatctggcagtcagtaaaagaatgcagtaagaaggggcagaaagcccggaaaaaacgagaaaatttacatagaaaatctcgaaaaagtgcttgccaagccgtttcttttttggtatcatagatattcggtaatatataacacaaaaatccttactccctgctggagtcagggggtcagtgaccacaaggaggtaagaaagagcatgaacaaatatgaattagcagttgttcttagcgcaaaactcgaggacgaagagagagccgcagcgatggagaaagtaacaggttacatcacacgtttcggcggtacagtaactgacattgatgaatggggcaagaagagacttgcttacgagattcagaaaatgaaagaaggattctactacttcgtacatttcgagtctgattccgtatgcccgaatgaggtggagaaccacatccgcatcatggagccggttatcagatacttatgcgtaagacaggatgcgtaagagtagataaagaaagagtgatcgtatgaataaagtaattctgatgggcagattaacgagagatccggaagtgagatactctcagggcgagagagctatggcaatcgccagatacacgctggcggtagaccgcagaggccgcagaggcggaaacggagacgacagcgcacagacagcggatttcattccgtgtgttgcatttgacagagcaggcgaattcgctgagaagtattttcatcagggaaccaagctcgtagtaaccggaagaattcagactggcagctataccaatcgtgacggccagaaagtatatacgacagaagtgattgtagaggatcaggaatttgcagagagcaagaatgcggcatctggcaacagcgacggcggttaccgtccggcagagcgcccggctccgtccagcgcaatcggcgatggattcatgaatattcctgatggagtagaagacgaaggccttccgttcaactaggttcgggaatcggtcccccggcggacggagtgcgcgagagcgccatcaggctgatgtgtgtgaaggaggaaagaccaatggcattcaataaaggcgataaaacagacgcttccaagatcagaagaggcggtatgcgtagaagaaaaaaagtttgtgtattctgcggcgagaagaacggcgaaatcgattacaaagatacaaataaattaaagagatacgtatctgagagaggaaaaatccttccgagacgtatcactggcaactgtgctaaacatcagagagctctgactgtagctatcaagagagcaagacatctgtccctgatgccgtatgtttgcgagtaatccttgtaaaataagggttttttaagggtaaaggaagatttttactcaaattttactcaattattgaggataaaaatgattgggattccatgtgagagctcatatgggatccctttttgtataataggaaattccatggaattccctattacacaaaaaaacagatttcgaaaataagtgctttacaaaaacactttagtatgctaatatggtaacatattaaaaagcgagacggaaaccggcaaagggagaacggcttccactgtctgaaaatgaggaggacactaattatgaaaaagagatttgtgagcgcagcgctggctgcagtaatggcactttccatgaccgcatgtggcagcagcaacagcgcagcagagacaaccgcagcagacacagaggcggctgagagccaggcagaggaaaccaccgcagaagaggcgaagacaaccgacggcggcactctgattgttggttttgatcaggatttcccgccgatgggatttgtaggcgatgacggcgagtacaccggatttgacctggagctggcacaggaagttgcaaaacgtctgggtctggaatataaggcacagccgattgcctgggattctaaagatatggagcttgagtccggcaatatcgactgcatctggaatggatttacgatgacgggtcgtgaggatgattacacctggactgagccgtacatggcaaaccagcaggtatttgtcgtagccaatgattcggatatcaacagccaggcggatctggcaggcaagatcgtagaggttcaggcagattcttccgcagaggcagctttaaaagaggcaccggaactgaccgctactttcaaggagcttctgacaaccgctgattacaacaccgcattcatggatctggagcagggcgccgttgatgccattgcgatggacgtaatcgtagctggttatcagattcagcagagaaacgctgatttcaagattctggacgattccctttctgaggaagaatacggcgtaggcttcaagaagggcaacaccgagttaagagataaagttcagagcactctggaagagatggcagaggatggaaccttacaggaagtttctgagaaatggtttagcaaggacgtaactaccgtcggcaaatagtaattaatcgttgattgtaaaaacgaaacattattaaataataggaatagggacggctgtgaatgatttcatggcagtccccattcgcggtttatgtgtttaactgtgaagtcacagcacattccgttaccgggcacgtatgcgtgaacagtaacgaatctacattttagaaagcaggtatggaataattatgggtaagatgacactccagcagatgattacacagcttgcgggtggtatggcagtcagcacacagatttttgtgatcacactgctattttcacttccgttaggactcgtgatcgcgttcgggcgtatgtcgaagaacaagctgatccagacgattgtaaaagtatatatttcgattatgcgaggcacgccgctgatgctacagctcatggtggtgtattttggaccgtattatctgttccgcatcaaagtcggcagcagttaccgtctgtgggctaccttcatcggttttgtcattaactatgcggcatattttgccgagatttaccgcagcggcatccagtcgatgccggtcggacagtatgaggcagcggagattctgggttatggaaaggcacagaccttcttcaagatcatcctgccgcaggtaatcaagcggattcttccgtcggtgacgaatgaggtcatcacgctggtaaaagatacgtctctggcgtttacgttgagcgtggcggagatgttctcaatcgccaaggcgctggcggcatcccagacgaatatgatgccgtttgtggcagcagccgtcttttactatattttcaatctggttgtggcggttgcaatggaatggattgagaaaaagctggattattaccgatagaagcgggaggaatgtggaaaatgaacctgttagaattaaatcatgtggaaaaatcattcggcgatctgtcggttttaaaggatatttcactgagtgtgggcgagggcgagatcgtgtccatcatcggaccgtccggctcgggtaaatcgacgcttctgcgctgcgcgacgatgctggagacgatggaccacggcgagatcgtatatttaggaaagagagcagcctggacgggcgcggatggcaaggtcagctatgcggacaagaaggacatgaaggagatccgcagccagtacggtctggtattccagaattttaacctgtttccgcactattctgtgctgaaaaatatcacagacgcgccgatccatgtgcagaagcgcgacaaggagacggtttataaagaggcgcgcgagcttctgaaaaaaatggggctggaggataaggaggactattatccgtaccagctctccggcggtcagtgccagcgtgtggcgatcgcccgtgcattggcactgaatccgaagattctgtttttcgacgagccgacctccgcactggatccggagctgacgggagaagtattgaaggttattaagtcgttagcggatctgcacatcgcgatggtgattgttacccatgagatggcgtttgcgaaagatatttcccaccgcgtgatcttcatggcagacggactcatcgtcgaggagggcgcgccggagaaggtgtttgcttctgataatgagagaacgaagagctttttgggacggtatgggaagattctgtaagaaataattaggaaaatggaagatgggcgttgctggttttggagtggaaaatcggcgacgtccgttttttatggggaagcattttatggggaagcattttatggggaagcatataagtgttatttgcaattttacagtaaatgtgatacgcttttatcaagtattccgatttgtgaggcagtagatacctttcaaaaaggaatggaacagaaataatcgagtgttccggcgatgctggaagtggtgaaaagcgatgctgacgtttgagacgggtcttgaaggaaaggggagcggttcatggagattcgtataccctttttgagatggatggagtccgcgtctgcgcgggctctttttgatccatttgctctatagaaaggcggggctggaaaaagtggtgcctgtggatggaagattttgcaggacaggatcgcagcatggtttttagcagagatatttgaaatggtatctgttgtagagaaaaatttggacagataaacaggaagatatgagggaaaaacatggagacagaatcaagagttgccgtgatcggtattgtggtcgatcagacgggagatacggaagagttgaataaggtgctgcaccagtacgggcagtatatcgtagggcggatggggattccttaccacaaacggaacgtgaatattatcagcgtcgtgattgacgcgccgggtgatgtgatcagtgcgctgtccgggaagctggggatgctgcgggggatttcttcgaaggcgctgtattcgaaggcaccggaagcacaggaatgaaaacgaggtgacggaatggcagattttacacgcgcggggcttcgaccgtctgactggtggcgggaggcggtccgtccaggcgctgaacagatagaaacgattacagaattaaagagattgattgaccgtctggaagcgggggagtccctgacggaggatgagtgggtcagtctgatcgagggacgttcaccggagctggcggactacctctttgaaaaagcgcgctgcatccgggaaagagagtacggaaaagcggtgtatgtgcggggactcattgagtgcagcaattattgcaaaaacgactgtctttattgcggcatccgaaggagcaaccgaaatgcaagtcggtaccgcctgagtcgggaggagattctttcctgctgtgagaatggttatcagctgggattccgcacttttgttttgcagggcggtgaggatccggcgatgacggacgactgggtgatggagatggtgcaggcgatccgggcaggatttccagattgtgcgattactttgtcgctcggagaaaagaagtatgatacgttgaaacgctggaaagaggtaggggcggaccggtatctgctgcgccatgagacggcggacgcgtgccattacgcgagcctgcatccggcagagatgtcatttgaacaccggatgcagtgcctgcgtgatttaaaggcgcttggttatcagaccggatgcggttttatggtcggttcgccgcaccagacggcgcgctgtctggcgagagatatgcgttttatcgaagaactggatccggaaatggtgggaatcggtccgtttattccgcagcatgacactccgtttggcggggaggcggcgggaacgttggaagagacattgtttcttttagggctgcttcgcctgctgaagccgaaagtgctgcttccggcgacgacggcgctcggaacgattcacccgatggggcgcgaactggggattctggcaggcggaaacgtcgtgatgccgaacctgtctccggtcggggtgcgcgccaaatatatgctttatgacaataaaatctgcacgggagacgaggcggcggagtgcgtcagctgcatgaaacggcgcatggaaagcatcgggtacgaggtagtcgtcgaccggggagattataaggggtaaaagcctgcgatttggtttgttggcatcgaaagatgcttacagataaataaactgacggggaaggaggcgattggcggctggttatgctggcatttttgaaattgaaaatgccggaggaaaacatggcagctatcatcctgacctgtaagaaaaggagaagagactatgagttacaattacaacccatcatccaaaaaggcagaggaatttatcaaccatgaggaaattttagagactctttcctatgccgagaagaacaaaaacaatgtggaactgatcgatcagattctggcgaaggcgcggcttcgaaaagggctgagccaccgcgaggcggcagtgcttcttgactgcgagatcccggaaaaggtggaggagatctttgagctggcgcgccagatcaagcaggatttctacggaaaccggatcgtcatgtttgcgccgctgtatctgtcgaattactgcgtgaatggctgcgtgtactgtccatatcacatgaaaaacaagcacattgccagaaagaagctgacgcaggaggaaatccgccgggaggtaattgcgcttcaggatatgggacataaacgtctggcgctggagacgggcgaggatccggtcaacaatccgattgaatatgtgctggacagtatcaagacaatttacagtatcaagcataaaaacggggcgatccgccgggtcaatgtcaatattgcggcgacgacggtggagaattaccggaagctgaaagaggcgggaatcggaacgtacatcctgttccaggagacgtaccataaggagagctatgagcgcctgcatccgacgggaccaaagcacaattactgttatcacacggaggcgatggaccgcgcgatggagggcggtatcgacgatgtgggaattggcgttttatttggtctggagttgtaccggtatgaatttgcaggacttttgatgcacgcggaacatctggaggcagtttttggtgttggtccgcacaccatcagcgtgccgcgcatccgccgggcggacgatatcgacccatcgacctttgacaacggtatcagcgacgatatttttgagaagatcgtagcctgcatccgggtggcagttccgtacacgggcatgattatctcaacgagagagagcaaagcctgtcgggagcgggtgctgcggctgggcgtatcgcagatcagcggcggttcccgcaccagtgtcggcggatatgcagaggaagagccggaggaggaaaattcggcgcagttcgatgtgagcgacaaccggacactcgaccaggtggtccgctggctgatggaattaggctatatcccaagcttctgtacggcgtgctaccgggaaggacggacgggcgaccgctttatgagcctgtgcaagagcgggcagattcagaactgttgtcatccgaatgcgttgatgacgctcaaggagtatctggaagattatgcggcgccggggacgaaagagattggagagaagctgattcaggcggagatcggttcgattccgaaagaaaaagtgcaggagatcgtgaggaaaaatctggttgaaattgaaaaggggcagcgggatttcaggttttagttaaatcaggaggatcaaaatgggaatgaatgagacgccgtccggcgagcgggtacatatcgcgttttttggacggagaaatgcgggaaaatcgagtctggtcaatgcggtgaccgggcaggagctggcgatcgtgtcggacatccgggggacgacgaccgatccggtctataaatcgatggagcttctgccgcttggtccggtggttatcatcgacacgcctggaatcgacgatgagggcgagctgggcttaaagagagttggcaagactcgtcaagtcttaaataaggcggatctggcagtcctggtggtggatgcggtggaaggaatcagcagctgggaagaagagatgatccggctgtttgagaagaaggaaatcccgtatctggtggcttacaataagatggatttgctgacgggaaaatcggaacaggaatctgctgtgaaacataccgcctatgtgagtgcccggacgagagaaggaatccagcagttaaaagagcaaatggcacgccttacgtcgcaggaaacggatgaaaagcggctggcggctgatttagtaaagccgcttgatacggtaattctggttgttccgattgacaaggcggcgccgaaggggcggttgattctgccgcagcagcaggtcatccgggatctgctggacatcggtgcgatgccgtttgtctgccgggaaagtgaactttcggagacgtttgcaaaattgaaagaagatccggcattggtaatcacggacagccaggtatttccgctggtagaccggctgacgccgccgcaggtgcgtctgacttccttttccattttgtttgcgcggtataagggggatctgaaacaggcggcagagggcgcaaaagcgctggaaatgatacaggacggagatccgatccttatttccgagggctgtacgcatcatcgccagtgcggtgacatcggcacggagaagctgccggactggatccgtcagtacacgggaaaagcgccggagtttcattttgcgtcggggacggaatttccggaggatgtgtccggctataagctgatcgttcattgcggcggctgtatgctgaatgcgcgggagatgaagagccgtcttcgcagcgctgccgatcaggagatcccgatgaccaattatgggattttgattgcctatatgaagggaattttgaaacggagcatgggggcactggagccggtcaggtaggaaatttgggcggagaaatgaacggaaagagcgtaaataattagaaacttagaaataaaggcggataaagctgctggacgatggaaatgcctgtcggacagcagctttgtttcataggaaattccctattacacaaaaaggcactaacgtgccaatgatgcgcactcgtgcgaagatgtaggttgtcgcaagcgaccgcgcgagacgcccggatgtgccaaggcacattttttttgctgccatgagtctggaaaatagctggaggatatctggaaaaatgcaggttttttggatttagcagacaccagaatgtaaactatattaatctggcatgttgacatttaaaaatcaacggtttataatagcgaaagttagctaaatgagaaaaatgggatatttttgagtttgaccgaaggataactaaagaaaaagtgttttgattttgataaggagtagaagatatgagtttacaactggcagaagatattataaaaggacgccgtctgaaacggggcgaggatttaagctttttattgagtgaggatctggatgagctctgtgcgggagctgataaaatccgaaaggagctctgcggcaaccatgtggatctgtgttctatcattaatggacgaagcggacgctgcggcgaggactgcaagttttgcgcgcagtcagcctgtcatcatgcgaaggtggaagaatatccatttctggagccagaggagattctggaggactgcaagcgtcatgaggcgaagaaggtacatcgttactccatcgtgacggcgggacgtgcgctgacgggagcggagatggagaaggcgcttcgggcataccgcgctatgaagaaggaatgtaaggtagagctctgcgcctcccacggacttctgtcacaggaagatttcaaccgcctgaaagaggcgggcgtgggacggtatcatgctaatattgagacttcccggagaaatttcccgaatatctgtaccacacatacatttgaggacaagctggaggtcatccggcgtgcgcaggcggcaggactttccgtttgttccggcggtatcatcggcatgggagaaacctgggaagaccggatcgacatggcaatcacgctgagcgagcttggaatcaagtcaattccgctcaatatcctgcgtccgattccgggcacgccgctggaacatcaggcagcgctttcggaggatgagatcctgcggacgattgctattttccgctatatcaatccgactgcgatggtccgtttggcagcaggacgaaattcaatggaacattccggcgaacgggcattccgctccggcgcgaatgcagccatcaccggagatatgctgacaacctccggaaaccgcatcagcgaggaccaggagatgctggcggcgatgggtttcacattataaaaaaggagcattcatatcatgagtaaaatactttctgcagaagcggagcacagaccttactttacaactaaacggatggcgctgattggcgtgatgacggcggtaacctgtattctgggaccgctctcgattccgcttccattcagcccggttccgatttcctttacaaatcttgctatttatctggcggcatatgtgctgggaatgaaagcttgcacgatcagttacctgatttatatgctgcttggcatggtgggcattccggtattttccggatttacggcaggagtcggtaaactggcaggaccgaccggcggctatctcgtcggatttatcctgatggcgctgattgttggatttttcgtagatcattttccgggcaaagtagccctgcatatcgtaggcatggtattgggactggcaatttgctatattttcggaacggtatggctggcaggtcagcttaacatgacctttgtagccggactgggtgtgggcgttatcccgtatctgccgggcgatgcagtcaaaatcattttcacagctttgatcggaccgaagctgcgccgggaaatttaccggttaggagactaaaaagcgtttggctgtaaaaacgacagtttagataaaatgataatttaaaatgaaggccagatgggtgaaagtggaatacataaaacgctttcacccatcttttttgtgaatgaaacgaagaagttagttgaaattttatagaaagtaagaagaaaagagaaaaataaaagcaaaagaaaacagaaataattacatatatggaataagatgcagaaaaataagaaggatatgcgactaaacttgaacaattttgaggcatatgttatactaaagacagaaaaagagggagtccccggaggaacagggaggaggcagttgtatggagaaaaagattatcactatcagtcgtgaatatggaagcggaggtcgtcagattggtctgacagccgctaaaaaactgggaatggaattttatgataaggaattgatcgatgctgctgcgaaggagatcggttttccagcggaaattattgcggatcgtgagcagcgcttgacaaatagcctgctttacaatttcgcgatgggaactttgtatggactttcctatccgaaggagccgaagctcagtgaactgccattgacagagcagatctatgtggcgcagaagaaggcgatcgaggaggcggcaaagcgcggaagctgcgtattcatcggcagatgtgctgattatattctgaaaagccgtccggatgtactgcgtgtctttgtttatgcggatcgtgatatccggcttcgccgcgcgattgatgagtacggggatctggaagagcatattgatgaatttatgcaccagaccgacaaacgccgccggatctactatgaaaactatacgaatcagcgctggggcgacagagaaaactatgatctgatgctgaacagtggagatttgggaattgagaggtgcgtggagttgatttgccaggcggtgaagtaaaagaagagtggcatttatagtttcatgcagtcgatatgaggatatctaagataacagatgcaaagaagatgattgaaattttttgtagttatgttatctatatataaaggatctcaccgatagacggttggacccttaaatgataagttaaaaataaccgctcaagtttgcaggaccggggcggttatttttgtgtcttattactagctcgaccaactttatagccgagactaaagcatataaagcattttgtaaaagatatacgagcgcaggttactgggcacgtatgcgtgcacaataactagcacggcggctctggtttgtcaatgggggattgtctggacgaatccccctcactatgctataataaggggcatcaagtcattttggttgctttatcgttactgctcatggcaggtgttttgaaaatcggcacatggacagcaacattttatgcacgggagaatgagatgaaggaaaatatgaaaatacggggtcagctgcggacgtatctgcagtggccgattatactgtcagtcttcctgttggcggcaaatctggcagttgggattgtgagcccggctgccggtcttgtgatgtccggatttacggttatgtatgtgctggtggcactctggctgttcatgtaccggagaaaacgtctgatgggcggattggtggagttttcggcagagtatgcgtgggtgcagaaacagctcctctatgaaatggcggtgccgtatgccattgcggacacagagggacatttcctctggttgaaccactccttttcggagatcgtcggggaagataaaaactgccgtaagaatatcgcagcggtctttccggaattgacgcgggaatttttggatgagatggacgaaaaaacgagcgttcattcttcgtttgacggcagattttaccggatcgatatccagcaggtggcgctgagcgagacggaaggtatgaagctcggtgcggtggacgaggatagcggcgagatgcttttagtgctctatctctgcgatgagacagagatcctgcgctgcaagcagcagatcaacaaccagcgtctggtggcgggacttatctatctcgacaactacgatgaggcgctggagagtgtcgaggaggtacgccgttccctgctggttgccctgattgaccggaaaattacgaagtatttcacagcgatggaaggtatcgtcaagaagctggaaaatgacaagtacctgtttgtgatcaagcagcagtacacgaaagagattcaggagagccgcttttcgattctggaggatgtcaagacggttaatatcggaaatgatatggctgtcacgctgagtatcggcatgggtatgaacggcgacagctacatccgcaactatgagtatgcgagaacggcgattgatatggcgctgggacgcggcggcgatcaggcggtcgtcaaggatggcacgaagatccgctactacggcggcaaatcgcagcagctggaaaaaacgacccgcgtcaaggcacgtgtcaaagcgcatgcgatgcgcgagctgatggatacgaaggataagatgctgatcatggggcacaagatcggcgatacggactcttttggcgcggcgattggtatctggcggattgcgacctcttttaataaaaaggcgcggatcgtcatcaatggggtcaattcttccgtgaaaccgatgatggcgcggtttgaaaacagctctgattacccggaggatctgttcttaaccggcgaggaagcggcggagtgggcggattccaacacgatgttagttgtggttgatgtcaaccgcccgagtatcacggaggcaccggaactgctcaagcagatcaaaaccatcgtggtgctcgaccatcaccgccagagcagcgagatcatcgacaatgcggtgttatcttatgtcgagccgtatgcgtcttcggcgtgtgagatggtagccgaggtattgcagtatatcggcgacgacggcatcaagatcaagccggcggaggcggatgcgatgtacgccggtatcgtgattgacacaaacaatttcatgaaccaggcaggcgtccgcacctttgaggcggcggcgttcctgcgtagaaacggcgcggatgtcgtgcgtgtgagaaagctgttccgcgaccggctggaggactaccgggcgagagctgaggcgatccagaaagcagagatttatcacggcgcatttgcgatttccgtgtgtccgtccgaaggacttgaaagtcctaccgtggttggtgcacaggcggcaaatgagctgctggatattgtaggcatcaaggcgtcatttatcctgacgcagatgggcgacacgatctatttcagcgcgcgttcgatcgatgagatcaacgtgcagattatcatggagcgcttgggcggcggcggacaccgcacgattgcgggtgcacagcttaagggtgcgacgatcgatgaagccagagagaaattaaaagatctcattacggatatgatggagaaaggagaaatataacgatggaagttgtattattagaggatgtaaaggcacttggcaaaaaaggtcagattgtaaaggtaagcgacggctatggacgcaactttattctgacaaagaaactgggaatcgaggcaacaccgaagaacttaaatgatctgaagctgcagaaggcaaatgaggcgaagatcgcggcagagcacctggcagcagcgaaggatctggcaaaacatctggaggataagtccatcaccctgtccatcaaggcaggcgagggcggaaaagcattcggctctgtttcttccaaggagattgcaaaggcgatcaaagatcagttaaatctggatattgacaagaagaaactggttctgccggagccgattaagacctttggcacacacgaagttccgatcaagcttcacaaagaagtaaccggaaaactggcagtaaaggttgtagaagcttaatatggaggactgaatcatggatgaagccctgataaagcgggttctcccgcacagtgtagaggcggaacagtcagtcatcggatccatgcttatggatcgggaagcaattatcgcggcgtctgagattatcacaggcgccgatttttaccagcaccagtacggcgtcatgtttgagtcgatggtcgagcttttcaatgaaggaaagccggtcgatctggtgacgcttcaaaatcggctgcgcgaaaaagatgttccgccggaggtcagcagcctggactttgtccgggatatcatgacatctgtgccgacctcggtcaatgtcaaatcgtatgccaatatcgtgcgggaaaaggcagtcctgcgccgtttgataaaagtgaatgaggagattgaaaacctctgttacggcggaagggacaagctggaggatattctggcgcacacggagaaatcggtgtttgacctgcttcagagccgcggaggcggagagtttgtgccgatccgccaggtggcgttgaatgttctggaaaagattgaggcggcgtcgaagagcaacagcaccgtcacgggtattccgaccggatttatcgatctggattaccggacgtcgggattccagccgtccgattttattttgattgcggcgcgtccttcgatgggtaagacggcgtttgttctgaatgtcgtcgagcatgtggcggtcaaaaaagggcttccgtgcatggtattcagcctggaaatgtcgaaggaacagctggtcaaccgtatgctgtcgatggagtcgaatgtcgattcccagaagctgcgtaccggtacgctgacggattccgactgggatgccgtcgtggaaggcatcggtacgatcggaagttccaagctgatcatcgatgatacgccgggtatctcgatctcggagctgcgctcgaaatgccgcaaggtgaagctggagtacggtttaagccttgtcattatcgactatttacagctgatgagcggcagcggaaagagcggagagaaccgccagcaggagatctcggagatttcccgttcactaaaggcgctggcgcgagagctgaatgcgccggttatctccctgtcgcagctttcccgtgcctgcgagacacgtccggaccatcgcccgatgctttcggatctgcgtgagtctggtgcgattgagcaggatgccgatgtggttatgtttttgtaccgtgatgattattacaacaaggatacggatacgccgaatatcgcggaggtaatcattgccaaacagcgtaatggtccgataggaacggtgcagctgatgtggagaccggagctgacgaagtttgcgaatttggcgaaatagggtcgctgggggacgggactggagaaaaggaatggaagatgcttgaattaatacagaaatcagatgtggcggatttagatacagttcgccatttttatcgcgcgttagcgggaacggagttctgcgcgtggacggatgcctatccgggggagccggagctgcagtcggatgtttcaagaaattcgctgttctgcatccgggatgatgcgtcaggagagatcgcgggggtggtttcgatcgatgatgatccggaggtagagtcaattccgtgctggtcaaaggagctgcagccgtcggcggagatttccagactgggtgtggcggagaagtatcagaaccgcgggatcgcgcgggagcttctggcaggtgcgatggaggagcttaaaaagcgcggctgcaggagcgcccatatgctggtggcaaaggacaacgtgaaagcactgcgttcgtaccagaagctgacatttgtaaaggttggcgagtatgtgctgcaggggcatgattactggtgctttgagaagaagctatagaatggagaggggaaatttaatcccctctttttatttatgtcattcattcgccttctaccgtcagcgagatggcatttagctacgatatggtaatcgttccgatcgatggagaaggagttccggaactggttttttatgtaaatgctattcatatttagtttgaaccccgcatatagtagtagtaaggtaccggggaggacaagcagaatgaataagaacaagcattacctgatttcggatgcttccagacaggtgcaggtggaggctcacgtgctccggtactgggaggacgagctggggcttccgattccgagaaatgaactggggcatcggtactatacggagtttcatatccagctgttccgtcagatcaagcagttgaaggaacaggggtaccagttgaaagccatacggggaatcctcggaaaagtggaagaaaatcagaaaacagaaccggaagcgcttttggaagcgcaggcacaggcggttttccgggaaacgggaacaggagagcgtaacatgagcaggcaggaaaatatggaaatgaaaaaaaatacagaggtagaaaacaaggaaacagaactgccgcaggcagaggtttcccagcctctggcgggggagaaaatgcgccagtttcaggagatcatgaaccaggtcatcgggcgcgcgatcgaggaaaacagtgaaaaactgagccaggatgttagctatctggtgcatgataaattgatgaaggagctggaatacctgatgcgggtctctgatgagcgggaggaagagcgcttcaagcgcctcgacgaggtcatccgcgcgtatcagcgggaaaaccaggggcgagcggaagcagcagcggctgcgccagggcggtttccatttttccggtcccgtgtaaagaaaaagaaatttggacggaatgggaataagatgtgataagttctgcaaaagggcataaaaaaacctgtcggaaacgacaggcttttttatgtagatatttcgtttttgtttgtgtttaattagccctgctcgatagcgccggtcggacatacgcctgcacatgtaccgcagtcgatgcagctgttagcgtcgatatcgtatttgccatctccctgagagattgctccaactggacattcgccagcacaggaaccacaacttacacaagaatcagtaattacaaatgccatgataaaatcctccttttatatttatgcgtttggctatattctatactaaaaatgcgaaatattcaaggagaaattgatggttttcatgttctaaaataaaagcaatggaaaaaaccgatttttctggaagtcagtattcctacagggtcgagagcgttgagagcgcgtgctcccggacgatcgtctcataatgctcctcatagtatgcctcaaatgcattcggggcagcggcagtctttaatggttcgctgtactcggacaggagattgcacaggcggttgaatgcgtcggtgctgtcggctgtctggcggacaacaaggtagtaacgaccatcggacgggtgtttataaagcgtgttcggtgtttcgcagactggagctgcgatgcgcgctgcccggcagacctcgtcgagggagccgaaagtaaaaatacgcgctgccggcagtttggaacctggctctgcattttcagtggaaggcgcgtccgaaccggtcagcgggcttgcggcggtatttttgccattgtcagtaaataggcttaaaagcccgtccgcgccctctaaaagctcgttggcaagcgctgtcagaggctcgtcctcgtttcccggggaaaagcgtgaaaagcgggtgtccagctcttccgggtcctcgatcttggtaatgatcagcatgatgctctcactggagagcggaattgcttccaccatcagaggaatatcgtccgcctcgaagccgacttcattcgatgccttctggatcatttcatggaacagttttttcgccttttccgtgccataggcgagttcgcccagatttaagttgcgggcgctcagatcgctgcttgtcagggtgcagcggatctggttttcgttgatgcgttctattttcatggatttttcacttccttgtcttttgggtggttaagataccgaatgctccgtgcttcgcacttccgcaattttgcaagacattcgtaatccgctcatttttctgcgaaaaaaggctgcttactcatgttttggactttggaaccttggtattcatcatactatataatataatcacttggcaatttgaatatgaaaaaaaagcataaaatctttctaaaaacggttgcgggaaccgaggggatcgtatacaatgaatcttgagaggtggtatagaccgaaaggaggcgcggtacggaagcagccgttctatttggaaaataccagctggaacgtgtgatcggacgcggtcggagcggaactgtttttttagccaggcatctggggcttgatgaagagagagcgattaagcgtgtcaggcggacagagagcggtttcattcaggaagcagcgcttttgaagcggctgcgccatccgggaatcccgatcatctacgatctggaaattgacgaaaattattattatctcatcgaggaatatctgtgcggtgagtcgttgtatgcccgaattgagagaacgggcagtctgcaaacgggagagcttatccgtctgggaattgagctttgccggatcatgaattatctgcattcattcaaaccaaatccaatcttatatttagatctccaccccgggaatcttctaatctgccgggaacaattaaaattgattgattttgatcaggcggcactggcgtctttgagccaggaacgatctgtttgctatggaacaaaaggctttgcagcccccgaacagtacgagggagggactctggatgagaggaccgacatctatgccattggcgccctcctgtactatatggggacagggcatgccccagagggggagataaaagcaggacagggaagctgtcggggagatctgtacattcttatggggcgatgtctcagaatagagaaaaaagagcgctgccagagtgtccgggaagtgttagaggcattggaaaaactggaggcgcgcatatttgcagaacgtcatataccacttctcaggattgccgcagcaggcagccggagcggaatcggggttacacataccgcacttggcgcggtccgatatctgcggcagaaaggagtttcctgcctttacagggagcagaatgacacgggggcagtccgcaggctggcatcctggtatgggctggcgccggatgaacatggaatttattacatggacggtctggcgttgaaacccagatacagcgatgtggtgcagctggaacagccagtgtttgaagtgattttagatgactgcggaaccgagctccagacggttctggagggggagtatgatttgattcttttcgtctgtggattgcagccgtgggagaaagaagattctctgcgggcgatccggtttctgggagcagaagagggactccagattttattaaatcacagaaaatgcgggcgggattatcttccggaggaggtccggcatcttaggtatctgcggcttccgtttttaaccccgccgttcgatgcaggcggaaggcgggggcaggaaaatgaggcagcggaggagacagaattttttgaaaggattttctgggaggcagctctcaaaaaaggacgggggaccaggcaggcagcaaaagaagggggactctggcggaacatccggcgaaggtgggagcgctttatgggtggattcccgtggcagtggaaataggaggaaatacagattaaaatcggaaaacggggcgaaagctcaaaagtggggcggaaattcaggcaaaaaccagtgccagacacaaagcaggtcgggacagaacgcttggaatgtatcgggatagccgggagcggaccatcggttggggtgacacacttttcgcttatgacggcagcatatctgtccggggttctgtgccggcgaacggcggttctggaacaaaatgagagcggctcatttgcacagcttgaaaagatattccggacgggaaaaagaagggaaaaaccggttatagacggggcaggacagccgtttgaaattaggggaatttttttctatcaaaaggctgaacgtgcagaatggtacgattgttcggaaagggggatggaggcgatggtgatcgacttcggagccttgacacagaagaatcaggatgccttttttcgatgcagccgctgttttctggtcggttcggtcagcggatggcagctggcagattttgcggcattggcagcagaaaagcaaaaatggaaaaaatggtgtgagtatttcgtctcatttggagaagaggaagctgtaaaaatggcagagcaatatctggatatccggatccggcgaatcccactgcagaagaacgcattgatggttacgggagagtccatgactttttttggaaaattcctacgataagcgaggcagacctggggttataaattaccgattatctccgaaaggtcaaaagttagaaggggctgttttcgcggaatggagaaggtgtggaatggtagtgagaaaaagtaaaaaagaagaggcagagaggaggcgtagggaacagcagagaatatttgtcgagggattacagcgatataaaagcaaaggaatccagattttaattgatgggagggagtgcaggccagaagaatacaggaagctgtgtgagttccgggaggacggctcgttttatatggctgattacgtcggagcggagacaggagtgctgacagagatacattttgaccgggtttacaaccggtgataagagaggtgccgttttgtccgtatctggacagtccgccggatttttctttcggagaaaatggtgagaactgtttagatggtgctattacagttactgggcacgtatgcgtaaacagtaacctattacagggaaaatgaaagaggagttaagaaaaaagtcaacattccatggagctggtgtgatataataagggcacttagcgaggtattttcgagcttagtgcttatggtattaccttaacatacaccggaggaaaacatggaaagaggaagatcaaggaaagcacgttcgggctgtctgggacggattttcgggtttgtgctgtttttaatcgtggcagccgttggtgtgattgcagcggtcaaatatatgccaagccgggagagggcggatctggatgctctgtacgcggcgggcggcagcgaccgggtggcgctgtatctgaactatgaacgtcaggaggagagcggggtctacgtggacgggcagacgtatctgccggctacgtgggtagatgcgaacttaaatgaacgtttttactgggatgccaatgaggaaatactggtgtacgccctgccggaggagatcgtgaaaagcgacgagacgacagtggatgaggacggaaaaaagatcctttaccgggatggcgatgcagtttatctttcactggctctgattcagaaatacaccgatgtgcgtctgcaggcgtatgatggtgaggcacagaagcgggttttcgtggaaaataactgggatccggtcacggtggcagatgcggcgtggagcgccaagatccgcttaagaggcggcttgaaaagcccgattgtgactgagataaagcgcggcgggacagtgacggtgctggaacagtatgacaactgggcgagagtcatgacaccggacggtcatatcggatatatgcacaagtggaagatgaaaaatctgcatgaggagacgttaaagagtgattttactgctccggtctaccagaatatttcactggatcagaagattgtgatggtctggcatcaggtaacgatcgcggcggcaaaccaggcgatggattctctgattgcaaagacgaaaggtgtcaatgtcatcgcgccgacgtggtttacgcttagcagcaacagcggcgcgtatgaatctctggcagataagtcctatgtggatcgggcgcatgaaaaaggtctgcaggtctgggcggtactcgacaatttcagccgcgaatgcagcaagaacgtgcaggcggaggtgcttctttccaggacgtctgtgcgcgaaaaactgattgaaaatatgatgacagaggcggaccgttatggatttgacggtatcaatctggattttgagagtttgaagacggcggcgggtgtccattacattgagtttatccgcgagctgtcggtttcctgccgtaagaaagggctggtgctgtcggtcgataactatgttccggcggtatataaccgtttctacaaccagaaagagcagggcaacgtcgcagattatgtgattatcatgggttatgatgagcactatgcaggtggtgaagccggttctgtttcttcgatcggatatgtcgaaaacggcattaaagatatgctttccctggttccgaaggaaaaggtaatcaacgcagttccgttctacacaaggctctggacgggaagcggcgacaatgcgtcctcccgtgcgatgggaatctacgaggcgacaaaatgggtgttggagagcggcatggatctgacctgggatgattcggctggtcagtattacggcaggctggacagccagaacggcgaacagcagctctggatggaggagacaaggtctctgggactcaagatggatttaatcaagaaatacgacctggcaggcgtagccggatggcggctggggctggaaaccagcgacgtctgggatgtgattggctgggagtagagacaatttaattaagattcaatgattcaaagtagggtggaagtctcatgcgggagcgtggggcttctgcctttttatgtaataggaaattccttggaatcccctattacacaaaaaggcactaacgtgccaatgatgcgcactcgcgcgaagatgtagtttgtcgcaagcgaccgcgctcggcgcgagaatgtgccaaggcacattcttctttataaaaaagagcgtcttggacaaaaaacctccgggcggaaagattgattcatccgcctggaggttattaaagcatcaaaaatattgttttgtctgggagaaatgtgattattctgcctcttttgcctgatcgatcaggttggtgtagaaagcaagaaaactgtcatcaccttcagcgatcatagcttccggatggaactgtaagcccatcacgtagtctttatcttctctgacgattgcttcgatgattccatctggagcagtagcaacgactttcaggttgtcacctaactgatcgactgcctgatgatgccaggagtttacagtgtaggtgccttctccgccaaatgcggcagcaacgatgttatctttgtctacggtaatctcatgttttgcgaataccttacggtccggatcgcgatgttcgatatcggacggattctgagtcggaagatcctgatataaggtaccgccgcttaatacgtttaagaactgcatgccacggcaggtgcagagcatcgggatatcctcatcgagagctgccttgattaaaagagaatcagaagtatctctgacttcgtttacagtctctaatttttcgtttggctcttcgccgtagtagctcggatcaatatcttcgccgccggtcataaccagagcatcgatttctgccagagcatttttcgcgtcatcctcggttttgatctgaggaagataaattgcttcgccgccagctttggtaacggcatctatatataactgtgcatcttcgtcgatttcgtctgcattccatgaaacgccgactttgactttctcttcttcgtcattcgccgcttcttcggcagtctctgcttcgacttctgtctcggttacttcggcttcagccgctgttgtatcggctgccggttcagactttgttccacaagctgttaaagaaaaagccagggataaagaaagaagcactgcactggtcatcattttaatttttctcattcgaatttcctccctaatacaaattgtcctcccaaacatggctggattctaacataaaacagtcagaaaaatacaaaaagatacataaaattacataataaaataaaataatttttaatgacacctaaaagatataatataattttgtagatacacgaaaaatgagcgaaaataaggaggcgtaaatggaagcgaagaattgagtagggaggagtacggggaaaagccctgataacagaaagttataccttcattccctttcttaattggattttccccgcaggcaggcgttacaataaggacggaaaaaacagacgggcagccgggtcaaggctgcggggctgatagagatggcggagtgcaggaaagactccgagagaatatgacaaaccaaatggaggaaatcaaaacatggggaaatcacttaccagaaagattattgagtcacatttcgtatcgggcgatatgacgccgggcaaagaaatttttatcaaggtggatcagacattgacacacgatatcaatgccgttatgacttatctggcattcgaggcgatcgggctggaccgtgtccgcacggagtgcagcgtcagctacctcgatcacaatttattatatgtagataataagacgccggacgaccacatttatttgcagtccgcagcaaagaaattcggcgtgtatgtgtccagaccgggcaacggcatctgccataccgttcatgtatcccgttttggtgtgccaggcaaggtatcgatgggcggagacagtcacacaccgcatggcggcgcgatcggtatgctgtgtatcggtgtcggcggcatggatatagcaaccgcgatgacgggtgttccgatgcgtctgacgatgccgagagtcgtccgtgtcaacctgaccggtaaattaagaccgggctgcaactcgaaggaagttatcctggaaatgcttcgccgcgtgaccatcaagggcggtctgggaaatgtatatgagtacgtgggaccggcagttgccgagatggagattccggcacgtgcgactatcgcaaacatgggtgcggaaatgggcgcgaccacttccattttcccggcagatgcacaggtaaagagatttctggctgcacagggacgtccggaagcatacacagagcttcttccggatgaggacgccgagtacgacgagacgatcgatatcaatttaagcgagttagagccgttgatcgcatgtccgcaccagccggacaatgttatgccgctgcatcaggcggaaaagaagagagtacagcaggtatttatcggaagctgtaccaatgcaagctatgccgatattgcaaaagcagcacttgtatttaagggacatcatgtgaatgaggatgtcagctgtacctgtgcggtttcttccaagcaggtgtaccgtcagctgatgcgcgatggatatgtggagatgcttctggatgcaggtgtccgtcttctggagattgcctgtggtccgtgctgcgcaatcggtcagactccggcgaccgacggtgtggcagtccgcacctccaaccgtaatttcaagggacgtgccgggaatccgactgccaagatctatctggtaagcccggagagtgctgcagcgacagcgattatgggaaccttcgcaacggcagaagatattatgggtgaaaatgtgaagatcctggattcaattcacgagccggatcagtacgatattgatgattcgatgattcttccgccgctgtctccggaggaagctgcgaaggtggagattgtccgcggaccgaacatcaagtttcttccggttccggagccgccgcaggagacactggatgctcctatcagcttaaaagcccgtgataatgtatccaccgatgatattacaccggcaagtgctgagttcagcagtatgcgttccaatattccgctgatgtcccagtattgctattatcgatatgatccggaatttgcagctcgcgcaaaagaaatgggacagagcgttatcatcggcggtgaaaactatggacagggttcctcccgtgagcatgcggctattaatcccatgtatctgggtgtaaaagcggtcattgccaagagtattgcccgtatccataagggaaacctggtaaatcatggcgtaattccaatgttgtttgaggatggagctgattatgaccgcctggagcagacagatgagcttcatatcgataacctgcgggagcagattgcagcacgccgtgtgcagattactgataagacaaaaggattctctttctgggctaaattagaattgacggataaagaaatcgaagttgtcttaaatggcggacagctgagaacactgaaaaaacagctggaagcagagaaagaagcgtagtcatttattaattatgcctccattaatttttatatacaataactacttatttaccaacttatttattttaggaaaaggcgcctgtgcggatgtgcaggcgctttttcgcgcgacttgacggaagaaagacatttgtagtaatcttgtggtagaataagagtgaagattgtgaaagaaattgagaaaaagacattgtttggagcgcttttagcggtgatagtcaaggcgttaagtgtccttacggagaatatcgaggtattcggtataagaatatatcttcgcctttccagatttgtctgtttgctttaagattccatcatcgaccaaaatggagactacctttgacacagtattataggacatttcaagagctgtagaggttttctgaatatcaataataggatttgattccaaataggcaaacactttaagaacgctggtacgctgtctctttgtgagagcatcaaataattttgtgcttttatcgtgtaatgcagtaagataatcaattgtatgaatcgcatcttctgcagaatctgcaaaagcctgaaggaaaaaagaaatccattgctcataatcaccagtacgtcgcacctgagtcatacggtcatagtactcaatacggttcatcttgaggtaataagaaatatagagtgcgggagtagacagaatgcctttttccattaggaagagcgtaatgagaagtcgtccaacacgtccattaccatcaaggaaagggtgagtggtttcaaattgatagtggattaatgcggcttgaatcaaagggtcaagagtatcatcactattgatatatttttcaaggtcggacatggctgttagcatatcttcaggatttggcggaatatatcgagcgtttttgagagtacttccctgaccgccaatccagttttgtgaataccggaattcgccaggattcttttcctgtcctcgcgcgctttccaaaagaactgcatgagtttctttaattagacgattgcacagaggtagtgttttcagccgctcaagcgcaaactcagtcgcacggatatagttaacaacatcggaaacatctcgattggtgttgtcttcaatcagaggattcaagatatcctcaagggtgcactgtgtaccttcaatctgtgaggaaagaagggcttctttacggacatacatggaaacaaaaagtcccatgtttggtatacgggaggaaagcccttcaagtgttgctattttcttgtttgcatcaataagtttcgtgagaagctcaccagatacctcaataggaggatttggtggaagcggagctggccgaaaggattcatacgccatttcgcctgacagattactcacgagtgttcctgctcggtttgtcataattgtttttttcctccgaaaaatggaaattgaaatttttgaggctattttagcatagaaatttcaagaaatcaacttattgtgaaaataaagaacggaagaaatttcagaaaaacggctttttgtgaaattactcaagcaaaattaccttggaaatttcaagtttaggacaataagcgggaatcctcggcaatttaattaccgagatgaaagcgcaggagtgtgcatatctgcacaat

SEQ ID NO: 11089 - DNA, 267 bp, Unknown
  gut microbiota DNA sequence
gttttgtcagtgatattccatacagttttagtttatattccaacatgatataaagtttattatacggcagtccgtgaaacttctggtttgtcttgtgccctatatcttttcctttacggatatttcggatatctcctatgattacacagcttatcctttcttttttacagtattctgcaagccatctggtcaccttatgaaggtaatcctttactgcgttctgttttttccgataaatccttttgatgtgtttcgatgatcggggat

SEQ ID NO: 11090 - DNA, 21996 bp, Unknown
  gut microbiota DNA sequence
gcaaatgaattactgtctgatattagaagtgaaattgagaataaaagcaagcccaatgtacttaaatcattgctggctggtctcggaaatatcttaaaggatgcgggtgctaacgccctgtcggggctgattcaggcaataattcaaggattattctaaaatgaaatcatagtttgaatattcactaagccgccgtcgcttttgcacggcggcgcttgtatttttgcggtctgtgttgtatgataaagaataaaggaaaaaaggagggggaacgtatgacttcacgcgtggattccgtgggcctgtccggcatcagcggatatcccgtcatggtcgagtgcagcatctccagcggcctgccgggctttgagctcgtcggcctgccggatgccgccgtgcgcgagtcgcgcgagcgtgtgcgcgctgccatcaaaaacagcggcttccgctttccggtcagccgcatcacgctgaaccttgccccggccgggacgaaaaagaccggcacgctctatgacctgccgatcctgctcggcattcttgcggcgcaggagcttgtccgtctgccgcgtgagccgtccgccttcctcggcgagctgagcctcgaaggcaagctgcgcccagtcaacggcgtgctgcccatggccatcgccgcccggaaggccggcatccgcacgctgtatgtcccggcggaaaatgcgcgcgaggccacgctggcgggcggcctgaccgtcatccccgtgaaggaggtgcggcagctggccgcccatctgcgcggtgaattctccatcgagccggagccggtctggcagccggaggagacggaggagcgcctgccggatttcagcgatgtcatggggcaggagcatgtgaagcgtgcgctcgaggtcgccgctgcgggcgcgcacaatgtgctgctcgtcggcccgccgggctccggcaagagcatgctggcccgccgcctgccgtccatcctgccggatatgacgcgcgaggaagcgttggaggtcacgcagatccactccgtcatgggcctgctcacgccagagtccccgctggtgcgccgccgccccttccgcagcccgcaccacacgatctcggcccccggcctgacgggcggcggctccacgccgcgcccgggcgagatctcactggcccaccgcggcgtgctgttcctcgatgagctgccggaattccggcgcgagacgctcgaggtcatgcgccagccgcttgaggacggcatggtaacgatctcccgcgcaaacggctctgcaagctacccgagccgctttcagctcgtgtgcgccatgaatccgtgccgctgcggctggtacggcgacccctcggggcggtgcacctgctcgcagggcgcggtgcaggcctatctttcgcgcatctccggcccgctgctcgaccgcatcgacatcatcacggaggtgccgtcgctccactttgacgagctgcgcagcacgaccgtgccggagtcttctgccgttgtcaagcagcgcgtcgaaacggcccgcgccatccagcgcgagcgcttcaagggcacgtcctgccgctgcaacgccaatatgcagacgccggagctgcgccgcttctgcgagctggacgaaacgggcgctctgctgatgcagcaggcgttcgagagcctcggcctcacggcccgcagctatgaccgcatccgccgcgtggcccgcacgatcgcggaccttgccgggagcgaaagcatcctgccggagcacctgtccgaggccatccagtaccgcacgcaccaactgatccagaactgaggaattgaggaatttaccatgaatgaaatgtttttgctgaagctgggcgagatcgtcctgaagggcggcaaccgcttccagtttgagaaccgtctcaagacgaatgttgcccggcgtatgcgcccgttcggcgacttccgcgtctccatcgtccagtctacggcctatgtggagccggagaacgccgactgcgacctcgacggcgcgtgggaggcctgccatgccatcttcggcgtggtgagcctgtgccgctgccgcccgtgcgccaaggatctcgacgccatttttgatacggccatggcctaccttggcgacgatttgagcatggcgaagtcgttcaaggtcgagtcgcgccgctcggacaagcgctttccgctgacgtccatcggcctgtcgcaggagatcggcggccgtctggctgaggcctttccggacgtgacggtcgatgtgcatcacccggattacacggtctatgtcgaggtgcgcgaccgcgcggcctatgtgcacggcccggcggagcccggcgcgggcggcttgcccacgggcgtgggcggcagagccatgctgctgctgtccggcggcatcgattcgccggtcgcgggctacatgatcgccaagcgcggcgtggagctggagtgtgtgcacttcttctcctatccctacacgagcgagctggcgaaggacaaggtgctggagcttgcgcgcctgatgacgcgctactgcggccgtatgactgtgaacatcgtcggctttacggaaattcaggaggccatccgcgacaactgcccggaggaattctttacgctggtcatgcgccggttcatgatgaagatcgccgagcgcatcgcgcgcgaccacggctgcggctgccttgttaccggcgagaatctcggccaggtcgcctctcagactatggaagccatggccgtgacgggcgcctgcgtggacctgcccatcttccagccgctcatcggcatggataaggaggagatcgtcacgcgcgcccgtcagatcggcacgatggagacgtccatcctgccctatgaggactgctgcacggtctttacgccgcgccatcccaagacaaagccgacgctggctcaggtggacgccgcctgtgccccgctcgacatggagggcctgatcgcccgcgcgctggagaacaccgagcttgtgaaggtacgctggcatggatgaggcggcgcaggtcattgcccggctcacggctgcggagagaacgctcgtcacggcggaaagctgcaccggcggcctgctcggcaagctgctgacggatgtgcccggtgcttccgccgtctatctcggcggcattatctcctacgcctacgccgtgaaggagcgcctgctcggtgttccgcatgccctgctcgaggcgcagggggccgtgtgcgagccggtcgcccgccgtatggcggagggcgcgcggagcttgctcggcgcggactatgccctgtccgttaccggaaacgccggaccgggtgcggatgaaaaaaatccccgcgtcggggagatctttgtggcgtgcgccgacgcggccgggacgcggtgcgtgcggctggaatgcggcggtacgcgcggggagaaccgagaggcggcctgccgcgcagccctgcggctgctgctggagcgcgcggtatgagcggcgtgcccgacgcggccattgccgcgtgccccgactatgaggcggagtcctgccgcgcagccctgcggcaggtgcttgcgccgttcggcggccttgcgtgggtaaagcccggcatgcgcatcgccgtcaaggcgaacctcgtctcggccatgaagccggagcgggccgcaacgacccatccgatgctgctgcgggtcctgacggaggagctcgtccggcgcggcgcgtccgtcgtcgtgggcgacagcccaggcggcacctacgcagcggggcatctgaacgccgtctaccgtgcctgcggccttgcggccgtcgaggaggcgggcggcacgctcaaccggaactttgcccagcgggaggccgacctgccggacgcgcgcgtggcaaagcacattacctacacggcctacctggacgatgccgacgctatcatcagcttctgcaagctcaagagccacggcatgctcgccctgtctgccgcgacaaagaaccttttcggcgcgatccccggtacgatcaagccggagtatcattatcgctatcccgatcccatggactttgccgggatgctcatcgacctgaacgagcatttccgcccgaggctctatcttgtggacgccgtcgtcgccatggagggaaacggcccgacggccggaacgccgcgtccgttcggcgcgctgctggccgggacgaacccacaccgcatcgacctgctgtgcgcctcactcatcgggctgaagccggagaatgtgccgacgctgcgcgcagcggccgagcgcggtctgacgccgctcgacccggcgcagctctgcgttgcgggggatgccgcggcctttgcctgcccggatttccggatcgtccagcatgggacggggacggatttcggcgcgcggggcggcaccttcggccgcctgctcgggaagacggcggcgcttgcgctgcggacgcggccgggcctgaagcgggcgctgtgcgtcggctgcggcgtgtgccgcgatgtctgcccggcccatgccattacgatcgcaaacggccgggcgcacatcgaccgcgggcgctgcatccactgcttctgctgtcaggaattctgcccgaggggcgcgatgcaggtgcaccgcactgtgatcgcccgcattgccggacacttgtaaccgctggggaatctcttgaacgaattcggaactttctgctcgggatccccacgccgcttcgtttttcggaatgacaaagcggagggctttgtgcacacggaacccggagcattttctccgggtcagcttgtcaaagaagtcccttcgggcctttttgccaagctgctttccaaattgcaaaatcaaattttgcagcatgattttgcaattctgccgctgcggcgggttatttgacgcgaaaggacaccctgacggtttcctttcacactttttttcccaccggaactttcggctgggcaggtttttgacagtctgacccggagcgttttctccgggttttctgatattttatattattaattattaaaggagaatgatctatgatccagcgctatcacaacgagccggtcggcctgcgcgtgacgcccgagccgggcgactatctgaagctgcacgaccgcatcctgccggacggcagcgagcagatcaccgtgggccgcggcgggagctggtcggtcctggcctgcaaggaggtctatggcaaggcatccaaggccgtgcaggccagcggtgcaaagagcgccgtgttcgacctgagcgcggcggccgagctgggccgtgacggccttctggctgcggccgagggcatctgcggcggcgcttatcagatgaaatatacgctctccgatcagtgggagccggaatttgcctgctatgcctccggcgagggctggcaggagcaggacctgcagctcggctggacgctggcggagtccatcctccgcacgcgcagtcttgtgaaccgccctgccaatctgctcacgccggagcggcttgccgccgcgctgacggagcagtgcgcgggtctgccggtcgagacgcagtgctatgaccgcagcaccctgcacgagctggggctggaggccttcctcgccgtgggcgacagcagcggccactcgccggtgctggccgtgctgcgctatacgggcgcgccggattcggcggagcgcctcggccttgtcggcaagggcgtgacggtggattccggcggctataatctgaaatccagcggctccatggcgggcatcaagggcgatatggcgggcggcgctgccgtggccgctgccgtgcgcgccattgcggcggccgggattccggtgaatgttacggccgtcgtgccgtgctgcgagaaccgcatctccacgacgagcctgctgccgggggacctgatcggctcgttgtccggcaagaccatcgaggtattcaatgcagacgccgagggccgcctcattctggccgacggcctgacgtgggccatccggaaggagggctgcacgcgccttgtggacgccgccacgctgacgggcgcgatctgcgccatgctcggctatgtggccacgggcgttatggcgagcgatgacggctggtatgccgcgctcgagcgggccgccgcccactccggtgagcgcttctggcgtatgccggacttcccggaatatgaaaagctcatccgcggcgacctcggtgacgtgcgcaacacgagccgcgacggctgcggcgcgatcacggccgggctgttcctgcggcactttaccgagggtctgccgtggctgcatctggacatcgcaggcacggcggacaacaagggctatgtctgggagcatcaggtccccggcgcgaccggaacggccgtgagcaccctgttccatctggcctgcgggctggcagaaataaaggaggaagcaaaatgaaacgacccctgatcgaggcatgcgtggattcctatgcctctgccatggcggcaagccgcgccggtgcggaccggctggagctgtgcgcccatctggtcatcggcggcacaacgccgacgcatgccctgttccggcaggtgcagcgcgacagcggcgtgcccattaatgtgctcatccgcccgcgcttcggcgattttctctataccgagccggagctggaggagatgtgcgaggagatcgcggccttccgcgacctcggcgcgaacggcgtcgtcatcggcgcgctcacgccggacggcgagctggaccttgcgcagatgcgccgcatgatggcctgcgcagggcagatggaggtcacgctccaccgcgcgttcgacatgacgcgcgacccgttccgggcgctggaggacgccgtttctcttggctgccggacgatcctgtcctccgggcaggcggccaacgccgccctcggcgcgccgcttctggcaaagctgaacgggcaggcagcagggcgcatcgacctgatggcgggctgcggcgtaaagaaaacaaacattgcgcagattgctgcgcagaccggcatcacgaccttccacaccacgggcagaaagggcagcgtggacagcggcatgcgctaccgcaaggagggcgtgtccatgggcctgccgtccctttcggagtatgagctttggctgacggacgaggcggagttccgcgcgtgcgccgagacggtgcacgccctcggaacgccgggagcgcaggtatgacggatcgggaagcggtatttttggaaaagctcgcccggacggggctccggcagcttccggaccttttgcaggccctgccggacgagacggcgcggctggcccgcctttgctatgcggcaagccccgtcagcgactggctcgatacgccgccggaggtgtttttctcctgcgcggcgcatgcgcgatacctgcgggagaatgcttcgtggacgcgcgccctgccagagccgctgtttcttgcctatgtgctgcatccgcgcgtcaataacgaggcgctgtgcgactgccgccccgtgttctatgccgcgcttgccgagcggctgcgcggccttccggaggaagcggccgttctggagatcaaccgctggtgcgcggagcatgtggtctatcagccgacggacgagcgcacgcgcagcgcgctggccgtgctccgcgcgggcttcggtcgctgcggcgaggagtccatgttcgcggtgaatgtcctgcgcgcctgcggctttgcggcgcggcaggtctatgtgccgcgctgggcgcactgtgacgacaaccatgcgtgggtcgaggtccggtgcggcggcgcgtggcactttctcggtgcctgtgagccggaggccgtgctggaccgcggctggttcaacagcgcggccggacgcgccgttctggtgcacagccgctgcttcggcgagccggagccgggcgcggatctcatcggccgcgagggcgatgtggtctattgcaacgaaacggcccgctatgccgacgtgcgccgcctgactgtccgtgtgacggacgaaaacggcgcgcccgcagcgggggccaatgtcgatttttgcgttctgaattcttgcgagtggtatcccgcggcaacggtgcagaccgatgcgtccggcatggcggccctcacatgcggccttggcagtctgcggctgctggcacggcgggacggcctgtgctgtgaggccttcgtctccccggaggagacggggccggtcgtgctgactctcgggaagcgcgctcccgcgtcggatcgctgggagccgatcgagctgacggcaccccgcggaggagccgtgcgcggtgccgttccgacggagccgcagcgggacctgcaggagcggtggctccggcaggcgcacgaggcgtggacgcagcgccgcgaggcccggctggacgaggcggacgcgcagggcctgccgccggaggagacggcgctgctgcgcgcgggcgcgggccatgcggcacagctggcggcctttctgcgggaggagccggaggcaatgccccttttgcgcacacttttaccgaaggacctgctcgatatcgcgccggacgtcctgcacgatacatgggcgcacacgccccggccagacggcgtgccggaaggcatctgggcggtctttgtgctctgtccgcgcgtcggatatgagcagcttctgccgcagcggcgggagttgactacatatttttcggaggaacggagcgctgcgttccgcagggatccggcggcgctctgggcatggctcacggagacgatcgcgccgtccgtgctcagcccgtctccgctggcggcgctgacgctgcggcaggcctcgccggaggcaaagcgcgtcctgtttgcggcgctctgccgcgcgctcggcgtcccggcccggcttgcgccggaggacggtgcggccgaatattggcagaacggcgtctggaagcgcacggagggccgcgacacgcgcggaacggtcgttctgatctgccccgcgggcgaaaagtgggtctgcggcgtggactattccctgtctgccctgatgccggacggtgcgcgcctgctctggccttcggcggacggcctgacattctccgctgcgccgggggactactgcctgctcacaacgaaccggcttccaaacggcgaccagcgcgtgctgcggctgcatttttcccttgcggcgggcgaacggcgcacgatccgtctggagcgagcccatgcagcccttgccgagatgctgggcagccatgcgatggaggacttcttttccgcgcggacagcggcgggcgagccggtctccggtgcggcgctcacggctcacggcgggctgctgatgtggctcgcgcccgggcaggagccgacggagcacctgcttcgcgagcttctggacgaggacctgcagggtgtgcccctgacgctgctcgtgccggatgccggttccctgcgcaatgagactctgcgtcgcttctgcgaaaagaacccggacgtccctgtcttgctggacggcgatgcgcgcacggcggagactgccgcgcggcagacgtttgccgaggcgggtaagctgccgctgctcgttgtgctgcgcggcccgctcacggcggcctatgccgtcagcggctatcatgtcggcagtgcggcgctggccctgcgcgtctggcaggcggtgcggccgtgacggagctgcggatcgtccgcagccgccggaaaacgctggcgctgcaggtcctgccgacgggcgagatcgttgcccgcgcgcccctgcgcctgccggagcgggatatccatgcctttgccgagcagcatgcggcatggctcgaggcagccgtggcccgcgccagagcggggagccgggccgcacagcgggcgggcatcctgagcgaagcggagctgcagcggctccgcaccgcggcgcaggccgacctgacggagcgcgtgacgcgcctcgcggcccggatgggcgtcgactttgccgggatcacgatccgcgcgcagcgcacccgctggggcagctgctccgcccgcgggagcctgagcttcaactgccttctgatgctggccccgccggaggtgcgcgagtatgtcgccgtgcatgagctgtgccaccgaaagcagatgaaccacagcgccgcgttctggcgcgaggtcgcatcatgtttgccggactatgccgcgcagcgcgcatggctgcgggagcatgggcctgcgctgctcggccgtctgccggaaacataaaaaatcctgtggaaatatgtgccaatttgtggtaaaatatccaagatatcggctgcgcgatgaggtctgcgcagctactgcaaaggagacactgccatgaaggagatcaaaacagtcgcgctggtcggcctcggagccatcggcgcatattttgcggacaggctgcagccggtgctcggcgacgatctgcgtgtcatcgcaggcggtgcgcgtgcggagcggatccgccgcgagggccttgtcatcaacggcaagcaggaatactaccacgttgtggagccgggtgagggcgagcctgccgatctggtgatctttgccacgaagatgtccggcctgcagcaggccatcgaggacgtgcgggcgcagatcggcccggagacgctcatcctttcgccgctcaacggcgtggagagcgaggaggttgtggcgaagacctacggctgggagaatattgtctattccctgatgcgcatcagcagcgtcaaggtcggaaacaccgtttcgttcgacccgaacgccgcgttctatgtggagtatggcgagaagaaaaacgatcccgcgaacctgtccgagcgcgtgctgcgcctcaaggcactgtttgacggcgcgggcatccgctatcagatccgcccggatatgctgctggccatctgggagaaatttgcctgcaacgtcagcgaaaatcaggtcgctgccgtgctcgacctgccgtatggcgcgtggggcagctgcgaggatgccgaggcgctgcgcatcatggtcgcggccgaggtcatcgagatcgcgcagaagaagggcatccccatcgagacgaactatgcgcgcgaccatctggatgtcatcaaggccgttccgccgcgcaacaagccctctacgctgcaggatattctggccgggcgcaaaacggaggtcgatatctttgccggtgcggtcatccgttttggcaaggaatatggcgtccccacgccgtataacgagttcctgtatcacgccatccgtgtgctcgaggcaaagaacgccggtacggtcgagggagtataatatcaaataacagatcctgacgatccacaggcccatgtggatcgtcaggatcattttacttattctgcagtgaaagaagcatcgtttcgagtgcggcggcagcgacgctgcggggccggtccgtgcggcggatgaggcagacggcccgctccggcaggccctcgcgcaggtgcaggcgctcgatgccgggggcggggagcagaacatccggcacaaaggcgatgccgaggccgtttttcacaagcggcaggagctgcgtggaggtcgccgcctcaatatccggcgcatagctcagcccatggcggcggaacaggctctcatagaggtcaaacgtgctcgtgccgcgccgcagggcgataagcggcagagctgcgatctcccggagcgtaaaggtgcggccgctgtccagcgggaaggccgtgctgcacacggcgacctcacggaacgaggccagcaccgtcgcctccagcggtgcggacaggggagtgggcggcattgtgacgacggcaagctcggcaaggccgctgcgcagggcgtcgatggcctccggcgcggactggttcgaaacgcgcaggcggatggcgggattttcgcggtgaaagcggctgagtacctgcagcagcacggcatgcagggccgtctcgctgcaggcgatggagaccatgccgctgcgcagctcgcgctggcgctgcagctcggcctcgcctgcgcgcagctgctccatggcggccgtgacgtgggcatagagggcctcgccctccggcgtcagctccacgccgcggctggagcgcaggaacaggcggcagccgagctcggcctcgagattgtgcacggcgcgcgtcaggttcggctggctgttgaccagtgcctccgccgcgcgggtaaagctgcggtgccgcgctacggcttcaaagatgcggtaataatccagcgcaatgtccatgtgttcctcctatataaaattgatatcgagaccatatcaacaatagattatccgtatgagaacaatgccattataatacagccttggaatggaatcaaggaggatttattgtgaaccaggacttaacgaccggcaaaccgagccgggtgctctggaagttctgtctgccgctgttcggcagcatcattttccagcagctttataatatcgcagacagctttgtcgccggtaaattcatcagcgagaatgcgctggccgccgtcggcaatagctatgagatcacgctgatcttcatcgcctttgcctttggctgcaacatcggctgctccgtcgtggcggcgcagttcttcggcgcgaaggacctgcgcagcatgaagacgacgatctataccacgctcatcgccagcgcgggcctgtgcgctgttctgatgctggtcggcctgctgctgtcgcgccagctcctcggcctcatcaacacgccggatgagatcatgaaggactctcagctgtatctgaatatctacatctgcggcctgccgtttgtgtttttctataatgtggcgaccggtattttctccgcgctcggcgattccaaaacgccgttcttcttcctcatggcttcgtctctctcgaacatcgcggtggatatcctgttcgtcacggcgttcggcatgggcgtggacggcgttgcgtgggcaacgttcctgtgccagggcgtgagctgcgtgctggcgctggtgttcgtgttccgccgtctggcgaagatccacctgccggagggccagagggctccggtcttctccggcagactgctcggccgcgtggcgcgcgtcgccgtcccgagtatcctgcagcagagcttcgtctccgtcggcaatatcgtgctgcagagtatcatcaattcgttcggcacggccgttatggcgggctattccgcgtcggtcaagctgaacaacctcgtcatcacgtcgctcgtgacgctgggcaacggcatttcgaacttcacggcgcagaacctcggcgcacagaagccggaccgcatccgcagcggcttccgcgcgggtctgtaccttgtgtgggcgctgtgcgtcccgctgacggtgctgtatttctttgcgggcgcaccgcttgtgaagatcttcgtcgataacccgacgcagaaggcactggagaccggtgtgcagttcctgcacatcgttgcgccgttctatgtgatcgtcgcctcgaagatcgtggccgacggcgtcctgcgcggcgcgggaaagatgggcccgttcatggcctccacattcacggatctgctgctgcgtgtcgcgctggcctttgtcctgtcccgtacctttgaggagaccggcatctggctgtcgtggccgatcggctggaccgttgcaacggtcatgtctctgctgttctaccgcttcgcgcgcctgaagccggagaccccggctgaggccatcgcacttgagacagaggctgccgtcgaggcggaggacgccgccgagggcgagtacgccgagttataactgcgaacaaaaagttcggaccgtgctgcgggaatacagcacggtccgtcagactgtcaaataacctgcccagccaaaagtctcggagggaaggatcgtgtgaaaggaaaccgtcagggtttcctttcgcgttccatcacccgccgcagcggcagaattgcaaaatcatgatacaaaaattgattttgcaagtctgaaagcatcttgccaaaaaatccccggagggactgtttgacaagatgacgggagaaaccgcagcatgcctgcgatttctcccgtttttcattttttgtgacggtcatcacagagaaaacaagaagtctgtgatgaaacggtgtgaaaaaagggcaataccgcgtgatccgggaaagcattttccggaggacgaatgcaacggtgcgatattgccggaggaatcctttcagcagtcttccagcaggtcgtcgcagctcacgccgagcgccttggccagctcggcgacctcataatccggcacgaaccgaacgcccttttcaatgcgcagaatggtcacttcgttcatttccattccggcaagctgcatgcgcgcggccagctgacgctgggtcaggtgctggctgatacgcaggtcgtgcagacggtgcccgatcaggtttttggaattacggtaccaatagattttcacgatccttcaccccggttctgacagcatataatctcttaaagtttaatcgattttttgcgcgcagatacttctaaagatgaaactgccggataaaaatctgattatatcgaatggctgtgaggtcttgcaaattttatgccgttggggtatgataagaggcaagataacgggatgggaggcgcggatatggaacggattctgctggtggaggatgacagcgcgatctatcagccgctgacgtcgtttttgcgcggtgagggctttgccgtgcggcaggcctccggtcagcgcgaggcgcttgctctgctggagacggaagaatttgaccttgtgctgctcgatgtcggactgcgcgacggaaatggcttttccgtctgctcggctgtgaagcagcgcggcgggacggccgtgatcttcctgagtgcgtccggggacgagtacagtgttgtgacggggctggacctcggcgcggacgactatatcgccaagcccttccgcccgcgggagcttgtctcgcgcatccgcagcgtgctgcgccgcacggggcgggcacagtccgttttggatgtcggtccgctgcgcgtcgacaccgagcgcgcctgcgtgagcaaaaacgggcaggagctgagcctttccgcgctggaataccggctgctgctcgtattcctgaatcaccggggcgcgacgctcagccgcgcgcagctgctcgaggagatctgggacgtggcgggggacttcgtgaatgacaatacgctgacggtctatatcaagcgcctgcgcgacaagctcgaggataacccgcaggagccgacgctcatccgcacggtgcgcggcgtcggctaccggatggagggctgaacgatgcttcgaaatccggaactgcgccgggcgctgctccttggaggacttgtgacgcttctcgcctcggcagcggcggcgctcttatccggctggcgggccgcctgtgtaacgctggcgctcggcgttgtgctgctggggctttataccgtggagctctgccgccgttaccgggccatggcccgcctggcggccgacatcgacgccgtgctgcacggcagcggcgatatccatctggccgattacggcgagggcgaggtcagcctgctgcgcagcgaggtgcgcaaaatgacgctccgcctgcgggagcagtctgcgcagctcgaaaaggaaaagctgcagctcgccgatgccatggcggacatctcgcaccagatgcgtacgccgctcacggcggtgaacctgctgctgacgagtctggccgggcatgtggacgaagaaagccgcggcgacgtgcgcgcgctgcggcggcaggtggcgcggatggactggctcgtagaatcgctgctgaagctggcaaagctcgatgccgggacggcgcgcttctgcccggaaaccattccgctttcggccctgctggcgcgggcggcggagccgtttgccatcggcatggagctgcgcggccagcagctgcaggtcgaggcttccgggaacgtccgctgtgatcccgcgtggacggcggaggccctcggcaacattctgaaaaactgctcggagcatatgcaggagggcacgatcacggtgcgggcggaggaaaacgccgttgcgtcggtcgtcgtcatccgcgataccggcggcggcatcgcaccgcaggatctgccgcatctgttcgagcgctattataagggcgaaaacgcgccggagcagagcgttggcatcggtcttgcactttcacgctccatcgcggcggcgcagaacggcacgctcacggcggctaatgtgcccggcggcgcggaatttacgatgaagctctataaggggatcgtatgagcgaacgtatcacactggcgcagcttgcggccatctccatgctgacggagcgcacgctgcgcagctatctcaagcggggcctgctcgccggggagaagacgccgggcggctggcgcttcacggcggagcagaccgcggcgtttctggccctgccgcaggtgtgcagcgcctcgaatgcgcggcggaacgccgtggcagaggacttcatccagcggcgcatggacacaacggggcagctgtgcgccgtgctcgacctgccggtcgcggcagcggagctttgccggactgtggccgcccttgcggcggagcatggcgtgaccatggctttcagcggagatgcggcgctctcgcgcgtgacgctgcgcggcccggcgcaggatgtgctggcggcgctgcaggcgctgtccgtctatttccccggaaaatcctgccggatttcaggttgaagttccggcgggattttattatgctgtgggaaaggaggtgcagacgatggatctgaaaaactggtacggtcgggtacgggagcagctggacaggctggacttcccggccctgtgggcgggctttgcaccctgcccgtttgccctgtacacgcacgacacggccgttctgaacggcgaggtgatgccccgcccggcggaattctacggcaacaccagcgtgtgccggcagggggagtatcttgccatctgggatatggaggccgacccgcctgcggatgttgcggggcttgcggcctcgctcgtgcacgagatgttccacagcttccagttccgctgcggcgagcagggctggccggacgatctggtgctggcggctacggagccgcagcccgcgtttctggccctgcgcgcacaggagcaccgcgccctggcaggcggcgcgccgctttccgaggtactggctctgcggcagagccgcgcggcgctccagccggagcttctcctggaggaggcgcgcatggagaccatcgaagggacggcggaatatgtcggccgccttgcgctggcgcgcctgtcgcccgcggcctgcgaaggtgcctatgcccgcagtgcgcagcggctgctgcagtggccgaatctgcgccgcggggcctatgacagcggcccgtggctgctgcggcgggcggcagaggagggtctgccggtgccggtgcaccccggcggggaaccgatcgcggatcagctcgcacggcagctcagcctgccggaggtacggctgcagccggagcttctggccgaggcggagcggcggctcgaacgggagcggtcagtgcggcgtgagacgctgcgggccctgctcgaaacggcggagcggacggagggggactttgctgtctgcggctatgaccccatgcagcttcgggcgcaggacggcctgctctggagcgggagctttctcgctctgcggcaggcggatggcacggtgcgccgtctgttcggtccgtgcgctgtgcagcttgcggacgatccccaccgggcgacggcgctgtttgtgccgcgaatgtgacaaaattgtcacctgcgagtcactggcccgtcaccggggcatggtaaaatgaaggcatcaaacgaaaggaagaaaatatctatggatcttctgacggtcgaacatctgaccaaaacctacggcacgggggagaacgctgtccatgcactggatgacgtgagcttttccgtcccgcgcgggcagtttcttgccatcatcggcccgtccggctccggcaaatcgacgctgctgcatattctcggcggcgtggaccgcccgacgagcggccacgtttatatgaatggggaggacgtctactcccgctccgacacggcgctggcgatcttccgccgccgcgaggtcggcctcatctatcagttctataacctgatcccggtcctgaacgtggtggagaacatcacgctgcccgtcctgatggatggacggaaggtgaatgacgcgcgcctccaggagcttctggacacgctcggcctgcgcggccgcgaaaagcacctgccgaatcagctttccggcggtcagcagcagcgcgtctccatcggccgcgcgctcatcaacgcgccgtccgtcgtgctggcggacgagccgaccggcaaccttgaccgcaagaactcgcaggaaatcgtggagctgctgaaatactccaaccgccagtacgggcagacgctcatcgtcatcacgcatgacgagtccatcgccctgcaggccgaccgcgtgcttgccatcgaggacggccacatcgtccgggacgaggtgatccgcaaatgaatgtgtttcaccgcgttgcgcagcgctccatgcgcgcaaaccgcatgcggacgatcgttacgatcatcggcgtgatcctttcggcggccatgtttaccgccgtgacgacgttcgcgaccacgctgttgacgcatctgcagcgggtcacggcttatttggacggcgcttactatctcggcgtgcataatgtggacgccgacacactggcctccatgcgggccgacagtgatatcgaggctttttcggccgccgaggtgctcggctatgcagaggtcacggtcaacaacagcaataagccctatctgtatgtcgaggccatcgacgccgggttttcggaccggatgccggtccatcttgtcgagggccgtatgccggaaaacggcacggagctgctcatcccggaccacctgcaggcctattccgacgcggggacctatctcgtcggcgacacgctgacgctcgagctgggcgaccgctattccggcggctggcggctgtggcagaacaacggcttccagccggagggcgatgagtctgcggaccccggcctgacggacgagccggagcagccggagcagctgctggcgcgcgagacgcgcacctatacgatcgtcggtgtctatcagcgcccgaattttgaagactactccgcgccgggcttctctgccctgacggtgcaggagaatgagccgcagaccggcctgtatgatgtctatttgctgctgcgtgatgcaaagcaggagacgcttgaccgggtcatggcgcgctattccgatgcggctgagggcggcatcagcatgaactgggattacctgcgcacacagggcaatttccgctatgacaactattcgagattcttgctgatgtttgtgattatctttgtcctgctcatcatgctcggctccgtcagcctgatttacagtgcgttttccatttccgtcagcgagcggacgcggcagttcggcctgctggcgtccatcggcgcgacgcgggcgcagctccgccggacggtctatgccgaggccgggacggtcgcgctcatcggcattccgctcggcctgcttgcgggctgcggcggtatgtgggtgacgatccgcttgctgagcccacgcatttccggtatgatcggcgcgcgcgaggtcgcgatgcggtttgccgcctcgccgctgtccctgctggcggcggccctgatcgcgctggcgacggttttcctctcggcgcagatcccggcgcggcgtgccatgcgtatttcgcccatcgaggccatccgccagagccgcgacgtgcgcgcggcggcaagacacggcggctccggccgcctgagctaccgcctgttcggcctgccgggcctgctttccagccgctatttccaccgcagccgtaaaaagtaccgtgccacgatcttctcccttgccatgagtgtgctgctgttcgtctcggcgagtacctatggcatgtacctgacggagagcgtgaccgagagcgtcaacctgccgccctatgacctgtcctattccacgggcgagggggagaaggatgttgccatgctgcccgccctgcgggcggcggatggcgtcgagaaggtgtggtttgcctcctgtgacaacggcgactatgtgctggacaggaatgaatttgccagcggttaccggaatattctggagaaatccggcgccggaaccgagaaagcgcggagctattccgcctgctacctcgatgacgagacgttcaacgccatcctcgcctccatcggcatgacgcgcgcagagtatgatgccgcgcccggcgcgatcgtctgcgaccacacaagcgtgaactattatgacgagaacaaccgcctgagctataccggccgtgtactgaacgacggcgtcacggcgctgcgcacgttcagcgcggacagcctcgaggacggctcgaaatacgtctataccgcttacgaagacggcggctatgtcagctactattacaacgagacgaagcagacctatcagccgcgcccggcgtcgttcggcgatgggattgcaattgttggccggacggagacgcagctgacgaacagcggctctgacagcctcgtgctgtactatccgttctccatggccaagggcattgcccggaacaccggctcgctgatgctggtgacggatgacgcgaagcaggcccagaagagcctggaggaggtcgtgaacgcctccggcgagacctatacggagggcaacctctatgacgcacgggaggagtaccgcgacgcggagaatgcccttatcgtggtgcgcgtgttcgcctatggctttatcacgctgatgtcgctcatctgtgtggcgaacgtcttcaacaccacgacgacgaacgtgctgctccgccgccgggactttgcgatgctgcgctcggccggtatgacgcgcggcggcctgaaccgcatgatctgctatgagtgcctgctctacggcacgcgggccctgctcatcggcctgccgctgtcggttgcgctggccttcctgatgtatcgctccgcctctttcatcggcgcgtcgtacttccggctggactggacggctgtgctcatcgcgtcggtcatggtgttcctcgttgtgtttctctcaatgatgtatgccatgcgcaagatcaagcgcgacaatcccgtcgatgccctgaagaacgaaacgacctgacggcttcccggagctgccattgcgagggcgcccgcagcgatcccgcagcgggaatcctgcaaacggaatatcccacggacctcctttgcgcaggcaaagggggtccttttgtccgcttttgagagcgaacaaggccgctgttcacattggaaaagtgaatattcactgaaaattcactttttcggttgacggagcggattttgtgagtataatataatcagattctttatgaggaggcggccccatgaacttcgaaacggaaaatatagaattcaaggctcagtttactgaggaaatttataaagaagtgatcgctttcgcaaatacagacggcggcgtggtgtttgtcggcattgacaacgatggaaatgccgtcggattgacggatgtggatcaggagtatacccgcatcaccaacggcatccgcgacgctattgtgccggacgttacgatgttcgtgcgctttttgatccaggataacaaggtggtgcgcattgccgtcagcgagggcaccaacaagccctactacctcaaaggaaaggggctgaagcccagcggcgtttatgtacgccagggcacctccagcgtaccggcatcctctgagcagattcgctggatgatcaaggaaagcgacggcgatgtatttgaggaaatgcgctctatggagcaggacctgtcttttgaagctgcagcaaacgctttcaaaaaatatggagtgccgttcggcaaggaaaagtatcgtgcccttgggatcacacagaagaatgacgacctgtttaccaaccttgcactgatcatctccgatcaatgtgcgcatacgacgaaggtggcagttttcggtgatgatgccaataccacctttaaggataacaaggagttcggaggctccatctttacacagttggaggata

SEQ ID NO: 11091 - DNA, 42416 bp, Unknown
  gut microbiota DNA sequence
gcggccttcggttcggatttaactcaagtctctccaccaggatatagaaacccggacgttcccgattatgggatggttcgggttttctgttttatcgatcctcgccaaaatcgccggactcatcgatgaaaagctcagctctctcagatctatatgcagaataccttgtgacagtcggcagggtctttgtcccatttttcagtatttattattcattcatatacgcagagtcccctccgcaccgttctgatgcagaggggactctgtttctcattagagcaaaccggctcagacgccagcggcccgcacggtgcgctgcgttctgcggttgagcagaccgccgagcaccatcacaaaggcgaacacgataagataccagaaacagcccatgccatggctgacgagacaggcaatgaccataaagaccgagccgcagatggcaaggatcggcaggatatagtgctgccagacggaggtgcccttctgcttgcggatccactggatgaacaccgggatatagagcgcatagatcgtgatgatcggcagctccgtcgggtcaaacaggaaggggacgctctcgaagatcgtgcccgtgaagaccgtcttgtggctccaggtgccggcgaggttggacaggtagaagtacagaccccagaagccgcacagcagcaggcccatgacggcggagttgttgggcatattcgtgtgctcatcgacgcgggagaacatatgggtggccgggcctttgccgcgcgctgcgacggaatagacgccgcggcagcaggcgagcatcagaccgttcatcgtgccgatgcaggagatggcgatgaagaggttcaggatgttgccgatgacgttgccgaagatgttcgtaaaggcaacggtcgcgcccttttcgatcagctccgcgttcgatgcaccgccggtcacgccgatgtagtacagcaggtaggtggcgatgacgatgatgccgccgactgtgagggctttcggaagattgcgcttcgaatccttcagctcggagttgatggttgttgcaatgatccagccctcataggcaaaggaggttgcgcagacggctgcgaagaggatgctgcccttgctgcccacaacggcgaggggaggggcgacaaagttctccgtcagctgacccgaggcgagaccggcaatgatgccgacgatcgccatgacgccgagcgggatgagcttgatgaccgtggtggatgcctgaatcttgcctgcgagcttcggagaaagcgcgttgacagcgtaggagcagcagaggtagaacagcatgagcgcgatgcactccgggccgaccacaacgccgccctcattgatgtggatgagcagcggcatattcgggaacatcgtcgtgaggaacacgagcgtatagcgggcggagagccaagccagagccgccgtcagggacggataatagatcgtggacaggaaccagcccatataatagccgtatttcgggccgaccgtcgcttcggcatagtccacgatgccgttgaccttttcatatttctgggacataccggcaaatgtgaggatgcaggcgagcatgatcgcgccgccgatgagccatgcgatgacgccgagcggcatatcaccgtttgtgatctggaggatggtctgtgccttgaagaaaacgccggaaccgatgacaatgccaacaaccatgcaaattgcggtgaaaaggccgtatttgcgttccaatttgttattcatgagaatacttccttcctgaaacctgaaatgagtggcgcgaatacaaaacgtaccgtcgaacagagggatcaacgaaccgccgcctggcggtggaagggaaaccggtcgcagagaaaatgatcatcagagcttcgacattatgtgcaacggcaattcctcccttggtgtgcgaaatctttctggtggcatcatatcatgaacaaaaaacgatgtcaagaggatatattttttggacaactttaacatataatgagaaatcatccacaagttacaagtgttacaaatcctttctgttttaaaattgcagattttccggatacaatgcggaatttcattcatttggagttttgtccatgagcggcggacgtgaaaaatttctccgttgacaaacggtccgtttcatggcatgatgatggggaggcggcggatcagccgcgcgcccgatactgtccgccagtcgccactgcagccctgccgcaggtcgatgaccggggtatccagaatcacggcgctctgcgccgaatcatggaggtcagtatgaatcacgaagaatatcccctgaacgttgctaccccgcgctcctttacttatgtcacgcgggacatcccacgcgtcaccgctgcgcagcgcgaacgcgccctcaaggccacgcactacaatgaatttgccttccccgcaggcatgctgacggtggacatgctctccgactccggcacgacggccatgaccgatgtgcagtggtcagccatgttcctcggcgacgaatcctacggccgcaacaagggctactacgtcctgctggacgccctgcgcgactgcttcgagcgcggcaacgatcagaagcacgtcatcgatctcgtccgcacgaactgcaaggacatcgaccgcatgatggacgagctgtatctgtgcgaatatgagggcggcctgttcaacggcggcgccgcgcagatggagcgcccgaacacgttcatcctgccgcagggccgcgccgcagaggccgtcctgttcgagctcgtgcgcaagatcctcggccagcgccaccccggcaaggtcttcaccattccctcgaacggccacttcgacacgaccgagggcaacatcaagcagatgggctccatcccgcgcaacctctacaacaaggagctgctctgggaggtcccggagggcggcacctatgaaaagaacccgttcaagggcaacatggacaccgaaaagctcgaggagcttatcgtaaagctcgggccggagaacgttccgctcgtctacacgaccatcacaaacaatacggtctgcggccagcccgtctcgcttgccaacctgcgcgagagcagccgcattgcccacaaatacggcatcccgttcatgctcgatgccgcgcgctgggccgagaacgcctacttcatcaaggtcaatgaggagggctgcgccgacaagtccattgcagagatcgcaaaggaaatgttcgcctgctgcgacggctttacggcctcgctgaagaaggacggccacgcgaacatgggcggcattctggcattccgcgaccgcggcctgttctggaagaacttctcggacttcaacgaggacggcacggtcaaaaacgacgttggcatccagctcaaggtcaagcagatctcctgctacggcaacgattcctatggcggcatgtccggccgcgatatcatggcgctggccgccggtctgtatgagtgccagaacttcgactatctcgaccagcgcgtcaagcagtgcgaatatctggcgcagggcttctacaaggccggtgtcaagggcgtcgtcctgcccgcaggcggccatggcgtctacatcaacatggatgaattcttcgacaacaagcgcgcgccggagagcttcgcgggtcagggcttctccatcgagctcatccgccgctatggcatccgcacggcagagctgggcaactactccatggagtacgacctcaaaaccccggagcagaaggtggaggtctgcaatgtcgtccgcttcgccatcaaccgcagccagctgacgcaggagcacatggactatgtcatcgccgccgtgaaggcgctgtatgaggaccgcgagtccattccgaatgtccgcatcgtcaagggccacgatctgccgatgcgccatttccacgccttcctcgaaacctatccgaacgagtaataaaaataacgaccgcaccggcagcgccggtgcggtttttatatcaagtacatggcgaggtgcagcgctcacatgccgttccgcgcctgcggcagacaccgcagagataggagcggaacagctgtacgtcctttttcttcatgccgctctgcaggcagatgaatttcagcgatacaaaggtctccgggtgcagcggcacggccgacacgccgtagtaggaagcgaacgattctggcccgagcacaacgcccatgccgtcgcgcacaaggcgcatgttcgtatcgatgccgtcggagcggtatacacggctgagagaaatgccgtacttttggcaggtgcggcggagcatgcggtcctcggccgagttttcaaggccggagatcatgttgcagccctgcagatcgccgaacgacagccaggggagggccgcacggggatcgtccggcgacatgagcacgcattgccgctcctgcacgaggtcgcatacgaacagggcgggatcggtctcctcaccggcgggcaggcggtcgagcgccagatcgatggagccgtcgcgcagacccgccagcacgtcgagcccggcctccgtgacgaacgtcacatcgatctcggggtggctgtcaaaatagcgcgcaatgtcctgaaacaggcggttggaatacacgcgcgcgcccataccgatgcgcagcctgcgcccgcgccgtccgtccggcttgacggcgctgcagagccgctgccactgctccgcgaccggccgggcctcccggcagaacgtctcgcccgctgccgtcagcgtcagcccgcggggcgtgcggacgaacaggggatagccaagctcgccctcgagccgctggatctgctgcgacagcgccgattgggaaataaactgccgctctgcggccgccgaaatgctgcggcagtccgcgatctccagcacatagagcacctgcgcgatcgtcataggcacattccccctccttcatgctataagcaaatctaatatcgttattatattatcgtgttttacaattttcaagtctttgcataaaattaatttgtacgaattgcgtagaagcacttcgcagaaaggtggtaatcgcattggatcgaattctgttctccggcaacgaagccattgcgcgcggcgcctatgaagccggcgtaaaagtctgttccgcttatcccggtacccccagcacggaggtattcgaggcgctgccccagtatcgtgattcgctttactgtgagtgggcgccgaacgaaaaggtcgcgacggaagtggcctacggcgcaagcctcgcaggtgtgcgcagcctctgtgcgatgaagcatgtcggtgtcaacgttgcggcagaccccattttcacggctgcctacaacggcgtcggcggcggcttcgtcattgtctccgcagacgatcccagcatgcactcctcccagaacgagcaggataaccgccactatgcccgcgcagcgaagctggccatggtcgagccgtccgattcgcaggaatgcctggacttcatgcgtgaggcctaccgcatttccgagcagttcgacattcccgtgctcttccgcaccacgacgcgcgtggcgcactccaagagtatcgtgacattcggcgagcgtgaggagcaggaggccaagccctatgcccgcaatacgcgcaagaacatcgcctccccggcaaacgccttcctgaaccacccgaagctggaaaagacgctcgaggctctcgaggcctacggctgcacgtccccgctgaaccggatggagctgaacggcaccaaggtcggcgtcatctccgcctccattgcctatgaatatgcgaaggacgccttcccggcggacacgtccttcctgaagctcggcctgacgaacccgctgccgatggagctcatccgctcgtttgcagagaaggtcgagaagctctacgtcattgaagagcttgatgattttatggaatcccagatccgcgctgccggcatcgcctgcgagggcaagaacctgaccggcaagctctatgagctgaatccgcagctcctgaaagagcgcatcttcggccggaaggccgagacggtcgacgtcggcgtctccgccgtgtcccgtccgcccgcactgtgcccgggctgcccgcaccgcggcttcttctatacgatgtcccggcacaaggacttcgtgatctccggcgatatcggctgctataccctcggcggttccgcgcctttgagcgcgctggacagcgtcgtgtgtatgggcggcggcttcagcatcggcatgggcatgtccaaggccttcgagctgaccggtcagacggaccgcaaggtcttcggcgtcatgggcgactcgacgttcttccacagcggcatgaccggcgcggccgagatcatctacaacaagggcaacctcatccccgtcgtgctcgacaactccatcaccggcatgaccggccatcaggagaaccccggcagcggccgcaacctgcagggcgacatcgccgaggccctgaagatcgaggacatcctcgccgcctacggctacaagaatatttacatcgtcgatccgcaggatcttgaggccatggagcaggccgtgcagaacgcgcttgcctccgaagtccccgctgccatcatcacgcgccgcccgtgcctgctcatcaagcgcatcaagcacgacatcggccagtgcatggtggacgaagaaaagtgcgtcggctgcaagcgctgcctgaaggttgcctgcccggccgtcaccatccgcgacaagaaggcccacatcgatccgaaccagtgcgtcggctgcacggtctgcgcgcaggtctgcccgaagggcgccatttccagaaaggagaactgagccatgaaagcaacaaagagcgcactccttgtcggcgtcggcggtcagggcgccatcctgacggccaaggtcctggtcaacggcctgatgaaggcgggctatgacgtcaaaatgtccgaggtccatggtatgagccagcgcggcggcagcgtctccacgcaggtccactggggcgagaaggtctattctcccgtcatcggcaagggtgcggcagacatcatcgtcgcattcgaaaagatggaagctgtccgctatgcggattatctgaagcccgacggcgttgccgtcattaatgattatgagatcgcatcttcgagcattgccgccggtctgtgcgagtatcccgacggctgtctcgaggccatgcagcagcattttcgctgccatgtgctcaaggcgggcgagatcgccgagcagctcggcaatgccaaatgcatgaacatcgtgctcttcggctccatggccaaggcgctcggcatggacgacatcgattgggaagccgtcatcgccgagaccgtcccgccgaaattccgcgagctgaacctgcgcgcctaccgcgccgggcatgatgccgtgcagctttaagatcggaggaaccatgatccacagctttaccgagcttcgggaaagggccggcgcagtccggccccagaccgttgccgttgcgtgcgcgcatgacgcgcacaccctcgaggccgtgctgcacgccgcgcaggagggcattctgaactatctgctcatcggccacccggaggagattctttccatcggccgcagcctcggccacaccatcgcaccggagactgttatccccgctgcaacggacgaagaggcggccgccattgccgtttctctcgtgcgcgaaggccgcgcaggcttcctgcagaagggcctgatgcagacggcaaccatcctgaaggccgtcgtcaacaagcagaccggcatcggccttggccgccccatgtcccatgtggcgctgctggagctgccgggctacccgaagctgctcggcgtgacggacggcggcatgatcccgaatccggatctggaagggaagaaggccatcgcccacaacgccgtcgtcatgttccacggcctcggctatgagcgcccgctcgtctccgccgtctgcgcggccgaaaatgtcagcccgaagatcatcgagaccgtcgatgcggcggcgttgaagcaggccgcgctcgagggaacgttcggctcgtgctatgtagagggccccatttcgctcgatctggccctcagccgcgagtccgcgcagatcaagggctatgaaagccccgtgaccggcgagacggatatcctgctcgtgcccggcatggcggcaggcaacatgatggtcaagtcgctcgtcctgttcgccggggccagaatggtcggcgtcgtcacgggtgcaaagtgccccatcgcactcaattcccgcagcgcaagctttgaagagaagtaccattcgctgcttgtctgcgcgctgatgagcagcagccgcgaggagaatgcagaatgaagcttttgatcatcaatcccggctccaccagcacgaagctggcgctctacgacggggcgaaaaagctcctgcaggagaatctggagcatgatgccgctgcactgcagcagtatcatggcatcggcgatcaggtgccgatgcgtctggccgtcatccgcgatttcctcgaccgcagcggcgtgcatccggaggagcttgcagccgttattggccgcggcggccttgtcttcggcctgaagacgggcggctaccttgtgaacgaagacctgtgccatgctctggtggacgacgacctcagccagccgcacgcctcgaaccttggcggcctgctggcccgcgagatcgctgcgccgctcggcatccccgcctatatctacgacgctgtgacgtcgggcgagctgacggacgttgccaagatcaccggctttgtcgacatcgagcgccgcagcttctgccacgtgctcaacagccgcgccatggccctgcgctatgcgcgtgagcacggcaagcattatgaggagctgaaccttatcgtcgcgcatctcggcggcggtatctccgccagtgtgcaccgccacggcgagatcatcgactccgtcggcgacgacgacggccagttctccccggagcgctccggctgcgtgccctcgctcgggctcatcaagctctgctattccggcaaatatacctatgaggaaatgcggaaaaagatccgcggccgcggcggcatgtatgcccacctcggcacgagcgactgccgcgtcatcgagcagatgatccgcgacggcgaccgccacgccgacctgatcttccaggcgcaggcctatcagatcgcgaaggccatcggtctgctgtccatcgtgctcaagggcgactgcgacgccatcatcctgacgggcggcgtggccaattccaaaatgctgacggaccgcgtgacggactacgtcaaattcatcgcgccggtctgcgtcatgcccggtgaaaacgaaatggaggcgctggccctcggcggcatgcgcatcctgcagggcgaggaaaatgcccgcatctatcatattttaaacggagtaaatggaaaggaggggcagggatgatctcggagagccttgtccatttgggagaaaagaagtccggcatccgtgagctgttcgagtacggtctccgtcaggcagccgtcgtcggaaaggaaaatgtctatgactattcgctcggcaatccctccgtacccgcgccggaggaggtcgcctccatcatccgcgagcttctggagggtgacagccttgccctgcatggctacacgcccgcaggcggcgcgaaggaggcccagcaggctgttgccgacgatctgacgcagcgcagcggcgatacgatccgcccggagaacatcttcttcacctgcggcgcggctccggcccttgtcgccgtcctccgcgcgctggccatagaagatgccgaattcgtcgccatcgccccgtatttcccggaatatcaggtcttcgtgtcctacaacggcggcaaatttgtcgaagtcccgcccgatacgaagaatttccaggtcgatatcgccgctgtggagcgagcgctcacgccgcacacgcaggccgttctggtcaattctccgaacaatccctccggtgtgatctacagccgcgagacactcacggccctcggagccctgctcgagcgcaagagcgcggaatacggccacccgatctatatcattgccgacgagccctatcgcgagctggtctatgacaatgcagaggtcccgtatatccccggcatctaccgcgataccgtcatctgctattcttactccaagtcgctgtccatgcccggcgagcgtattggctacgtctgcatccccgacagcgtgacggacagcgccaagctgcatgccgcagtcgccggtgcatcccgcgccttcggccatgtctgcgcgccgtccatgatgcagcgtgttatcgctcgcgccacgggtctgcgtcccgacctcgaggcctatgacaaaaaccgccacacgctctacaacgcgctgacggaaatgggctatgagtgcgtgaagcccgagggcgcattctacatgatggtcaaggccccgggcggcgacgcccacgccttctccgaacgcgccaaaaaggaaaatctgctgctcgtcccggcggacagctttggctgccccggcttcttccgcatcagcacctgcgtcgatcccgccatgatccagcggagccttcccgcattccggcgcgtcctgcaggactaaggcgggatgcccatctcgatactgcaccctcagcggcatggtcctcgccgggccatgccgcagcttgtcataaaagtcccatcgggcttttctgccaagctgctttcagaattgcaaaatcaatttttagagcatgattttgcaattctgccgctgcggcgggtgatcgaacgcgaaaggacaccctgacggtttcctttcacacttttcttccctccgaaactattgacttggcattctttgatagcctgagcggcatggtcctcatcgggccatgccgctatttctgattccgtattccgtatcttttccaattttttgtcgaattccttcccgcattttcttgacacaatccggaaatcatgatagtattagcaagtatggaaagcagtaagccttgcgcgctgcgcaagggggtttcagcagtctttccacatggcggcaacgccttattgatggagttaaaagctcaaattttataagttggtaactttataaccggtgcgaaagcacatcaacttgtgaaacggtcaataagagtagtaaaagtaatctttgctatatagactctgaaacctgtcatctttgtcctgctgcggcggcgcgcgatcgcgtccgccgggagtgcgctatgcggcaagtgaggggttcacttgccgttttttgatctttccggggaaatgggggagcttccatggaaaataagctgaagctgtatgggttcaataacctgacaaaggcgctgagctttaacatttacgacgtctgctatgccaagactgaacgcgagcagcagaagtatattgcctatatcgatgagcagtataactctgaccgtctcgtgaagatcctgacgaacgtctcgcagatgatcggcgcagaggtcctgaacatctccaagcaggattatgatccgcagggcgcttccgtcacgctgcttctggccgaggatgccgccatcaagcgcgcagacagccgacttgtgcttggccatctggataaaagccatgtgacagcgcacacctacccagaataccaccccgagacctgcatcgccacgttccgcgtggacatcgacgtggagacctgcggggagatcacgccgctttctactctggattatctaatcggcagcttcgattccgacatcatcacgctggattaccgcgtgcgtggctttacgcgtgacgtgtctggaaaaaagctgtttatcgaccatgacatcacgtcgatccaggactatatcgacgccaaaattctggcacgttacgatgccatcgacatcaacgtctatcaggcgaacctcttccacacgaacatgctcatcaaagagctggatctgcagaactacctgttcaacgtggatgccaacgagcttccgcctcagacccggctggacatcagctccagtctgcggcgcgaaatgatcgagatcttcagcggaaggaacatctattgatatggaaaaccagctttctcaggcacgcgcgccgatcttcgaggctttgcgtgccttttccaaagagcgcgtcgttccgttcgatgtgccgggccacaagcacgggaaggggaatccggagctgacggagttcctcgggcaggccacaatggatgccgatgtcaactccatgaagccactcgacaacctctgccacccggtgtccgtcatccacgacgccgaggtgctggcagcgcaagccttcggtgcagcacatgctttcttcatggtcagcggaacgaccggctccgtgcaggccatgatcctgagcgtgtgcaaaaggggcgataagatcatcatgccgcgcaatgtgcaccgcagtgccatcaatgcgctcgtgctgtgcggtgccgtgccggtctatgttaatccgggcgtcgatccgcagctcggcatcgcgctgggcatgtcgcttgccgacgtggagcgcgccatcgaggccaatccggacgcgaaggctgttctcgtgaacaatccgacgtattacggcgtctgctccgatctgcgcagcatcgtgaggctggcccacgcacacggtatgcgcgtgctggcggacgaagctcacggtacgcatttctcgttttcggacgcgctgcccgtttccgccatggaggcgggggcggatatggcggccgtcagcatgcacaagtccggcggcagcctgacgcagagctccatgctgctcatcggtcctgccatgagcgagggctatgtccgcgccgtgatcaacctgacgcagacgacgagcgcatcgtacctgctgctggcaagcctggacatttcgcgccggaatctggccctgcgcgggcaggagaccatggcgcgcgtcgctgcgctggcggaatatgcccgcgcggagatcaacgccatcggcgattacgatgcgttctccaaagagcgcatcaacggaacgagctttttcgacttcgacatcacgaagctgtccgtccacacgctcgggctcggcctggccgggatcgaagtctatgatctgctgcgcgacgaatacggcatccagatcgagttcggcgacatcggcaatattctggcctatgtgtccgtcggcgaccgcgagcgcgagatcgagcgcctcgtcagcgccatggccgatctgcgccgccgcttcaagcgcgccggtacagccggtatgctgacacaggaatacattccgccgcaggtcgtgctttccccgcaggacgcgttctacggccggaaggtccgtctgccgctggagcaatgcgagggccgcgtctgcggcgagttcgtcatgtgctatccgcccggcatccccatccttgcgccgggcgagcgcatcacgcgcgacgtactggactatatcacctatgccaaggccaagggctgcaacctgaccggcccggaggacctgcacaccgaatacctgaacgtgctgacaaaggagtgagacaatggagctttggtttacggagcggcatacgccgtatgtgaatttttccatcaaggtcgagcgccagctctatacggcgcagagcgaattccagcggatcgacgtgttcgagtcgcgggaattcggccgcttcctgacgcttgacggctatatgatgctgacggagaaggacgagttcatctatcatgagatgatcacgcacatccccatggccgtccacccgaatcccgagaatatcctcgtcatcggcgcgggtgacggcggcgtcgtgcgcgagctgacgcgctatcagtcgccgaagtgcatcgacctcgtcgagatcgacgagctggtcatcgaggtctgccgcaagtatctgccgaagacggcctgccgcctcgacgacccgcgcgtgcatatccatattgcagatggactgaaattcatccgctcctgcgagaacaaatacgacctcatcatcgtggactccacggacccgttcggccccggtgagggcctgttcacaaaggaattctacggcagctgctataatgccctgcgcgaggacggcatcatggtcaatcagcacgaaagcccgttctatgccgccgatgcggccgccatgcagcgtgcgcacaagcgcatcgtggaatgcttccccatcagccgcgtctatcaggcgcatatcccgacgtatccgtccggccattggctgttcggctttgcctcgaagaaataccatcccgtcacggacttcaacccgacggcctggacgcttcttggcctttctacccgctattacaatgcgaagctgcaccgcagcgccttctccctgccgacgtatgtcgaggagctgctgcgcgatgtggagccgcaataaggagagatcattatggcaaaattactggtcattggctgcggcggcgttgcacaggtcgccattcagaagtgctgtcagaatgacggcctgtttacggagctcgtgctcgccagccgcacaaaggcgaagtgcgacgccctcaaggaaaagctcgccgggaagacgaagaccgtcatctccacggccgaggtcgacgccgataacgtcgccgcgctgtgtgtgctcatccgcgacgtccgcccggatgccgtgctgaatctggccctgccgtatcaggacctttccgtgatggaggcctgcctcgagtgcggcgtggactatatcgacaccgcgaactacgagccggagaacaccgacgatcccgcatggcgcgagatctacgaaaagcgctgcaaggagctgggcttctccgcctactttgactattcgtggcagtgggcctatgacgagcgcttccgcaaggccggtctgacgggcctgctcggcaccggctttgacccgggtgtcacgtccgtgttcgtcgcctatgccaagaagcactattttgacgagatccacaccatcgacatcctcgactgcaacggcggcgaccacggctatcccttcgccacgaacttcaacccggaggtcaacctccgcgaggtctctgcgcccggctcctactgggaggacggccattggatcgagattcccgccatgtccatccaccgcgagtatgatttcccgcaggtcggcaggaaggacatgtatctgctgcaccacgaggagatcgaggcgctggcccgcaacctgccggaggtcaagcgcatccgcttcttcatgacattcggtcagagctatcttacgcatatgaagtgccttgagaacgtcggcatgctctcgacgacgccggtcgaattcaacggtcagcagattgtccccatccagttcctcaagacgctcctgccggatccggcttcgctcggcccgcgcaccgtcggcaaaacgaacatcggctgcatcatcaccggcgtcaaggacggcaaggagaagaccatctatatctacaatgtctgcgaccatgaggagtgctataaggagctcggctgccaggctgttgcctatacgacgggcgttccggccatgatcggcgccgccattgtgctctccggtcagtggagcaagaagggcgtctacacgaccgacgagttcgaccccgatccctatatgcagatgctgaatgaatacggcctgccctgggtcgtggaggagaaccccgagaccgtcgcatgaacacgccgtattacctgatcgacgaggccgctctgcgccggaaccttgaaattctccgcggcgtgcgtgagcgcacaggctgcaaaattctgctggcgcagaaggcgttctccatgttcgccgtctatccgatcatcgcggaatatctcgacggcgcgacggcaagcggcctttttgaggcccggctggcggctgaggagctgcagggcgaaaaccatgtgttctccgccgcctaccgcgccgaggatatcccggagctggcccgcctgtgcgaccatgtcgtgttcaactcctgcgcccagctgcgcgcctacgcgccgcaggtcctcgctgccgggaagcaggccggcctgcgcatcaatcccgagtgctccacacaggagggccacgcgatctatgacccctgcggcgagaagtcccgcctcggcgttacccgggcgcagttcgaccccgaggtgctgccgctgctcagcggcctgcacttccacacgctttgcgagcaggattccgatgcgctggagacgacgctggacgccgtcgaggcacgcttcggcgagcttttccccggactgcgctggctgaacttcggcggcgggcaccacattacccggccgggctatgacattccgcggctcgagcgctgcatcgaccgcatccagcagcgctatgggctgcaggtctatctggagccgggcgaggccgtcgcgctgaacgcaggcgtcctgcgctgcaccgtgctcgatatcgtggaaaacggcggaaagatcgccattctggatacgtccgccgcctgccatatgccggatgtgctggagatgccataccgcccgccgctgcccggcagcggtttgcccggcgagaaggcatatacctatcgcctcggcggaccgacgtgtctggcaggggacatcatcggggattattcctttgaccgtccgctggccgtcggcgatgtgctggaattcggcgacatggccatttattccatggtgaagaacaacacattcaacggcatgccgctcccgtccatcgcgcttcgcactttggacggcacggagcgctgcatccgcagcttcggctacgaggatttcaagcagcgcctgtcataaattttccgcacccgcatagagtcgaatgggggtgttcggaatgaagaactggaccaaaaccgccgggctctatgcgctggtctgcgcggcggcactgctgtctgcgatggcgctctcccgcgtggggagcgccgttgccgtattttcccgggaaaccgggacgaccgtcgttgtggatgccgggcacggtggagaggacggcgggacattgtcgtgcaccggcgtgcgggagagcggcctcaatctggagatcgcgctgcgcgtgaacgacctgtttgccctcctcgggcagaggacgcgcatgctgcgcacacaggatgtatcgctgcacgacacagacgccgcgacgatcgcggcgcgcaaggcgtccgatatccgggcgcgcgtccgcctgacggaggaaacgccgaaggccgtgctcctgagcattcatcagaatcattttccggagtcaaaataccgcggcgcgcaggtgttctatgccgccgcagacggcagccgtgcgcttgcagagcggctgcagaccgcacttggaacgcagctcgatccagacaatcaccgggcctgcaaaaaagcgggggagatctaccttctgaagcatgtgagctgccccgccgtgctcgtggagtgcggtttcctgtccaacccggcggaggaggccctgctgcgcacgccggaatatcagaagaagcttgcggcagttctgtgctgcggcatgctggaatttctggaggaaccctatgaaagctgctaagaccgtttttctctgctcgaactgcggcaacgagacgccgcggtggcagggccgctgcccgtcctgcgggcagtggaacacgctggaggaatataccccgccgcaggccgccgcgccgtcccgcagcagtctctccaaccgaacgtccgccgcgcgcggtgccggcgtgcagccgaagcgcctgaacgaggtgacgagcggggaggagctgcgcttcgggaccggcctgtccgagctggaccgggtgctgggcggcggcgcggtgcgcgggtcgctcgtgctcgtgagcggcgcaccgggcatcggcaaatccacgctgctgctgcagatctgtgcgcagatctgccgggagcagacgattctctatgtctccggcgaggagagcgagaaccagctcaagctccgcgccgagcgcctcggcgtgcagtccgacgccctgtggctgctgtgcgagacgagtctggacgaaattctggccgcggccgaacgtatgcagcccggccttctcatcgttgactccatccagacgctctacacggaggacaagacgtcctcgcccggcagcatcgcgcaggtccgcgactgcaccatgcgcctgatgcagtattccaagcgctgcggcgtgacggtgttcgtcgtcggccacatcaacaaggagggcgcgatcgccgggccgaaggtgctcgagcacatggtcgactgcgttctgtatttcgagggcgaggagcacacgacctaccgcctgctgcgcgcggcgaagaaccgcttcggctccacaaatgagattggcgtgtttgaaatggacgaccgcggactgcgcgaggtcccgaatccctcggagctgctgctggctgggcggccgcttggcacgccgggcacctgcgtcgcctgcgtgatggagggcacgcgcccggtccttgccgaggtgcaggcgctcgtatgtcagacgacctacaacatgccgcgccgcacgagcaacggctatgactataaccgcgccgccatgctgctggccgtgctggaaaagcgcggcggcctgcggttcggctcggcggacgtctacctgaacgtcatcggcggactgcggctggacgagcctgcggccgatctggccatcgccatcgccgtcgcctccgccgcgctggacaagcctgcgcccgatacgctcgccgccatcggcgaggtcggcctgaccggcgagatccgtgccgtcaaccagctcaatcagcgcctgtccgagctgcaccggctcggcttcacgcgctgcctcatcccgcgcagcggcacgcagagcctgcacgcaccggaggggctggagctgctgcgggtgcgcaatatccgcgaggccatggccgtcgcgctctgagcagagtcgaatatgcctgcattcgctccggcggaaccgtcctgccggagcgatatttttgggcaaaaacgccgggatatgcgccggggcggccgggaaaccgtcaaaataacagtagattttttctgagaattattgtatgatattgctttggaaagaatactgacgggaggggaatcatatgcccgggatcaaatatatcacccgcgtgctgcgcggcgtccgctttgaaaagctgaactacgtcatgggcgtcgtcaagcagaagagcggccacagcaaggcgcgcacattctgcgacattctctggtgcgcggcgcgctacggcgcagggtactatgactatgtgatgttcggcttctacgccatgaacggtaagcagcgcgacacctatctgacgcgcgtgcgcaacaaaaaggtctgcgagctgatgaatcagcccggctatggtgatgagttcgatgataagctccgcttcaatgtccgctttgccgatttcctcggccgccggacgctgaatgccgccgcggcaacgccggatgagctgtccgcattcctgcaggggctcgactgcttcttcgccaagccgagccgcggcacctgcggcaacggcatcgagaagctccgcacggcagactggccggatgcggagaagctgctggcctatctgaaggaaaagggcctcgacgtgctggaggagccgcttgcgcagcatccggatatggcgaagctgcacccgcaatccgtcaacaccatgcgcatcgtcacggaccgtgtcggcgacaccgtacacattgcctatatcgtgctgaagatcggcaggggagacggcttctgcgacaactccgggcagggcggcgtcatctgtcgcgtggacgagaagaccggtaagatctgctccgtcgcaacggacgattatttcaacgtctacgagacgcatccggacaccggcattcgcttcgagggctatcagctcccgatggtgcaggaggccgtggactttgcgaagaaggctgcgctcgttgtgccgcagatctgccacgtcggctgggacgtggcgatcacgccggacggccccgtgctcatcgagggcaacgattaccccggaacggatctgtgccagcttgcgccgcactatccggagaagcagggcctctggccgtattacaaggaaattctgaatatcaaataaatagggagcattcgtcatggaacaagagctgcaccccaatgcggggaaaaacgacatcattgaggtcgacggcgtgcgctatcagcgcctgcccatcaagacccacctgatcacggataaggacaacatccttgacgtggccgagaagtacggcaagcccgtgctgtccaagcccggcgacgtgctgttcatctcggaaaagtgcgtggcctgcacgcagcgccgcgccattccgcttgcggacatcaagccgcgcaagctggcctataagctcagcgcccatgtcaccaagacgccgcacggcatcggcctcggcatgcccgagacgatggaaatggccctgcgcgaggtcggctcgctgcgcatcctgtttgcggccgccatctctgtcatcggcaagaagattttccgcaagaagggctggttctacgccgtggccggttaccgcgcccgctccatcgacggcccgtgccacaacacgatcccgccgtacaaccactatgtcgtcctcggtccgctgaagccggatcaggtcgcaaaggacattgctgcgcgcgtcggctatgacgtcgccatcgtcgatatcaacgacctcgagggccagatcctcggcgcttcctccaaggccgtgaacaagaagctctatgcccgcattctgaaggacaatccgctcggtcaggacgaccagcagaccccgatgggcatcatccgccgcgtggactgacctcccgcctgcacgaaaaacagctccggcacatagactgtgtcggagctgaaattatgcgtgcggaggggatcggaatggacttttcccgggaaagggcgcaggcctatgcgcaccgctgggcctttgggcggaatccggagtatctcgcctttgaccggctcggcggagattgcacgagctttgtttcgcagtgcctgctggcaggcggcgcgccggaggacccgacgccgctgtggggctggtattaccgctccggaaacaacaaggcgcctgcctggagcggcgtcgagccgttctggcgctttttcacgcgcccggaccgtgaagacggcctgcgcggcgtagaatgcggcccggaagatctgcagccgggcgacatcattcagctcagcttcgatgggcggcgttatgcgcactgcctgctcgttgtgggaacggggcggcaaattctcgtctgcgcccacgatgaggacagcgatttccgcccattatccacctacgagcggcagaagacccgcttccttcactggatgccgccgtccagcagcgccttgccgagcgcctccggcgagtgatagatcgtctgcgccccggctgcgcgcagctcggcctccgtgcggaagccccagccgaccgtggcgcaggggagaccggaattcctcgcagtctgcagatcgacctcggagtcgccgagatagatcgcatcgtccgccgtgctgccgagccgctgcagtgccgcgaggaccatatccggcgcaggctttttggaacaggcaggggattcgccgaccgcaacgtcgatgatgccgtcaaaatacagcgtgcggatgagctgcacggccggatcggccttgtttgagacgatggccatgcggaagcccgcctgctgcaggcgctgcagcagctccggaatgccgggataggggacggtcttgttgtgatagttttcgcagtagtgcgccttcatgcacgccagcgcgcgctcgatctcgacctcggagctgccctgcggtacggcgcgggtcagcagcattttcagaccatttccgacaaaccgccggacctcctccagcgagcgctccggatagccataggtccgcagcgcaaaattcgtgctgtcgcgcagatcctccagcgtgttcagcagcgtgccgtcgaggtcaaataacagggtctttctcataatgtgtctcctttggagccggacgcgagaggggattggcctctgcggcgatcttcagctcggtattttcgatgtgggtgtaaatctccgtcgtgttcaggtgctcatgaccgagcacctcctgcaccgttctgaggtccacgccgtttgcgaccatcagcgtggccgcagtgtggcgcagcttgtgcgcggagtattgctccgggtccagcccggccgccagcatgtgctttttgaccagacggtgcacggccgtcacgctcagacgcctgtggtcacgggagccgaacagcgcccgatcgtcatccaggacgattttgttgcgttcgggaaggtaggtgtccagcgcctcacgcgtcgtttcgccgaaatagacgaaacgctctttgttccctttgcctgttacacgaattcggtcgttgtatatgtcatttcgattcaggccgaccagctccgcgcggcggatgccgcagttcagaaacagcatcaggatcgcatagtcgcgtgcccggttcggcccgtcgaccgcggccagcagacggcggctttcctcgagcgtcagatacttcggcagggcgcggcgcatacgcgggtactcgatgtcctgtgcgggattctcgtcgagcagcttcgtgcgggtggtcagatatttgaaaaacgacttgatggccgaaagcttccgcgcgcgtgccgacgcaccgaggccggagccgtcctgcgtcctgcgttcgcgggccagatagctcaggaagtcgaagatatcgttcgtcgtcacgcttcgcagaaattcgacatcgacgtgccggacggagatcgtctccagatcggtgtcgatcggcatttcgctgcgcatgagcacaaggaaccgcaggaacatccgcaggtccagatgatattcgtcgatggtcttgggcgactggcccttgatggtctcgtggtacgccagaaattgtcgcaggatctccggagtatccggatcgatcataataacacctccaaacaggcgccgggaccggaaaaccggcattcggctttgtatgccactattatagcatatctctgtctcaaacgcaacaaaatttttattttgttgcgttcgttcatttcaactgttcgcgagaattcgggacaacattccggccgcctccggttgctgccgctctcccttccggctgcgggatcgtgcccgctgcggcgtgagcctgagcaattccggaatccgttcgaccggctatccgcaagctcgcaggcctctccatgagcgcccgatttgtgcttggggcttgacgcccgaaccgcgctctggtatactatagttgcagacaatcgcatggttcccgaggaattggacctcgggttcccagcgcggtctgacgggaggtcttcggaagcagcagctgatttgcgccattcgggttgcaggcttgcctgctcgtgccggaggcctccttcttttgcatcgcagataccccggcgtgcagccgggccggtatctgcgttctttttatgcattttatacaggaattatattcaattttgagtcttgatttggcgggaaatggtgaaaaatccccggattcccctgccgatttctttcatttctccgtttcaaggttatttttatgttaaatctttccattccctcttgacaaaaggactacttccctgctaaactaggtcaataactaactgatatttcgcgcacgcgtaatatgcgcgtaatatcaggaaaagaaaaagggaggtaaccaaatgaaagcaagatttcaacgcgcgctggcgctcctgctggtgctggtcctgacgctggggtgcatcccggccgtatccgccgtgcaaccgaatgagccggtcaccaacccggaaccggctgaggaagcggcacagcttccggagggctccgatctcggcgcgatcctgcagggaaacaaggacgcagagctcgaagcgctgcagccggagaccccgaaggacaccgatcttgtccgcgtcatcgtggagctcgacgctcccgccctgacggagcagagcggcatgttcgcaggaaaggctctgacggatgcgggccgcacagcgcagcagaacgtcattgccgcgcaggagcaggtcgaggcgaagatcgccgaggccgcaccggaggcttccgtgcgctattcctattctctcctgctcaacggtattgcgctggaatgcgcctatggccatatcgcggagctggaagctctgccgggcgtcaaggccgtccaccttgtgcagacctatgagctccctacggagccgaaggttacctccggcggcggcatgatcggcgcgccgacagcctggaatctcggcatggacggctccggcatggtcgtcgccgtgctggacaccggtcttgacaccgaccacgcggcctttgccgtcgatcccaagtcgcctgccgtcgtgcggggcgacatcgatgagattctttccgcagacacgctgcaggcgcagcgccttgtgcgggacctctcctccagcagtgtctacctgagcggcaaggtcccctatgtgttcgactatgccgatcacgacacggacgtcaaccatcatggcggctccgaccacggcacgcacgttgccggtatcgttgcagccaaccccgcggacggcagcgtcaccggcgttgcgccgcaggctcagctcatgatcctgaaggtcttcccggacggcagcaccggcgcaaactccgatgatatccttgccgcgctggaagactgcgtcacgctcggcgtcgacgtcgtgaacctctcgctcggctcccccgccggctttacttaccgcagcgacctgctgagcacgatggaggtctatgaccgtctggccaaggccggcatcatcgttgcggcggctgccggcaacgaatactccgccgcctataagaatctgtggggcacggacctgtcgctgacgtccaacccggactacggcatcgtcggctccccgagctcctattcccagaccctgtccgtggcgagcgccgataatgtctccgtccgcagcgattactttgaggctgccggacgcaagatcacgttcacggatacggccacgacgaacaaccccgagggcggcttcatccgcgtgctcggcggcaagacgcttgactatgtcgtcgtgccaggcagcggcgaggaggcggattacgccaacctgaatgtcaagggcaaggtcgtgctcgtcagccgcggcgttacgacgtttgcagaaaagcacgaaatggcccacgccaagggtgcggcagcctgcatcgtctataacaccgaggcgggcatgatcaacatgagcatcgactcgttcccgatccctgcgatctttatctcgcaggcagacggtcaggcgatggtcgccgccgccaaggacggcgtcgggacgctgaccgtttccaactcgacctatgacgctccctccgagacgggcgggcagccctcctcgttctcgtcctggggctcgacgtcccagctggagatcacgccggacatcatggctcccggcggcaacatctattcttcccgtgacaacaattcctatggtctgatgtccggcacatccatggcgacgccgcatctggcgggcgccagcgcgctgatgctggagtacctccgcacggcgggcatcgagggcgacgccatgacgctggcctacgcgctgatgatgagcacggccgtcccggccaagggcagcaacggcataacggcgtccccgcgcaagcagggcgcaggtcttgtgaaccttgcctccgctatggcgacgaaggcctatctgcaggttgagggcaaggagcgtccgaagctggagcttggcgacgatcccgacaagaccggcgaatatcggatgacgttccgcgtggtgaacttcggaaccgaagcgctgcagtacgccattaccccgaccgtcctgacggaaaacgccgaaacgaagggcgattacggcaacgtacaggtctattttgccacgcagacctcgcgcgatatcacggcgcagacgacgtggacgacgaactgcgcaaacaacgttgtgaccgttcccgccaagggcacggcagatgtgaccgtgacggtcaagctctccgatgcgctgcgcaaggagcttacggacacgtttgaaaacggcatctacattgagggctacatcaccctgacgcagcagaccacggccgagggcgtcacaggctgcgacctttctatcccctaccttgccttctacggcgactgggatcaggctccggtcatcgacatcggctactactggcagaagctgcagggcgagccgaactgggccagccagtacctgaactacggcggcagcatgctctccggaacaggcagcttctatgtgttcggcggaaacccctatgcgccggagctggcctactatccggagcacaatacgctctctcccctgcgcacggacggctattatgacaaggtcgacctgatctacaccgctctgcttcgtaatgcaaagtccctgacctatcgcattacggacgccaagactggtgagacctattaccgcaagacggtcgactatgtcggcaagtccgtctataatgcgaattacgacacaatcctccccgcaggctccttcacctccacggccatcgacccgtggtacggcgtggattcggccggtgagatgctgaaggatgatacgactgtcatcgtctccatcgacgccgagctcgatcacgacggcttcacggcggcgcagaacaaaaacgcccactgggagttccccgtcaccatcgacaatacgcccccgcagatcctgtcgtcgacctccgacggcgaaacgctgacgctcgaggtcgcggattcccgttaccttgcttatgtggaggtctatgacgtggagcacatgaacgtgttctccgagccggtcttcagtcagggctacagcagcaagaccctcggcgagaccgcgacggtccgtgtgaacgtatcgggcctcaacaaggtctatgtctgccttgcggactacggacgcaatgaaaaggtcgtcacgctcgatgccaagaccggcaagctcatcgaatcctcgcagtttgagtattttgagagcaatggcgagatcaccatcacgggctacaccggctcggagctggacgtcgttatcccggacgagatcggcggctaccccgtcaccgccatcgcagaaaaggccttccagctcaacaagaccgtccgcagcttcacgattggcagcaagatccgctccatcggctcgtgtgcctttgctcgctgcgcttcgctgacaaacatttacgttgaccgcgccaacccgtactaccagtccattgacggcgtgctctacagcggcgacggcaagacgctcctgtcgtatccgaccgccaaggcctacagcagctatcccgtggccagcggcacggagaccatcggcgaatatgccttcttccacagcaaggtgcagacggtcttcctgccggataccgtcagcaccatcggtgattatgccttctactatgcaggcgagctttcgtccatcaatttccccaccgctctgacgagcatcggcgattccgcgttcttcgcctgtcagagcctgacggcggtggatatccctgctacgatcacgcagatcggtccctctgcgtgggcggcctgcacgagcctgcctgccatcaccgttgcggcagagaacccgaactacaccgccgtagacggcgtgctctacacgaaggatatgaccgttctgaaggtctatccctatgcaaagtccggcgtcacgttcacagttccggacagcgtcgtggagctggaggcttatgcctttgcctacaccggcatgcagtccattgacggctgcgcaagcctgcgcgcgatcggcgacagtgccttctattcctgcactgcgctcaagtccctgccggatgccccgaagctcgagaccatcggcgagcgtgccttctattcctgcaaggctctgacgagcctgtccttcccggacagcatgcgttccatcggcgaatacgcctttgcatggtgcaccgccgtcaagacgttcgactccggtaacggtctgcaggataccggcaaatactccgtctattactgcaccgcgctgaccaccgttcgcctcggcagcggcatgaagacgattggcgagtatgcgttctataagtgcagcaggctcgccaatgtcgacttcggcacctcggtccgtgagatcggttcctgcgccttcggcggctgctcaaagatcacggaaatcgtcctgccggacagcgtggagctggtcgaatccgctgcgttcaacagctgctccacggcgaaaacgctcgtgctgagtcagaacctccgcgagatcggtgcacgcgccttcatgggtctgaagggcatcagcaccctgaccattccggacagcgtgcagaagatcggcaactccgcctttaacggcctgtccaacctgctggagctgcacctgtccgccaaaacgcaggagtacggcagcggcgtgttcagctctgcctcgaagctcccgcgcgtggagctgccggagggcatgaccgccatcccggaggaaatgttctccagctgcaatgcgctgaccgaggtcgtcatcccctctaccgttacccgcatcgaaaagggtgcgttccgctcctgcaagaagctcggcaatacggagctgcccgccggtctgacctacatcggcgaatcggcattctattatgccgccatgacatccgtgaccctgcccgcaggcgtgacggaaattggcgagcgcagcttctacaacatctccgcgctgacggaattcaacttcagcgaatccctcaagaccatcggcgattttgccttctatggctgcggaaagctgacccgcatcgtcctgccggattccgtggagtccatcggcacgtccgcctttaaccgctgcagctccctgcaggaggttgtgttcggcaagggccttgcctccatcggcagcatgtgctttaactactgccacaagctcgagcgctttgtcgtggacgaggcgaacccgaacttcaagggcgtggacggcgtgctctacaacaagaacgtcgatacgctggtcctctatccgcagggccgtccggacgctgcctttaccatgccggagaccgtgaagcacatcggcccctacggcatctatgagccgcagctgctgcaggccgtcaccgtctcccccatccttgagaccatcgatgagttcggcatggcgggcatcgcactgaccggcgtactgaagcttcccgcaacgatcacgagcatccacttcaaggccttccagtatgacgacggcgtcaccgccttcgagctgccggagagctgcgcggcctatgccacggtcgacggcgtgctctatgacaaggctgtcacgcacctgcttgtctacccggccggccgcccggacgtcagctacgagacgccggacaccgtccgcaccgtcggcagctacgccttccactcctgcaaatacctcgagaatatccgcctgacgggcgttgaaaagctcgaggagcgtgcattctccaccgcaaaggcgctgaagcatatcgacctggccaattccgtccagcttatcgatacctacgcctgtgcgaacctcagcacgctgacgtacctcaccggcaccggcgcgctgcgtgccatcggcgcaaacgccttctccagcacgggtctggaattcgtgactctgcccgccatcgagctgctcggccagtatgccttcagcttctgcaaggacatgaagcgctgcgtcatcggcagcacggtgcagtcgatctatgccagtgcgttcaactactgcaagggcatgcatgaggcctacttccttggcgaccgtccggacagcgtcggcgcgaacatctttgccaagactgccagcgattttaccatctactatgacgcagccaaggctgcgacgtgggcgccgtccggcgagatcaagtggggcgaataccccatcgccccggccacgttccacaccgtgcgcttcctcgatgtcgatcacatcgtcctgctggagcagcccgttgccgaaggtcatgccgccatgctgccgcccgagccgcagcgcgaggaagccgccttcaccggctggtccgccgacacgtcgaacgtgcagcaggatatggatgttctggccctgtatgacggcctgtccgacaaggtgacggtcaacatcatcgccggagagaacggtaccgtcgatccgctcggcgagacggcctgcttctatgacggcgagttgaagctcacgatccagccgaacgagggctatcacaccgaccgtgtgctcgtaaacggtgagatcaccgcctgcgaggacaacacgctcacgcttgagcacatccgcagcaatacgacggtcactgttctgttcgcgcgcaacacctacaccgtcagccttgcagacggcctgaacggcaatgtctttgccgcgctgcccgtggaatacggcgaggatgccgttctgccggaggccacaccgtggcacgagggctaccacttcaccggctggagcgccgacggcagaaacatcaccgccgactgcaccatcacggcaaattacgagcagaattcctacaccgtccgctttgtggactatgacggcacggagctctccgtccagaccgtcctgcatggcgaggctgcggagctgcccgcttccccggcacgcgagggctataccttcgtcggctggagcggcgatgtctccgccgtcacctgtgatatgaccgtcacggccctgtatgcggtcaagacctgcaccgtcttcttcacggattgggacggcacggtcctgaagacgcaggaggtcaactacggcgaggccgccgaagcgccgcaggcaccgtcgcgtgagggctacaccttcaccggctggagcggcgactacacgaacgtcaccgagagccgcatcctcatggcgcagtatgaacgcctgtcgttcacggtccgcttcgtggactatgacggcacggagctgtcttctcagtccgtgttctggggcgaggctgccgcagcaccggaggccccggcgcgcgagggctacaccttcaccggctgggatgctgacttctcgaacatccgcaaggatctcaccgtcacggcgcagtaccgcttcgtgctgagcttcgccgacgtgtccgagacggactggttctgtgaggacgtccgctgggccgtggagaacggcatcttccagggtgtcggaaacggcctgttcgcaccggagcaggcactcacccgcggtcagctcgtcacggtcctgtaccgcatggtcggttctccagagccgaaggcagaggcaaacttccgcgatgtcgcggctgacagctactatgccgaggctgtcgcctgggccaacgagaacggcatcgtgctcggcatgggcgacgggacgtttgatccggattccgccgtcacgcgcgagcagatggtcacgatcttcttccgctatgccaagttctgcggcgtgaagaccgaggccggaacgctcgatgccttccgcgatgctgccagcgtcagcgattatgcccgcgaggccatgggctgggccgtgaaggccgggctcgtcaagggcgacggacaggatctcatgccgaaggcaacggcaagccgcgcacaggctgccgctatcctgcatcgcttcgcggctgtcgtggagaaataaacgtggcatttcccgcaagcatatgatataatgggcacataaacacatagagcccccggcatggccctgctgtgccgggggcgcttccaagaaaggagaatgcctcatgaagcagatcgttttacgctcccctgtagtgctgtatgagaccgtcgaggccctgtatcagcatgtaaacggcctgtccgtcgaggggcgcaagcgggatctgctccagaaattcggttccaagctcacccgcacggagcgggagcagatcgagcagagctgcgcgcttgccgcgaaggtggcagaggcagcctgcaccggactggaggacggcccggctctggagacgttcttccgcaagtgggagacggagagcaagtggcagaatacctgccttgccaagctgatgatcttcagcttcctcgatatccggacgaccgatctggagcagtcgctgcagcgcacccggcagtccgccgaggagcggctgaacggcccctatctcctgcgggacatcaattccggcggcatcagcttctatgcggcggagccggggcaaacgatcccgccgcttgccgaacagctggacggcctgatgatcgaggagcagtaccgctggcggctttataagctgctgacgaactattctgcgatgtttgacgagctttccgcccttctgcgccctgccgcgcagcgggtgcaggatattctgccgcggatcctgccgcagctgcagccggtctacgaccactgggagcaatacttttcctgtcatcccttttcggagctgctggagcgctttacgaaccagagcatgcagctggccgaaatggacacctatatcaacctcagcctcgtggcgggcggcgacatgatctatacctatgacgagctggcgtgcagtgactgccgtcaggtctacctcggcgtgctgctgcacgagaatttccgcgttgaccgcctgaagatgacggacgatggcatctgcagtctgctcaaactcgtcgcggaccggagcaagttcgagctgctgcgccgctgcgcgcgtcagccgtcctactgccagcagctttcccgggaaatgggactgacgaccgctaccatctcgcgccacatgagcctgctgcttgaagcaggcctcgtccgcgcccgcaagggcgagagccgcatttactacaccatcgaccgcgaggcagtgtctgccctctgtgatgccgtatatacgacgctcctgccggagcagcttcactgacagggtgatctttttgcctgcttttggacaatcgtaagaatttccctattgcggcattttgaaaaatacggtaaaatagggtcgataattcgcgccgcgtcagcggcagactggtggtaatcatatgagcgaaaccaagaaaaatgcagtgaagcgcatcggcgtgctcacgagcggcggcgacgcccccggcatgaacgcagccgttcgttccgttgtccgtgccgccgtttaccgcggcatcgaggtcgtaggcatccgccgcggctggaacggtctgatcaacggcgacattgtccgtctggacgagcgcagcgtggcacatatcatcgaccgcggcggcacgatcctctacaccgcccgcagcgaggaattccgcacggaggagggccagaagaaggccgtcagcacctgcaagctcctcggactggacggcattgtcgccatcggcggcgacggcacgttccgcggcgcgctggccctgtcgaaatacggcatctccgtcgtcggtctccccggcacgatcgacaacgacatcgcctgcacggattactgcatcggctttgacacggcagccaacacggccattgagtgcatcgataagctgcgcgacaccatgcaatcgcacgagcgctgctccgtcgtggaagtcatgggccgcaatgccggtcatctggcgctgtatgtcggccttgccgtcggcgcgacggccgtcctcgtgccggagagcaaggagagcttcgacaccgagatcatcgaaaagatccgcaatgcccgtctgaacggcttcacgcactatatggtcgtcgttgcggagggcgcaggcagcgccttcgatgtcgccaaccgcatccgcgatgagatcgcgctcgatccgcgcgtgaccgtcctcggccatgtgcagcgcggtggttcccccacggcccgcgaccgcgttatggcaacgcgtatgggctatcgcgccgtggagatccttgcggcgggcagcacgaaccgcatcgtcggcgtacatcagggcaagatcttcgacatcgacatcgacgaggcgctcagcatgaacaagggcctcgatatggaagaatgggccgttctggaagccatgacgggcctttaaaccgactgttggaaaagcctttcggcttttccaacaaaaagatttcagtccgctgcgcgcacgaatcgcccgccaaaagcgggcgattcgcacactaacggactgatttgtattttctccgacgtacacgccgccggagaaaaggatcctattggattcgccgcctgcgggcggcgaactctgcgaggcttttcagggcgcatgatgcgccctgatttttcgtgtcagagctttttgcggaactggatgagcttgcgctgcatgccctgcgcttcataaaaggccagtgccgacgtattgcggctgtcacaggccagctgcaggtccgtacagcccagcgcgcggccacggcggcacagctcctcgagcatggcatgtgcgatgccctgcctgcggcacgggccgtcgacacacagcgcgtcgagcatcatcacgcggcgcggcaggatcgacgcgccgtcaaagtcccgcacggcaaaggcggcataggccacgatgtgctccccgcggcaggccaccacgagctgatcccgctccaccatctcccggaattcctcacaggagatgggatgcttgacagagcgatagagatcggggtgcagcgagacgtgcagctcgtgcacctgccgggccagccggttcacatgctcaaagtcgggctccgccgcagtgcgaaacgtcagcatgcaagaacagccttgtggaagaccttcttgcccttgcggagcttgacgccgttcttgagctgctcggccgtgaagacaacgtcgatggatgcaaccttctcgtcatcagcgaacacgccgccctgctggacgagacggcgcgcctcggacttcgtgggcgcgagcttgcaggcgagcatcaggtccagaatgccgatcctgccatccgtgagctggctttccgtcagctccgttgtcggcatatcggcatcgttcgtgccgctgaggaacagagccctcgccgcatcacgggccttattggcctcttcctcgccgtggacgagcttcgtcagctcataggcgagaatttccttggccttgttgagctggctgccttcccagccctccatggcgttgatctcctcgagcgggaggaaggtcagcatgcgcaggcacttcatgacgtcggcatcgtcgatattgcgccagtactggaaaaagtcgaaaggcgtcgtcttgttcggatcgagccagactgcgcccttggctgtcttgcccatcttcttgccctcggagttgagcagcagcgtgatggtcatggcgtgggcgtccttgccgagcttgcggcggatgagctccgtgccgccaagcatgttgctccactgatcgttgccgccgaattccatgttgcagccgtagtgctggaacatgtagtagaagtcgtagctctgcatgatcatatagttgaattcgaggaagctcaggcccttctccatgcgctgcttgtagcactcggcgcgcagcatgttgttgacagagaagcaggcgccgacctcgcgcagcagctcgatatagttcagcggcttcagccaggcagagttgcgcagcatgatcgccttgccgtcggagaagtcgatgaatttctccatctggcgcttgaagcactctgcattatacgcgatggtctcctcagtgagcatctggcgcatgtcggtgcggccggacgggtcgccgatcatcgtcgtgccgtcgccgatgagggcgatgggcttattgcccgccatctgcaggcgcttcatcaggcacagggccatgaaatggccgacatgcagggagtctgccgtgcagtcaaagccgatatagaacgtggccttgccgttgtcgatcatttcgcggatcgcttcttcattcgtcacctgcgcgatgaggccgcgggcgacaagctcgtcataaagtttcataattacctcctgtttttgtcataaaaaacgccctctgtccaatggacagagggcgtaaaactacgcggtaccacctcgtcatccccggcgcttcacagcggcgggctcggggagtgcagccacactcctgcgcgatatcgggcgcacccgtccggccctactgcaggttcaggccggccgctccggaaggtatttcgccccgcttccctgccgccttacaccgaccggcggctctctgcgcgtggagcacgggggtacttcattccatcacagcgtttttctattggtatcctaacagaaaaccggtgctttgtcaagtccgactttccaacatttccgccgcgctctgcagcgtggtcggcgtgatgctcgcgccgccgatgatgcgggccagctcggctttgcgcccctcaaagtcaagcggcgtcacgctcgtgaacgtgcggccgtcgtgctctgccttggcgatgcggaaatgcgtgtccgccagcgcagcgatctgcggcagatgcgttacgcacaggacctgcttcgtgcgggacagggcgcggagcttttccgccacgcgctgagcagcccggccggagacaccggtgtcgacctcgtcgaagatcagcgtcggcacatggtccttctctgccagcacgtttttcagcgccagcatgatgcgcgccaactcgccgcccgaggcgaccttgctcagcggcttgagcgcctcgccgaggttggcggacatgtagaacgaaacggcgtccatgccgtcctgcgtcagatccgtctccgtgaagcggcaggcaaattgtactttcttcatatccagctgggacagctcgtccagcacgcgcgccgtcagggcctctgaggccgctttccggcattcgcgcaggcggagcgccgtttcccgtgctttctcttccgccgcggcgacctgcttttccagctgctgcagacgctcatcggagaactcaatctcctccagctctgcttttgccttgtccaggtagttcagaatggacgcacagtccgcgccgtacttccggcgcaggcggtgcagcaggtcaagacgctcctcaagctgctctagctcgtctgcggagtacgacaggcggtacagccggtcgcgaagctgctcggcggcgtcctgcgcctgatacatcaggtccgcgatcgtgtcgtgcagcggctgcagcgactcatcgaagcgtgcgctgtgcgccagatcacgctccgcctgcgtcaggagagccgccgcgccctgcgcctcgtccccgccgtccagacaggcggcggcatcgcgcagaccgtccgagagcttttcggcattttgcagcagacggcggcgggcctcgagctgcgtgtcctcatccggcttcagagccgcacgctcgatctcatcgatctgatagcgcagcgtctccgtgcggcggagcttttcactctcgtccatgcgcaggtgcgacatttcgcgctgcaggctctgcagggcggaaaactgtgcacggtactgttccagcaagggcacatcggccgcgaagctgtccagaaatgtcagatggtagttctcatcgaacagcgctgcggagtcgtgctggccgtggatgttgatgagctgaaggccgagcctccgcagaatgccgaccgtgacggccacgccgttcacgcggcagagattctttccgtccagatagatctcacgctgtacgacgacctccgtgtcatagggcacactgttctcggcaaaccacgcaagctccggcacatcgtcaaaaatggcgcgcacggcggcgcgcgccgcgccggtgcggatcatatcgcggtaggcgcgctcgccgagaatggcggagatcgcgtcgatgacgatggatttgcccgcgccggtctcgccggtcatgacgttaaagccgcgctcaaacaggatatccgcctgctcgatcacggcgatattttcaatgtgcagcaggcgaagcatggcggctccttactcgagcatgcggtgcagctcgcggcagaactccgcggcagattccttgtcgcgcatgatgacaagcgtcgtatcgtctccggacagcgagccgaccatattcggcatcttcagcgagtcgatgttcgcgcccgcagctgcgccgaggccaggcatggtcttgatgacgatgatattctgggcgtagtcgatgttcgtgacgcattcgcggaagatcacgcggaagcgcgcgccaaacctctcgccctccacgcggtgcggcaggcaatagcgatagcctcccatgccgtcgagggattttacgatctgcagctccttgatatcgcgggaaacggtggcctgggtgctgtggaagccgcactggcggagctgatcgagcagctgctcctgcgtctcgatgcaccggttctccacaagctcgatgatttttttctgacgatcgtttttcatggttcccacctacctgaatttattttgtatgatctcgaaaaagctgcgtccggtcaggcggagcagccgtgtgacatgctcagagcggcgtatggtaatgcgatcgccgctgctcaggcggacagctttgccgccgtccacggaaagaaaggcgtttttgcggccggtgcgggcaagctgcaccgtgatctcgcggtctgcagacgtaacgatggcacgtgtctgcatatcgtgggcgcagatcggcgtgagcacaatattctgtgcagcaggctcgaccagcgggccgccagccgacatggaataggccgtggaaccggtcggcgtgcagacgatcagcccgtcgccgctgaaggacatcatatccacgccgtcgccctgcacggacatctgcaccacgcgggcgaccgcgcccttcgtgatgacggcgtcgttcagcgcgtcctcctccagaatgacgcgtccctcgtgctccgcgcggacatggagcatcatgcgcggctcgacggagaaatcgtcatccgcaaggcggcgcagctccttgagctcgctgctctccagctccgccatgaagcccatggtgccgatgttcacgccgaggaccgggatcccggcctttgttgcagccttggaggcatggaggatcgtgccgtcgccgccgaagcagacgagtagatcggcatcgcgcagctcatggttcagctccgtcagaacaacattgtccggcagctcgaagctgcggtccacatcgaaggcgaggcagatgcgcgtttccagcccagcctcgcgcaggagcttatcggcgagcgtgacatatttgaagttccggtcccggtagggattcggcgtcaagacgatctttttcatagcttatcccctgagttctgcgtgcgcctgtgcaacgagcgcaggaacatccggcgtgatgccgccctgcggctccatgctcagatggccgagaaattcaatgttgccctcggggccgcgcaccggggaaaacgtcaggttgcggacggtcagctccagctccgcagccagcgccagaaaattctgcaggacctcctcatggacggccgggtcgcggacgatgcccttcttgccgaccttctcccggccggcctcgaactgcggcttgatgaggcagaggatctgccccgtcggcttcagcagtgcacggatggcgggcaggacgatccgcagggaaatgaaggaaacatccacaacggacaggtccagcggctctccgagctgctccggcgtgacatagcggatgttcgtccgctccatgcacaccacgcgcgggtcctgccggatgctccaggcaagctgcccatagccaacgtcgatggcgaaaacctttttcgcgcccttctgcagcaggcagtctgtaaagccgcccgtcgaggcgcccgagtcgctgcacacgaagcccgtcgggtcaacgccgaaatcgcgcagcgccttttcaagcttcaggccgccgcggctgacgtaggggcagggattgccccgcagctctacaacggcctcgtcctcgaccggcgtaccggccttgtccgatttctgcccgttgacatagacctcgccggacatgatgagcgcctgcgccttgcttcggctgtcgcacaggccgcgctccacgagaacgacatccaatcgttccttatgcttcattctgacatacctcccaggcagcgtcagcaagagatcttgcgtccaaccccgccaggcggtacagctccggcaccgcgccgtggggaataaagcggtcgccgagattgcacagccgcacaggcccgcccactccgcgagcacggagcgacgccaacagctccttgccggcgcagccgatgcacacggcctcctctgcaacgagcaggcggcccgtcttccgcatggaggcggcgacggtgcggacatcgagcggcttgatggagggcagcttcaggacctcggcagaaatgccgcgcgcctcaagcagcttcgccgcggaaaggacctcattgatgagcgtcccataggtgacgagggtgatatccttcccctcacgcagacgcggctgctctgcgatgccggtaaacgcgccgtcacacccgcggggatagcgcacggcaaccgggccggtcatctccagcacagcgcggcgcagcatctgacccagctccgcctgactggcggggcacaggacctgcatgccgggcacggagcgcagataattcacgtcgaacacgccgtggtgcgtctcgccgtctccgccgaccagtccggcgcggtctacggcaaatacgacatgcagtccgagcatggcaacatcctgcagcagcatgtcataagcgcgctgcaggaatgtggaatagatcgcaacaacggggatcattccctgcttggcaaggccgcccgccatagagacggcgtgcccctctgcaatgccgacatcgaagcagcgctccggatagtgggctgcaaaggcatcgaggccggtcccgcgcagcatggcggctgtaatggcgcagatgcgcggctcctgcgcgccgagcgcgtcaatcgtttcgctgaatgtgtcggaaaatgtcggaagatggccgcagcgcggctccatccccttttcggggtcgaaatggccgatgccgtggaacacatcggggttctcctcagcaggcgcgtagcccttgcccttctgcgtgatgacgtgcagcaggaccggatgccggcggtccttgacgagccggagcatatattccagccgtttcagatcatgcccatctacggggccataatattcaaagcccatctcctcaaagaacgtcgtgccgaagagcatacgcttccagtgctccttgagccggtgcgtcaggcggtagaggcactttccgccgggcacctttgccgtgacggcgcgataggcctttttgatgcggtaatagcccggccgcgtgcggatgagcgcaagatgctgggcaatgccgccgacgttcggcgtgatggacatgccgttgtcgttcaggataacgatgagctgctcgctgctctccccggcatcgttcatggcctcataggccaggccgccggtcattgcgccgtcgcccatcagggccacgacgtgatagtcctcatgctgcagcgtgcgggcacgcgccatgccgagggcggtggagacggagctggaggcgtgaccggccacaaacgggtccgtcacgctctccgacggctttgggaagcccgcaaggccgccgaacatacgcagtgtgcggaattcgtcccgccggccggtcaggatcttgtggacataggactgatgccccacgtcgaacaggagccggtcacggctcgtatcgaatacccgctccagcgcaacactcagctcgacaacgccgaggttcgaggccagatgaccgcccgtccgggcgacattcagcaccagaaactgtcgaatctcgtcgcaaagctggcgcagctgcgcgtcattcagcgcgcacagcgcctcgcgggaattgatggtatctaataaagtcaaaaatgacacaccctcagactgtcactttttctttttcttcgggagcttgccggtaaagagtgacttgatgtagtagatcagcttggaggtcgtatgcacgatctgcgtcgccttgccggtggcgatattcttgccgcaggccttgccggcgatcgttacaccggacaccagcgcggacatgatcagctgtgccaccgtttcggaattgagcatggtaagagcgcgcacggccacaacagcggaagccgagccggatacgacgccgcagatatcgcccacgacgtcattgcagaagctcgagaccttttccgcattgcgcagcaggtgcagagcctcggcagcgccggggacctttttggccgccatggcatggaagggcttctcctccgccgacatcacagccacgccgatgatatcgaacacgatgcctagcgccacgatcagcaaaagtacaagaaatgcctcgacaagccctgccccctccagcactgtggaggaaaagaacgagatcgtcgaggaaattacgactgccacaaaaaagactgtgacgatccatcgaatatgactgtttttcttttt
